United States Patent Application Publication US 2018/0126003 A1 - sequence listing, part 36

SEQ ID NO: 60130 - protein, 495 aa, Artificial Sequence
  derived and/or modified sequence
MAKRPGPPGSREMGLLTFRDIAIEFSLAEWQCLDHAQQNLYRDVMLENYRNLVSLGIAVSKPDLITCLEQNKEPQNIKRNEMVAKHPVTCSHFTQDLQSEQGIKDSLQKVILRRYGKCGQEDLQVKKCCKSVGECEVHKGGYNYVNQCLSATQNKTFQTHKCVKVFGKFSNSNRHKTRHTGKKHFKCKNDGKSFCMLSRLNQHQIIHTREKSYKCEECGKSFNCSSTLTRHKRIHTGEKPYRCEECGKAFSWSASLTKHKRIHTGEKPYTCEERGKVFSRSTLTNYKRIHTGEKPYTCEECGKAFSRSSTLTNHKRIHTGERPYKCEECGKAFSLSSTLKKHKIVHTGEKLYTCEECGKAFTFSSTLNTHKRIHTGEKPYTCEECGKAFSLPSTFTYHKRTHTGEKPYKCEECGKAFNCSSTLKKHKIIHTGEKLYKCKECGKAFTFSSTLNTHKRIHTGEKPYKCEECDQTFKWHSSLANHKNMHTGEKPYKYE

SEQ ID NO: 60131 - DNA, 1452 bp, Artificial Sequence
  derived and/or modified sequence
atgggcctgctgaccttcagagacatcgccatcgagttcagcctggccgagtggcagtgcctggaccacgcccagcagaacctgtacagagacgtgatgctggagaactacagaaacctggtgagcctgggcatcgccgtgagcaagcccgacctgatcacctgcctggagcagaacaaggagccccagaacatcaagagaaacgagatggtggccaagcaccccgtgacctgcagccacttcacccaggacctgcagagcgagcagggcatcaaggacagcctgcagaaggtgatcctgagaagatacggcaagtgcggccaggaggacctgcaggtgaagaagtgctgcaagagcgtgggcgagtgcgaggtgcacaagggcggctacaactacgtgaaccagtgcctgagcgccacccagaacaagaccttccagacccacaagtgcgtgaaggtgttcggcaagttcagcaacagcaacagacacaagaccagacacaccggcaagaagcacttcaagtgcaagaacgacggcaagagcttctgcatgctgagcagactgaaccagcaccagatcatccacaccagagagaagagctacaagtgcgaggagtgcggcaagagcttcaactgcagcagcaccctgaccagacacaagagaatccacaccggcgagaagccctacagatgcgaggagtgcggcaaggccttcagctggagcgccagcctgaccaagcacaagagaatccacaccggcgagaagccctacacctgcgaggagagaggcaaggtgttcagcagaagcaccctgaccaactacaagagaatccacaccggcgagaagccctacacctgcgaggagtgcggcaaggccttcagcagaagcagcaccctgaccaaccacaagagaatccacaccggcgagagaccctacaagtgcgaggagtgcggcaaggccttcagcctgagcagcaccctgaagaagcacaagatcgtgcacaccggcgagaagctgtacacctgcgaggagtgcggcaaggccttcaccttcagcagcaccctgaacacccacaagagaatccacaccggcgagaagccctacacctgcgaggagtgcggcaaggccttcagcctgcccagcaccttcacctaccacaagagaacccacaccggcgagaagccctacaagtgcgaggagtgcggcaaggccttcaactgcagcagcaccctgaagaagcacaagatcatccacaccggcgagaagctgtacaagtgcaaggagtgcggcaaggccttcaccttcagcagcaccctgaacacccacaagagaatccacaccggcgagaagccctacaagtgcgaggagtgcgaccagaccttcaagtggcacagcagcctggccaaccacaagaacatgcacaccggcgagaagccctacaagtacgagtag

SEQ ID NO: 60132 - DNA, 1488 bp, Artificial Sequence
  derived and/or modified sequence
atggccaagagacccggcccccccggcagcagagagatgggcctgctgaccttcagagacatcgccatcgagttcagcctggccgagtggcagtgcctggaccacgcccagcagaacctgtacagagacgtgatgctggagaactacagaaacctggtgagcctgggcatcgccgtgagcaagcccgacctgatcacctgcctggagcagaacaaggagccccagaacatcaagagaaacgagatggtggccaagcaccccgtgacctgcagccacttcacccaggacctgcagagcgagcagggcatcaaggacagcctgcagaaggtgatcctgagaagatacggcaagtgcggccaggaggacctgcaggtgaagaagtgctgcaagagcgtgggcgagtgcgaggtgcacaagggcggctacaactacgtgaaccagtgcctgagcgccacccagaacaagaccttccagacccacaagtgcgtgaaggtgttcggcaagttcagcaacagcaacagacacaagaccagacacaccggcaagaagcacttcaagtgcaagaacgacggcaagagcttctgcatgctgagcagactgaaccagcaccagatcatccacaccagagagaagagctacaagtgcgaggagtgcggcaagagcttcaactgcagcagcaccctgaccagacacaagagaatccacaccggcgagaagccctacagatgcgaggagtgcggcaaggccttcagctggagcgccagcctgaccaagcacaagagaatccacaccggcgagaagccctacacctgcgaggagagaggcaaggtgttcagcagaagcaccctgaccaactacaagagaatccacaccggcgagaagccctacacctgcgaggagtgcggcaaggccttcagcagaagcagcaccctgaccaaccacaagagaatccacaccggcgagagaccctacaagtgcgaggagtgcggcaaggccttcagcctgagcagcaccctgaagaagcacaagatcgtgcacaccggcgagaagctgtacacctgcgaggagtgcggcaaggccttcaccttcagcagcaccctgaacacccacaagagaatccacaccggcgagaagccctacacctgcgaggagtgcggcaaggccttcagcctgcccagcaccttcacctaccacaagagaacccacaccggcgagaagccctacaagtgcgaggagtgcggcaaggccttcaactgcagcagcaccctgaagaagcacaagatcatccacaccggcgagaagctgtacaagtgcaaggagtgcggcaaggccttcaccttcagcagcaccctgaacacccacaagagaatccacaccggcgagaagccctacaagtgcgaggagtgcgaccagaccttcaagtggcacagcagcctggccaaccacaagaacatgcacaccggcgagaagccctacaagtacgagtag

SEQ ID NO: 60133 - DNA, 1452 bp, Artificial Sequence
  derived and/or modified sequence
atgggactcttgaccttccgagacatcgccatcgagttcagtcttgcggagtggcagtgcctcgatcatgctcagcaaaacttatatagggatgttatgcttgaaaactaccgcaacctcgtgtccctgggcatcgctgtctcaaagccggaccttatcacctgtctggaacaaaacaaggagcctcagaacatcaaacggaatgagatggtggccaaacacccagtgacgtgcagccactttacacaggacctgcaatcagagcagggaatcaaagatagtttacagaaggtgattctgaggcgctatggcaagtgtggtcaggaggatctgcaagtaaaaaagtgttgcaagagcgtcggcgagtgcgaggtgcataaaggaggatacaactacgtaaaccagtgtctctcagcaacccagaataagacctttcagacccataaatgtgtcaaagtgttcggaaagttctccaattctaacagacacaaaaccaggcatactggtaagaaacatttcaagtgcaagaacgacggaaaaagcttctgcatgctgagtcggctgaatcagcaccagattatacatacccgagaaaaaagctataaatgcgaggaatgcggaaaatcttttaactgtagctccacactgacgagacacaaacgaatccataccggagaaaagccatacaggtgtgaagagtgtggcaaagccttttcttggtcagcgagcctgactaagcacaagcgaattcataccggtgagaagccctatacatgtgaggagcgggggaaagtgttctcccgcagtacactgaccaactataagaggatacacactggcgagaaaccttacacttgtgaggaatgcggcaaggccttctcccgctcctctacgctgacaaaccacaaacgaattcacacaggcgaacgcccatataagtgcgaagagtgcggaaaggcctttagcctttcaagcacgctcaaaaaacataagatagtgcatactggtgagaaactttacacctgtgaagagtgcgggaaagcattcactttttcctccactctaaacacgcacaagcggattcacaccggtgaaaaaccatacacgtgtgaggagtgcggcaaagccttctctctcccctcaactttcacctaccataagaggacgcatactggcgagaagccctataaatgtgaggagtgtggaaaggcttttaattgctcatctactcttaaaaagcacaaaattatccacaccggcgagaagttatataagtgtaaggaatgtggcaaggctttcaccttttcatcgaccctgaacacgcataagaggattcacactggagagaaaccttacaagtgcgaagagtgtgatcagacctttaaatggcactccagtcttgcaaatcataaaaacatgcacacgggcgagaaaccatacaaatatgaatag

SEQ ID NO: 60134 - DNA, 1488 bp, Artificial Sequence
  derived and/or modified sequence
atggctaaacgcccagggccacctggctctcgggaaatggggttactgacttttagggatattgccattgagttctccctagccgaatggcagtgcctcgatcatgcgcagcagaacttgtaccgtgatgtgatgttagagaactatcggaatctggtatctctggggatcgctgtgagtaagcctgacctgatcacatgtttggagcagaacaaggaaccccagaacatcaagcggaacgagatggttgccaaacatccggtcacttgttcccatttcacacaagatctgcagtctgaacaggggatcaaggactctttacagaaagtgatcctgagacgctacgggaagtgtggccaggaggacctgcaggtgaaaaagtgttgtaagagcgtaggcgaatgtgaggtgcacaagggtggatataattatgtgaaccagtgcctgagcgcaactcagaacaaaacatttcagacccacaaatgtgtaaaggtgttcgggaaattcagtaattccaacaggcacaaaaccagacacactggaaagaagcactttaagtgcaagaatgacggcaaaagcttctgcatgctctcacgcctgaatcagcatcagatcatccacacccgggaaaagagctataagtgcgaggaatgcgggaagagttttaattgtagctccaccctgactcgccataagagaattcataccggtgagaaaccctataggtgtgaggagtgcggcaaggccttttcatggtcagcgagccttacaaaacacaaaagaatccatactggagagaagccatatacatgtgaagagcgaggcaaggtgttttcccgctccactcttaccaattataaaagaatccacacaggcgagaaaccttacacctgcgaggaatgtggcaaggcctttagcagaagctccactcttacaaaccataaacggattcatacaggtgagcggccatacaagtgtgaagagtgtgggaaagctttctcactatctagtacgctcaaaaagcacaaaatcgttcacacaggggagaagctgtatacgtgtgaggaatgtggaaaagcctttactttcagttctaccctaaatactcacaagaggatacatacaggggagaagccgtacacttgtgaggagtgcggtaaagcatttagcctgccttctactttcacttaccacaagcgcactcatacgggagagaagccgtataagtgcgaggaatgtgggaaggccttcaattgctccagcacactgaagaagcataagatcattcacacaggggagaagctctataagtgcaaagagtgtggtaaggcttttacgttctcttcaactctcaacacccacaagaggatacacaccggagagaagccttataaatgcgaagaatgtgatcaaacattcaagtggcacagttccctcgccaaccacaagaatatgcacaccggcgagaaaccatacaagtacgagtag

SEQ ID NO: 60135 - DNA, 1452 bp, Artificial Sequence
  derived and/or modified sequence
atgggcctgctgaccttccgggacatcgccatcgagttcagcctggccgagtggcagtgcctggaccacgcccagcagaacctgtacagagatgtgatgctggagaactacagaaacctggtgtccctgggcattgctgtgtccaagccagacctgatcacctgcctggagcagaacaaggagccccagaacatcaagagaaatgagatggtggccaagcaccctgtgacctgcagccacttcacccaggacctgcagagcgagcagggcatcaaggacagcctgcagaaggtgatcctgcggcgctatggaaaatgtggccaggaggacctgcaggtgaagaagtgctgcaagtctgtgggggagtgtgaggtgcacaagggcggctacaactacgtgaaccagtgcctgagcgccacccagaacaagaccttccagacccacaagtgtgtgaaggtgtttgggaagttcagcaacagcaacagacacaagaccaggcacacaggcaagaagcacttcaagtgcaagaatgatggcaagagcttctgcatgctgagccggctgaaccagcaccagatcatccacacccgggagaagagctacaagtgtgaagaatgtgggaagagcttcaactgcagcagcaccctgaccaggcacaagaggatccacactggagagaagccctaccgctgtgaagaatgtgggaaggccttctcctggagcgccagcctgaccaagcacaagaggatccacactggagagaagccctacacctgtgaggagcggggcaaggtgttcagccgcagcaccctgaccaactacaagaggatccacactggagagaagccctacacctgtgaggagtgtgggaaggccttcagccgcagcagcaccctgaccaaccacaagaggatccacactggagagcggccctacaagtgtgaggagtgtgggaaggccttcagcctgagcagcaccctgaagaagcacaagatcgtgcacactggagagaagctgtacacctgtgaggagtgtgggaaggccttcaccttcagcagcaccctgaacacccacaagaggatccacactggagagaagccctacacctgtgaggagtgtgggaaggccttcagcctgcccagcaccttcacctaccacaagaggacccacactggagagaagccctacaagtgtgaggagtgtgggaaggccttcaactgcagcagcaccctgaagaagcacaagatcatccacactggagagaagctgtacaagtgcaaggaatgtgggaaggccttcaccttcagcagcaccctgaacacccacaagaggatccacactggagagaagccctacaagtgtgaggagtgtgaccagaccttcaagtggcacagcagcctggccaaccacaagaacatgcacactggagagaagccctacaagtatgaatag

SEQ ID NO: 60136 - DNA, 1488 bp, Artificial Sequence
  derived and/or modified sequence
atggccaagaggcctggccccccaggcagccgggagatgggcctgctgaccttccgggacatcgccatcgagttcagcctggccgagtggcagtgcctggaccacgcccagcagaacctgtacagagatgtgatgctggagaactacagaaacctggtgtccctgggcattgctgtgtccaagccagacctgatcacctgcctggagcagaacaaggagccccagaacatcaagagaaatgagatggtggccaagcaccctgtgacctgcagccacttcacccaggacctgcagagcgagcagggcatcaaggacagcctgcagaaggtgatcctgcggcgctatggaaaatgtggccaggaggacctgcaggtgaagaagtgctgcaagtctgtgggggagtgtgaggtgcacaagggcggctacaactacgtgaaccagtgcctgagcgccacccagaacaagaccttccagacccacaagtgtgtgaaggtgtttgggaagttcagcaacagcaacagacacaagaccaggcacacaggcaagaagcacttcaagtgcaagaatgatggcaagagcttctgcatgctgagccggctgaaccagcaccagatcatccacacccgggagaagagctacaagtgtgaagaatgtgggaagagcttcaactgcagcagcaccctgaccaggcacaagaggatccacactggagagaagccctaccgctgtgaagaatgtgggaaggccttctcctggagcgccagcctgaccaagcacaagaggatccacactggagagaagccctacacctgtgaggagcggggcaaggtgttcagccgcagcaccctgaccaactacaagaggatccacactggagagaagccctacacctgtgaggagtgtgggaaggccttcagccgcagcagcaccctgaccaaccacaagaggatccacactggagagcggccctacaagtgtgaggagtgtgggaaggccttcagcctgagcagcaccctgaagaagcacaagatcgtgcacactggagagaagctgtacacctgtgaggagtgtgggaaggccttcaccttcagcagcaccctgaacacccacaagaggatccacactggagagaagccctacacctgtgaggagtgtgggaaggccttcagcctgcccagcaccttcacctaccacaagaggacccacactggagagaagccctacaagtgtgaggagtgtgggaaggccttcaactgcagcagcaccctgaagaagcacaagatcatccacactggagagaagctgtacaagtgcaaggaatgtgggaaggccttcaccttcagcagcaccctgaacacccacaagaggatccacactggagagaagccctacaagtgtgaggagtgtgaccagaccttcaagtggcacagcagcctggccaaccacaagaacatgcacactggagagaagccctacaagtatgaatag

SEQ ID NO: 60137 - DNA, 1452 bp, Artificial Sequence
  derived and/or modified sequence
atgggcctgctgaccttccgggacatcgccatcgagttcagcctggcagaatggcagtgtctggaccacgcacagcaaaatctgtaccgcgatgtgatgcttgaaaactacaggaacctagtgtccttaggcattgccgtctccaagccagatctgatcacttgcctggagcagaataaagagccacagaacattaagcggaacgaaatggtggcgaagcatcccgtgacgtgcagccactttacccaggatctgcagtcagaacaaggcattaaagacagcttgcagaaggtaatacttcgtcggtatggcaaatgcggccaggaagacctgcaggtgaagaagtgttgtaaatccgtgggagagtgtgaggtgcacaagggcgggtataattacgtgaaccaatgtctgtccgccacgcaaaataagacctttcagacccacaagtgcgtcaaggtgttcggcaaattcagtaatagtaacaggcacaaaaccaggcatactgggaagaaacatttcaagtgcaagaacgatgggaagtcgttctgcatgctgagcagactgaaccagcatcaaatcattcacactagagaaaagagctacaagtgcgaggaatgtgggaaaagttttaactgcagtagcacgctcactcgccacaaaaggattcatacgggagagaaaccctaccggtgcgaagaatgtgggaaagcattctcatggtctgcttctttaacgaagcataaaagaatacacaccggcgagaagccatacacctgtgaggagagaggcaaggtgtttagccgctctacattgactaattataagcgcatacataccggggagaagccatacacctgtgaggagtgtggcaaggctttttcacggtcttcaaccttgaccaatcacaaacgaatccataccggcgagcgcccctacaagtgtgaggagtgcggaaaagcttttagcttgtcgagcactctgaagaagcacaagattgtacacacaggcgagaaactctacacttgcgaagagtgcggaaaggccttcacattctcctccactctgaacacccataagagaatccatacaggcgaaaagccatacacatgcgaggagtgtggcaaagcattctcactcccatctacttttacctaccataagaggacccacacaggagagaagccttataaatgcgaggagtgcggcaaagcctttaactgcagttcaaccctgaagaagcacaagattatccacaccggagaaaaattgtacaaatgtaaagagtgtgggaaagcatttaccttttcctccacgctgaatactcataaaagaatacacaccggagagaagccatacaagtgcgaagagtgtgatcagacatttaaatggcattcttccctggccaaccacaagaatatgcacaccggtgaaaaaccgtataaatacgagtag

SEQ ID NO: 60138 - DNA, 1488 bp, Artificial Sequence
  derived and/or modified sequence
atggccaagcggcccggcccccccggcagccgggagatgggcctgctgacattcagggacatcgcaattgaattcagtctcgctgagtggcagtgcctcgatcacgctcagcagaacctgtaccgggatgtgatgctggaaaactatcggaatttggtaagcctggggatcgcagtcagtaagcccgatctgataacatgcttggagcaaaacaaagagccccagaacatcaagcggaatgagatggtcgcgaagcaccctgtcacatgctcacactttactcaggacttacaatcagagcagggcattaaagacagtctgcagaaagtcattctgcgaaggtacggcaagtgtggacaggaagatttgcaagtgaaaaaatgttgtaagagtgtgggcgagtgcgaagtgcacaaaggaggctataattacgtcaaccagtgtctgtctgccacacagaataagacgttccagacacacaagtgcgtcaaggtatttggtaagttcagcaattcaaaccgccacaagacccggcacaccggaaagaaacattttaagtgtaagaacgatggaaagtctttttgtatgctgtcccggctgaaccagcaccagatcattcacaccagggagaaatcatataaatgcgaagaatgcggaaaaagttttaactgttcatcaactcttacacgacacaagcgcatccacaccggagaaaagccctacaggtgtgaggagtgtggtaaggccttttcttggagtgctagcttaaccaagcataaacgcatccacacgggagagaaaccatacacttgcgaagagcgtggaaaagtcttcagccggagcacactgacaaattataagaggattcacaccggggagaagccttatacgtgcgaggagtgtggcaaagcctttagcagaagcagcactctcaccaatcataaaagaattcacactggagaaaggccttataaatgtgaagaatgtggcaaggctttttctctgtcttcaactctgaagaaacacaaaattgtgcacacaggcgaaaaactgtacacgtgtgaggaatgtggcaaagcattcacattcagctccacccttaatacccacaaacggatccatacaggagagaaaccttacacttgtgaggagtgtgggaaagcttttagtctgcctagcacatttacctatcataagaggactcacactggggaaaagccatacaaatgtgaggagtgcgggaaggcctttaattgttcgagtaccttgaagaaacacaagattatacacactggagagaaactctataagtgtaaagagtgtgggaaggcatttacgttctccagcaccctcaacactcataagaggattcacacgggagagaaaccctataaatgcgaggagtgtgaccaaaccttcaagtggcactcctcactcgccaatcataaaaacatgcacaccggcgaaaagccttataaatatgagtag

SEQ ID NO: 60139 - DNA, 1452 bp, Artificial Sequence
  derived and/or modified sequence
atgggccttctaactttccgggacatagcaatcgagtttagcctcgctgagtggcaatgtctggaccacgctcagcagaatctctaccgggacgttatgctggagaactaccgaaatctggtgagtttggggatcgcagtgtccaagcccgacctgataacgtgcctggagcagaataaggaaccacagaatattaagcgcaacgagatggtggccaagcacccagttacgtgcagtcacttcacccaggacttacaatccgagcagggaataaaggactccttgcagaaagtcattctccggaggtatggaaagtgtggccaagaggacttgcaggtgaagaaatgctgtaaatcagtcggcgagtgtgaagtccataaggggggttacaactatgtgaaccaatgtttgagtgctacccaaaacaagaccttccagactcataaatgcgttaaggtcttcggtaagttcagcaactctaatcggcataaaacacgacatacagggaaaaagcatttcaagtgtaaaaacgacggaaaatccttctgcatgctgagccggctcaatcagcaccagattattcatacaagagagaagtcatataaatgcgaagaatgtggcaaatcctttaactgcagttctaccctcactcgccacaagcggatacatacgggcgagaagccctaccgctgcgaagagtgcggcaaggccttctcctggtctgcttctctgaccaagcacaagcgaatccacaccggggaaaaaccttacacttgtgaggaacggggaaaggtcttttctagatccaccctgaccaactataagagaatccacacaggcgaaaagccctacacctgtgaagagtgtggcaaagcttttagccggtcttccaccctcacaaatcataaaaggatccatactggcgagcgaccctacaagtgtgaagaatgcggaaaagccttctccctctccagcactctcaagaagcataaaattgtccataccggcgagaaactgtatacatgcgaggaatgtggcaaagctttcaccttttcatctacactgaacacccacaagcgtattcacaccggcgaaaagccatatacctgtgaggaatgcgggaaggctttctccctgccttccaccttcacctaccataagaggacgcacacaggggaaaagccttacaagtgtgaggagtgcggcaaggccttcaattgcagcagcaccctgaaaaagcataagatcatccatactggcgaaaaactgtacaaatgcaaagaatgtggcaaagcattcacattctctagcacgcttaatacacacaaaaggatccacacgggggaaaaaccctataagtgtgaagaatgtgaccagacattcaagtggcactcttcacttgccaatcacaaaaatatgcacactggggagaagccctacaaatacgaatag

SEQ ID NO: 60140 - DNA, 1488 bp, Artificial Sequence
  derived and/or modified sequence
atggctaagcgcccaggacctcccggtagtcgcgagatgggtctgttaacattccgtgatatcgccattgagttctctctggcggagtggcagtgcttagaccacgctcagcaaaatctgtaccgggatgtcatgttggagaactacagaaacctggtgtccctgggaatcgccgtctccaagcctgacttgatcacctgcctcgaacaaaataaggagccacaaaacatcaaaaggaatgagatggtcgctaagcaccctgttacttgctcccactttacccaggatctccagagcgagcaaggcatcaaagattcattgcagaaagtcattctgaggagatacgggaagtgtggacaagaggacttgcaggtaaagaagtgctgcaagagcgtcggtgaatgcgaggtgcacaagggcggatataactatgttaatcagtgtctgagcgccacccagaataaaactttccagactcataagtgtgttaaagtgttcggtaagttcagcaatagcaatagacataaaacgaggcataccgggaagaagcactttaagtgcaagaacgatggtaagagtttctgcatgctttcccgtctcaaccaacatcagattatacacacccgagagaagtcgtacaagtgcgaggagtgcggaaagtcattcaattgcagctctactctgaccagacacaaacggattcacaccggggaaaaaccttatcgctgcgaggaatgcgggaaagccttctcatggagtgcctcgctaactaagcacaaacggattcacacgggagagaaaccatacacttgtgaggaacgcggaaaggtgttctctagatccacactcacaaattataaaagaattcatacaggggagaagccctacacatgtgaggagtgcggaaaggccttctcccgaagcagtacactgacaaaccacaagcggatacacaccggtgaaagaccatataagtgtgaagagtgtggtaaggcattctcactgagttcgaccctgaaaaaacataaaattgtgcataccggggaaaagctttacacctgcgaggaatgcggcaaggcctttactttttcctctacactaaacactcacaagcggattcataccggagagaagccttacacatgtgaggaatgcggaaaggccttttcattaccctccaccttcacctaccacaaaaggacccatactggcgaaaaaccgtacaagtgtgaagagtgtggtaaggccttcaactgtagcagtactttgaagaagcataaaatcatccatacaggtgaaaagctgtacaagtgcaaagaatgtggcaaggccttcactttcagttctacactcaacactcataagaggatccacacaggagagaaaccatataagtgcgaagagtgcgaccagaccttcaaatggcattctagtctcgctaaccacaaaaacatgcatacaggtgagaagccttacaaatatgaatag

SEQ ID NO: 60141 - DNA, 3798 bp, Artificial Sequence
  derived and/or modified sequence
atgggactgttgacattcagagacatagctatagaattttctctggcggaatggcaatgcctggatcatgctcagcagaatttatatagagatgtgatgttagagaactacagaaacctggtctccctgggtattgctgtctctaagccagacttgatcacctgtctggagcaaaataaagagccccagaatataaagagaaatgagatggtagccaaacacccagttacatgttctcatttcacccaagaccttcagtcagagcagggcataaaagattcactccaaaaagtgatactgagaagatatggaaaatgtggacaggaggatttacaagtaaaaaaatgctgtaaaagtgtaggtgagtgtgaggtgcacaaaggaggttataattatgttaaccaatgtttgtcagctacccaaaacaaaacatttcagactcataaatgcgtcaaagtctttggtaaattttcaaattccaatagacacaagacaagacatactggaaagaaacatttcaaatgtaaaaacgatggcaaatcattttgcatgctttcacgcctaaatcaacatcagataattcatactagggagaagtcttacaaatgtgaagaatgtggcaaatcctttaactgctcttcaacccttactagacataaaagaattcatactggagagaaaccctacagatgtgaggaatgtggcaaagcttttagctggtctgcatcccttactaaacataagagaattcatactggagagaaaccttacacatgtgaagaacgtggcaaagtctttagccgctcaacacttactaactacaagagaattcatactggagagaaaccctacacatgtgaagaatgtggcaaagcctttagccgctcttcaacacttactaaccacaagagaattcatactggagagagaccctacaaatgtgaagaatgtggcaaagcctttagcttatcctcaacccttaagaaacataagatagttcatactggggagaaactctacacatgtgaagaatgtgggaaagcctttaccttctcctcaactctaaatactcataagaggattcatactggagagaaaccctacacttgtgaagaatgtggcaaagcctttagcttaccctcaaccttcacttaccacaagagaactcatactggagagaaaccctacaaatgtgaagaatgtggcaaagcctttaactgctcctcaacccttaagaaacataagataattcatactggagagaaactctacaaatgtaaagaatgtgggaaagcctttaccttctcctcaactctaaatactcataagaggattcatactggagagaaaccctacaaatgtgaagaatgtgaccaaacttttaagtggcattcaagtcttgctaatcataagaatatgcatactggagagaaaccctacaaatatgaataatgtggtaaagtccagccctcaggccttataatacataaaataatttatactggaaaaaatcactacaagtgtggagaatgtggccaattctttaaccagttccaaaccactgctgtccataagataattcatattggacaaaagtcttataaatgtaaaaaaaaaagtaacagcctgggtgacagagcaagaatccatcttaaaaaaaaaaaaaaagcgtaaatgtgattactgtaaaaagacctttcagaaaacataggcctttaaagcaaagactatttattctaaagacaaacattaaaacataaagaggattgtgtagtacctttatttgtattacggattttattgtacacattttatatcaaaggaaaaccctgaaacagatgctcaaactttgttgaacatcggagaatttatattggagagaaagtgtaaatgaatgtcaaaaaatatttgttcaaaaactacagtttagaaaacactagtttatactaaaaaaatatttttgcagatgcagtaaatggggaaaatatgtttaatcaaaaattaagtctacataaacatttgaggattcacagtagaaagaatgaaggtgctgaaacttcagacattacactaaatcagagtgttgagtgtaaaaaagatataaatctaacaatataaatttaaagaagtagatttatttggagatttataattacattcgaggtatgcttctttctttgtaaaaaaaaatatagattttctgaaaagcaaatagtaatgtaactcacatttcaaattacttcatgttgatcctttcttcccattgtttctgtgaaagtattggaccaattgttgaatcagagatatgagattgttttttataggtgtccattattcatgaactttcctatggatgagtaaggacattaagttgtaagatgcataatgaaaatctaaatggagaggttctttgtggttgacttataacattgttttagtgatgtataaggcgagcgttcagagtaatattctaaattctagtgaggaaaacctttgaacgtcagtagtaaattattttatcaattgtacctttatgtaaacaaagttgtttttaatgagctaaaactattgtgctttgaaagaagtattaagctgccattgactctatcgtgtctcatcttaaggttctgcgtaaaagatggtgacaatatactatttgttaatgtaggggaatgacatcactagtagtctcttttttgccagtgtttttgtttgtttgttttgagactaagtcttactctgtcacccagactggggtgcagtggtgcgatctcagctcactgcaacctccacctcctgggtccaagtgattctcctgcttcagcctcacaagtagctggaactagaggcaggcaccaccactcctggctaatttttgtatttttagtagagatgaggtttccccatgttggccaggctggtctcaaactcctgacctcaggtgatacacccacctcggtgtaccgaagtgctgggattacaggcatgagccaccatgcctggcctactagaggttttacacagcaaacaagttgaagaattttgttcccataggacaaatttgtacttttttaccttatttaatttttttttaatttttgtgggtagtgtgcatacacacttatggcatatatgagatatgttaacacatgcacataatatttaatgatcacaacagagtaaatgaggcattcatcaccttgagcatgtatttatcctttgtattacaaacaatcccattatacagttttagttatttcaatatgtgcaattgaattactattaaccacagggtcattttatgatcataaaaattacatgagtataattaatacccatacatttctgagtcttgattaaatatttttaaaattttgttttataaattttttgcacatgtggcatctctgctgacaaacaaaaacagacttttagtttcaatttacatagagttacatatacaaatatattactctaaagatataccagccgagcacagtggctcccagcattttgggagcctgaggtgggaggatcatttgaggttaggagttcaagaccagcctggccaacatggtgaaaccccatctctactaaaaatacaaaaaattagctgggcatggtggtgcatgcccatggtcccagttactcaggaggctgaggcaggagaattgcttgaacctcggaggtggaggtagcagtgagctgagatggtgctactgcactccagcctgggtgaaagagcgagaaaccatctcaaaaaaaaaaataaataaataaaagatataccttaagcat

SEQ ID NO: 60142 - DNA, 5197 bp, Artificial Sequence
  derived and/or modified sequence
ctttttgcttctctgcgcccagagctccagtccttctcttcactgctctgcgtcctctgctcctggaggccaagcctctgtggccttgtgtcctgcaagtattcgcagatttatggctaaaagaccgggaccccctggaagccgagaaatgggactgttgacattcagagacatagctatagaattttctctggcggaatggcaatgcctggatcatgctcagcagaatttatatagagatgtgatgttagagaactacagaaacctggtctccctgggtattgctgtctctaagccagacttgatcacctgtctggagcaaaataaagagccccagaatataaagagaaatgagatggtagccaaacacccagttacatgttctcatttcacccaagaccttcagtcagagcagggcataaaagattcactccaaaaagtgatactgagaagatatggaaaatgtggacaggaggatttacaagtaaaaaaatgctgtaaaagtgtaggtgagtgtgaggtgcacaaaggaggttataattatgttaaccaatgtttgtcagctacccaaaacaaaacatttcagactcataaatgcgtcaaagtctttggtaaattttcaaattccaatagacacaagacaagacatactggaaagaaacatttcaaatgtaaaaacgatggcaaatcattttgcatgctttcacgcctaaatcaacatcagataattcatactagggagaagtcttacaaatgtgaagaatgtggcaaatcctttaactgctcttcaacccttactagacataaaagaattcatactggagagaaaccctacagatgtgaggaatgtggcaaagcttttagctggtctgcatcccttactaaacataagagaattcatactggagagaaaccttacacatgtgaagaacgtggcaaagtctttagccgctcaacacttactaactacaagagaattcatactggagagaaaccctacacatgtgaagaatgtggcaaagcctttagccgctcttcaacacttactaaccacaagagaattcatactggagagagaccctacaaatgtgaagaatgtggcaaagcctttagcttatcctcaacccttaagaaacataagatagttcatactggggagaaactctacacatgtgaagaatgtgggaaagcctttaccttctcctcaactctaaatactcataagaggattcatactggagagaaaccctacacttgtgaagaatgtggcaaagcctttagcttaccctcaaccttcacttaccacaagagaactcatactggagagaaaccctacaaatgtgaagaatgtggcaaagcctttaactgctcctcaacccttaagaaacataagataattcatactggagagaaactctacaaatgtaaagaatgtgggaaagcctttaccttctcctcaactctaaatactcataagaggattcatactggagagaaaccctacaaatgtgaagaatgtgaccaaacttttaagtggcattcaagtcttgctaatcataagaatatgcatactggagagaaaccctacaaatatgaataatgtggtaaagtccagccctcaggccttataatacataaaataatttatactggaaaaaatcactacaagtgtggagaatgtggccaattctttaaccagttccaaaccactgctgtccataagataattcatattggacaaaagtcttataaatgtaaaaaaaaaagtaacagcctttaaccacccctcaaaccttaatgaacccaagagaatttatttaaaaaaatttttttgagacagagtctcactttgtcacccaggctggagtgcagtggcacgatgtcagctcactgcaacctctgcctcctgggttcaagcgattctcctgcctcagcctcctgagtagctggaattacaggcacgtgcaaccacactggctgagttttgtatttttagtagagatggggtttcaccattttgaccaggctggtctcaaactcctgacttcaggtgaaccacctgcctcagcctcccaaagcctaagagaatttatattagagagactctacaaaggtcaaaaatgtgacaaaacatttaagcacatctcaggccttacacaatatcagataattcattctagagacaaaccctacaaaaacaatgtggtaaagcttttacctagtcttgaacccttattatacactaaaagaattgatactgaagaaaaaccctacaataaggaatatggaaatgtcttttaaaagtcctcaaactttttgtttgaataaatgtaaaataattgatactggagagaacccctgcaattgtaaaaaaaaaaaaaaatgtggcaaagcttttaactggttctccatctttattaattaaaatattttatactggagagaaactctacatacataaaaaatgtgacagcatttaaccacacctgacatttttctaaaatagagaaatcatactggtgaaaaactctagaaatgtgttaaatgaggtaagtcctttaaatggtagttgcatgttatggtaggtaagataatttatactgaagaaaactcaggcaaatatgaaaaatgtggcaaaacttttaacaaattttcccatcttattgcacaggaagccttttatactagagaaaaattgtaaaaatataaagaatgtgaaaagccattaatgtctgttcacatcttactcaatatcagaaagtttatacttaacaaaagcattataggctagatgtggtggctcatgcctgtaatcccagcactttgggagctcatggcaggtggatcatgaggtcaggagttcaagaccagcctggctaacatggtgaatccccatctctactaaaaacacaaaaattagacaggcatggtggtgtgcacctgtaatcccagctactcaggaggctgaagcaggagaattgcttgaacccaggtggtggaggttgcagtgagtcaagatcaccccaccatactccagcctgggtgacagagcaagaatccatcttaaaaaaaaaaaaaaagcgtaaatgtgattactgtaaaaagacctttcagaaaacataggcctttaaagcaaagactatttattctaaagacaaacattaaaacataaagaggattgtgtagtacctttatttgtattacggattttattgtacacattttatatcaaaggaaaaccctgaaacagatgctcaaactttgttgaacatcggagaatttatattggagagaaagtgtaaatgaatgtcaaaaaatatttgttcaaaaactacagtttagaaaacactagtttatactaaaaaaatatttttgcagatgcagtaaatggggaaaatatgtttaatcaaaaattaagtctacataaacatttgaggattcacagtagaaagaatgaaggtgctgaaacttcagacattacactaaatcagagtgttgagtgtaaaaaagatataaatctaacaatataaatttaaagaagtagatttatttggagatttataattacattcgaggtatgcttctttctttgtaaaaaaaaatatagattttctgaaaagcaaatagtaatgtaactcacatttcaaattacttcatgttgatcctttcttcccattgtttctgtgaaagtattggaccaattgttgaatcagagatatgagattgttttttataggtgtccattattcatgaactttcctatggatgagtaaggacattaagttgtaagatgcataatgaaaatctaaatggagaggttctttgtggttgacttataacattgttttagtgatgtataaggcgagcgttcagagtaatattctaaattctagtgaggaaaacctttgaacgtcagtagtaaattattttatcaattgtacctttatgtaaacaaagttgtttttaatgagctaaaactattgtgctttgaaagaagtattaagctgccattgactctatcgtgtctcatcttaaggttctgcgtaaaagatggtgacaatatactatttgttaatgtaggggaatgacatcactagtagtctcttttttgccagtgtttttgtttgtttgttttgagactaagtcttactctgtcacccagactggggtgcagtggtgcgatctcagctcactgcaacctccacctcctgggtccaagtgattctcctgcttcagcctcacaagtagctggaactagaggcaggcaccaccactcctggctaatttttgtatttttagtagagatgaggtttccccatgttggccaggctggtctcaaactcctgacctcaggtgatacacccacctcggtgtaccgaagtgctgggattacaggcatgagccaccatgcctggcctactagaggttttacacagcaaacaagttgaagaattttgttcccataggacaaatttgtacttttttaccttatttaatttttttttaatttttgtgggtagtgtgcatacacacttatggcatatatgagatatgttaacacatgcacataatatttaatgatcacaacagagtaaatgaggcattcatcaccttgagcatgtatttatcctttgtattacaaacaatcccattatacagttttagttatttcaatatgtgcaattgaattactattaaccacagggtcattttatgatcataaaaattacatgagtataattaatacccatacatttctgagtcttgattaaatatttttaaaattttgttttataaattttttgcacatgtggcatctctgctgacaaacaaaaacagacttttagtttcaatttacatagagttacatatacaaatatattactctaaagatataccagccgagcacagtggctcccagcattttgggagcctgaggtgggaggatcatttgaggttaggagttcaagaccagcctggccaacatggtgaaaccccatctctactaaaaatacaaaaaattagctgggcatggtggtgcatgcccatggtcccagttactcaggaggctgaggcaggagaattgcttgaacctcggaggtggaggtagcagtgagctgagatggtgctactgcactccagcctgggtgaaagagcgagaaaccatctcaaaaaaaaaaataaataaataaaagat

SEQ ID NO: 60143 - protein, 565 aa, Artificial Sequence
  derived and/or modified sequence
MASNNHWFQSSQVPSFAQMLKKNLPVQPATKTITTPTGWSSESYGLSKMASKVTQVTGNFPEPLLSKNLSSISNPVLPPKKIPKEFIMKYKRGEINPVSALHQFAQMQRVQLDLKETVTTGNVMGPYFAFCAVVDGIQYKTGLGQNKKESRSNAAKLALDELLQLDEPEPRILETSGPPPFPAEPVVLSELAYVSKVHYEGRHIQYAKISQIVKERFNQLISNRSEYLKYSSSLAAFIIERAGQHEVVAIGTGEYNYSQDIKPDGRVLHDTHAVVTARRSLLSKNPAMMEKSIFCTEPTSNLLTLKQNINICLYMNQLPKGSAQIKSQLRLNPHSISAFEANEELCLHVAVEGKIYLTVYCPKDGVNRISSMSSSDKLTRWEVLGVQGALLSHFIQPVYISSILIGDGNCSDTRGLEIAIKQRVDDALTSKLPMFYLVNRPHISLVPSAYPLQMNLEYKFLSLNWAQGDVSLEIVDGLSGKITESSPFKSGMSMASRLCKAAMLSRFNLLAKEAKKELLEAGTYHAAKCMSASYQEAKCKLKSYLQQHGYGSWIVKSPCIEQFNM

SEQ ID NO: 60144 - protein, 241 aa, Artificial Sequence
  derived and/or modified sequence
MASNNHWFQSSQVPSFAQMLKKNLPVQPATKTITTPTGWSSESYGLSKMASKVTQVTGNFPEPLLSKNLSSISNPVLPPKKIPKEFIMKYKRGEINPVSALHQFAQMQRVQLDLKETVTTGNVMGPYFAFCAVVDGIQYKTGLGQNKKESRSNAAKLALDELLQLDEPEPRILETSGPPPFPAEPVVLSELAYVSKVHYEGRHIQYAKISQIVKERFNQLISNRSEYLKYSSSLAAFIIER

SEQ ID NO: 60145 - DNA, 1698 bp, Artificial Sequence
  derived and/or modified sequence
atggccagcaacaatcactggttccagtcttctcaggtgccctctttcgcacagatgctaaagaagaatctgccggttcagccagccacaaagaccatcactactccaactggctggtcgagtgaatcttacggcctttcgaagatggcaagcaaggtgactcaggtgaccggaaatttcccagagccattactgagcaaaaacctgagcagtatcagcaaccctgtcctacctccaaagaagatccccaaggaattcattatgaaatataaacgtggagagatcaatccggtgtctgcacttcatcagttcgcacagatgcaacgtgtgcagctggacctgaaagagaccgtaactaccggtaatgtgatgggaccctattttgctttttgcgctgtggttgacggaatccagtacaagacaggattggggcaaaacaaaaaggaatcacgatcaaacgcagcaaaattagccctcgacgaactgctccagcttgacgagcccgaaccacgcatcctcgagaccagcggtccgcctccctttcccgctgaacccgtggttctcagcgagctcgcctacgtgtctaaggttcattatgagggtaggcatatccaatacgcgaagatatcacaaatagtgaaggagaggtttaaccagctgatcagcaatcgcagtgagtatctgaaatactcctcttcacttgcggcattcatcatcgagcgggcagggcaacatgaagtcgtggcaataggaaccggagagtataattattctcaggatataaagccagatgggcgggtgcttcacgacacacacgctgttgtcaccgcccgccgaagtcttctgagtaagaaccctgctatgatggaaaagtccatattttgcactgagcccacttcaaacttgctcactctcaaacagaacatcaatatctgcttgtatatgaaccagcttcccaaaggatctgcccagattaagagtcaactccgcctgaacccacacagcatctcagctttcgaagctaacgaagaactgtgcctccatgttgccgtggaggggaagatctatctgactgtgtactgtcctaaggatggtgttaatcgtataagttctatgtcttcctcggataaactcacaagatgggaggtccttggcgtgcagggcgccctgctgagtcatttcatacagcccgtgtatatcagctcaatcctcattggcgatggaaactgttctgacactagagggctagaaattgcgataaaacagagggtcgatgacgcactgacctcaaagctaccaatgttctacctggtaaataggccacacatcagcctggtgccctcggcgtatcctctgcagatgaatctcgagtataagttcctgagccttaattgggcacagggagacgtatccctggagatcgtggacgggctgtccgggaaaattacagagagtagccctttcaaaagtggcatgtctatggcatcccggctgtgcaaagcagccatgctgtccaggttcaatctgctggcgaaggaggccaagaaggagttgcttgaggcaggtacctatcacgctgcaaagtgtatgtcggcttcctaccaagaagcgaagtgcaaactgaaatcatatttacaacaacatggctacgggagttggattgttaagagcccatgcatcgagcaattcaacatgtag

SEQ ID NO: 60146 - DNA, 726 bp, Artificial Sequence
  derived and/or modified sequence
atggccagcaataatcattggttccagagcagccaggtgccttctttcgcacagatgctgaaaaagaatctgccggtgcagcccgcaactaagactattacgacaccaaccgggtggtcaagcgagtcatatggcctttctaagatggcaagcaaggtaactcaagttacaggcaactttccagagcctcttctctccaagaatctgagcagtattagcaaccctgtccttcctcctaaaaagattccaaaagagtttattatgaaatacaaacgcggcgagattaaccccgtgtccgcactgcaccagtttgcgcagatgcagcgagtgcagctcgatctcaaagaaactgtgacaactggaaatgtaatggggccctattttgcattctgcgctgttgtggatgggatacaatataagacgggactcggtcagaataagaaagaaagccgctccaacgcagcaaagcttgccctggacgagctcctgcagcttgatgagcccgaacctcgcatactggagacatccggcccgcctcctttccccgcagagcccgtggtcctttctgagctggcgtacgtttctaaggtgcattacgagggcaggcacattcagtacgccaagatctctcagatagtgaaggagcggttcaatcagctaatttccaaccgcagcgaatacttgaaatattccagttccctggcagcattcataatcgagagatag

SEQ ID NO: 60147 - DNA, 1912 bp, Artificial Sequence
  derived and/or modified sequence
acggttagtgattggacgaagcagggcgcgggggcgcaagcccgggtcctgcaggggcgacgcgaggcctcttttgaaagatgcggccctgaccctgtgaacctcgcgcagagcggcctgaagcgagaggttgaggctgggaggtgagaaaatggctagcaacaatcattggtttcagagttcgcaggtccccagctttgcccagatgctgaaaaagaacctgccagttcaaccagcgacaaagacgataactacacccacaggatggtcctcagaaagttacggcctgtccaagatggcatccaaggttacgcaagtaacgggtaattttccagagccgttgctttccaagaatctttcatctatttcaaatcctgtccttcctccaaaaaaaatacctaaggaatttataatgaaatacaaacgtggagagataaatcctgtgtcagccttgcaccagtttgcacaaatgcagcgagttcagcttgaccttaaggaaactgtgacaacaggtaatgttatgggaccatattttgccttttgtgctgtggtggatggtattcagtacaagactggactgggacaaaataaaaaggagtctagatccaatgcagcaaaattagctcttgatgagcttctacaactggatgaacctgaaccacgaattttagaaacatcaggtcctcctcctttccctgcagaacctgttgttttatctgaactagcatatgtttcaaaagtacattatgaagggagacatattcaatatgcaaagatttcacagatcgttaaagaaagatttaatcaactaatttctaatcgttcagaatacctgaaatatagcagttcattggctgcttttataattgaaagagctggacaacatgaggttgtagctataggcacaggtgaatacaattacagccaggacattaagccagatggaagagtattgcatgacactcatgctgttgttacagcaagaaggtctcttcttagcaaaaatcctgctatgatggaaaaatcaatattttgtacagaaccaacttctaatctactcactcttaaacagaatatcaacatttgcctttacatgaaccagttgcctaaaggatcagcccagattaagtcacagttacgtcttaatccacattctatatctgcatttgaagccaatgaagaactctgtctccacgtggctgttgaaggcaaaatttatctgactgtttactgtcctaaagatggtgttaatagaataagcagtatgtcctcaagtgacaaattgaccagatgggaagtgcttggtgtacagggagcattgctgagtcattttatacagccagtttacatcagcagtatacttattggtgatgggaattgcagtgataccagaggcttagaaatcgctataaagcaacgtgttgatgatgcactcacttcaaaacttccaatgttttacttagtcaacagacctcatattagtttagtaccctctgcatatccccttcaaatgaacttggaatataaatttctgagtctgaattgggcacaaggagatgtttctttggagattgtggatggcctgagtgggaagatcactgaaagttccccatttaaaagtggtatgtcaatggcaagtcggctttgtaaggctgcaatgttaagtcggtttaacctgcttgccaaagaagctaaaaaagaattacttgaagctggtacatatcatgcagctaagtgtatgtctgcctcctatcaagaagctaaatgtaagttgaaatcctacttacaacaacatggctatggatcctggattgtgaaatctccctgcatagagcaatttaacatgtgaaataggcaatccattatcacattaaaaatcttgttttgtttggtgtgttttgactagtaaaaa

SEQ ID NO: 60148 - DNA, 977 bp, Artificial Sequence
  derived and/or modified sequence
gagacggttagtgattggacgaagcagggcgcgggggcgcaagcccgggtcctgcaggggcgacgcgaggcctcttttgaaagatgcggccctgaccctgtgaacctcgcgcagagcggcctgaagcgagaggttgaggctgggaggtgggagcaacggcggcggcggccgcctgcgagcccccggcctgaggcgcagcagcagctgcccgtcttcccacatagagggcaggaaggacaactttggtgagaaaatggctagcaacaatcattggtttcagagttcgcaggtccccagctttgcccagatgctgaaaaagaacctgccagttcaaccagcgacaaagacgataactacacccacaggatggtcctcagaaagttacggcctgtccaagatggcatccaaggttacgcaagtaacgggtaattttccagagccgttgctttccaagaatctttcatctatttcaaatcctgtccttcctccaaaaaaaatacctaaggaatttataatgaaatacaaacgtggagagataaatcctgtgtcagccttgcaccagtttgcacaaatgcagcgagttcagcttgaccttaaggaaactgtgacaacaggtaatgttatgggaccatattttgccttttgtgctgtggtggatggtattcagtacaagactggactgggacaaaataaaaaggagtctagatccaatgcagcaaaattagctcttgatgagcttctacaactggatgaacctgaaccacgaattttagaaacatcaggtcctcctcctttccctgcagaacctgttgttttatctgaactagcatatgtttcaaaagtacattatgaagggagacatattcaatatgcaaagatttcacagatcgttaaagaaagatttaatcaactaatttctaatcgttcagaatacctgaaatatagcagttcattggctgcttttataattgaaagag

SEQ ID NO: 60149 - DNA, 1698 bp, Artificial Sequence
  derived and/or modified sequence
atggccagcaacaaccactggttccagagcagccaggtgcccagctttgcccagatgctgaagaagaacctgcctgtgcagcctgccaccaagaccatcaccacccccaccggctggagcagcgagagctatggcctgagcaagatggccagcaaggtgacccaggtgactggaaacttccctgagcccctgctgagcaagaacctgagcagcatcagcaaccctgtgctgccccccaagaagatccccaaggagttcatcatgaagtacaagagaggagagatcaaccctgtgtctgccctgcaccagtttgcccagatgcagagggtgcagctggacctgaaggagaccgtgaccactggaaatgtgatgggcccctactttgccttctgtgctgtggtggatggcatccagtacaagacaggcctgggccagaacaagaaggagagccgcagcaatgctgccaagctggccctggatgagctgctgcagctggatgagcctgagccccgcatcctggagaccagcggccccccacccttccctgctgagcctgtggtgctgtctgagctggcctacgtgtccaaggtgcactatgagggccgccacatccagtatgccaagatcagccagatcgtgaaggagcgcttcaaccagctgatcagcaacagaagtgagtacctgaagtacagcagcagcctggccgccttcatcatcgagcgggccggccagcacgaggtggtggccatcggcaccggggagtacaactacagccaggacatcaagccagatggccgggtgctgcatgacacccatgctgtggtgacagcccggcgcagcctgctgagcaagaacccagccatgatggagaagagcatcttctgcacagagcccaccagcaacctgctgaccctgaagcagaacatcaacatctgcctgtacatgaaccagctgcccaagggcagcgcccagatcaagagccagctgcggctgaacccccacagcatcagcgcctttgaggccaatgaggagctgtgcctgcacgtggccgtggagggcaagatctacctgactgtgtactgccccaaggatggagtgaaccgcatcagctccatgagcagcagtgacaagctgacccgctgggaggtgctgggcgtgcagggcgccctgctgagccacttcatccagcctgtgtacatcagcagcatcctgattggagatggcaactgcagcgacacccggggcctggagatcgccatcaagcagagggtggatgatgccctgaccagcaagctgcccatgttctacctggtgaaccggccccacatcagcctggtgcccagcgcctaccccctgcagatgaacctggagtacaagttcctgagcctgaactgggcccagggagatgtgtccctggagatcgtggatggcctgagcggcaagatcacagagagcagccccttcaagagcggcatgtccatggccagccggctgtgcaaggccgccatgctgagccgcttcaacctgctggccaaggaggccaagaaggagctgctggaggccggcacctaccacgccgccaagtgcatgtctgccagctaccaggaggccaagtgcaagctgaagagctacctgcagcagcacggctacggctcctggatcgtgaagagcccctgcatcgagcagttcaacatgtag

SEQ ID NO: 60150 - DNA, 726 bp, Artificial Sequence
  derived and/or modified sequence
atggccagcaacaaccactggttccagagcagccaggtgcccagctttgcccagatgctgaagaagaacctgcctgtgcagcctgccaccaagaccatcaccacccccaccggctggagcagcgagagctatggcctgagcaagatggccagcaaggtgacccaggtgactggaaacttccctgagcccctgctgagcaagaacctgagcagcatcagcaaccctgtgctgccccccaagaagatccccaaggagttcatcatgaagtacaagagaggagagatcaaccctgtgtctgccctgcaccagtttgcccagatgcagagggtgcagctggacctgaaggagaccgtgaccactggaaatgtgatgggcccctactttgccttctgtgctgtggtggatggcatccagtacaagacaggcctgggccagaacaagaaggagagccgcagcaatgctgccaagctggccctggatgagctgctgcagctggatgagcctgagccccgcatcctggagaccagcggccccccacccttccctgctgagcctgtggtgctgtctgagctggcctacgtgtccaaggtgcactatgagggccgccacatccagtatgccaagatcagccagatcgtgaaggagcgcttcaaccagctgatcagcaacagaagtgagtacctgaagtacagcagcagcctggccgccttcatcattgaaagatag

SEQ ID NO: 60151 - DNA, 1698 bp, Artificial Sequence
  derived and/or modified sequence
atggccagcaacaaccactggttccagagcagccaggtgcccagcttcgcccagatgctgaaaaagaacctccctgtgcagcctgccacaaagacaatcactacgcccacaggttggagctccgagagttacggtctgtctaagatggcttctaaggtgacacaagtcacaggaaattttcctgagcctctgctcagcaagaatctgtcatctatctcaaatccagtgttgcctcctaagaaaatccctaaagagtttattatgaaatataaaaggggcgaaattaatcccgtgtctgcactgcaccaattcgctcagatgcagcgcgtgcagctcgatcttaaggagacagtgactacaggcaatgttatgggaccctacttcgccttttgtgctgtggtggatgggatccagtacaaaacaggcctgggccagaacaagaaggaaagccggagtaacgctgccaaattggccctcgacgagctcttgcaattggatgagcctgagcctcgcattctggaaacgtcgggaccgcctcctttcccagccgagcccgtcgtgttatctgagctggcctatgtctctaaagtacactacgagggcagacacatccaatacgcaaaaatctctcagatcgtcaaggaaaggttcaaccaactcatctccaatagatccgagtatttaaaatactctagctccctagccgccttcatcatcgagcgggctggacagcacgaggtagtcgccatcggtacaggcgagtacaattactcacaggacattaagccggacggacgagtcttacatgacacccacgccgttgtcactgctcggaggagcctgcttagtaaaaatccagcaatgatggaaaagtcaattttctgtaccgagcccactagcaatctgcttaccctcaagcagaatatcaatatatgcctatacatgaaccagctccctaagggcagtgctcaaatcaagtcccaactccgactgaatccccattctatcagcgccttcgaggcaaacgaagaactgtgtctgcacgtagccgtcgagggaaaaatctacctgacagtgtattgcccaaaagacggcgtcaacagaatatcttccatgagcagctctgataaattgaccaggtgggaagttcttggggtgcagggcgcacttttgagccactttatacagccagtctatatcagcagtatcttgataggggacggaaactgctcagatacaagagggctggaaattgccattaaacagcgcgtggacgacgccttaacttcgaagttgcctatgttctatcttgtgaatcgtcctcatatttccctagtcccctccgcctatcccctgcagatgaatctggagtacaagtttctgtctctgaattgggcccaaggggacgtgtcgctggaaatcgtggacggtctgagcgggaagatcacagagagctccccctttaagtctggcatgagcatggctagtcggctctgcaaggcagccatgctgtctagatttaacttgctggccaaagaagctaaaaaggagttgttggaagcaggaacataccacgcagccaagtgtatgtcagcaagctatcaggaagcgaaatgtaagctgaaaagctatttacaacagcacggatatggtagctggatcgttaaaagtccatgcatagagcaatttaacatgtag

SEQ ID NO: 60152 - DNA, 726 bp, Artificial Sequence
  derived and/or modified sequence
atggccagcaacaaccactggttccagagcagccaggtgcccagctttgcccaaatgctcaaaaaaaacctcccagtccagccagctactaagaccatcacgacaccaaccggctggagctctgagtcctatggtctgagtaaaatggcaagcaaagttacacaggttacaggcaatttcccagagccgctgttgtccaaaaacctttcctctatatccaatccagtcctgcctccaaagaagataccaaaggagttcattatgaagtacaagagaggagaaatcaaccccgtgtcagcgctgcatcagttcgcccagatgcaacgcgtgcagttagatctgaaagagacagtgactacaggcaacgttatggggccgtacttcgccttttgcgccgtggtggacgggatccaatataagactggcttggggcaaaacaaaaaagaatcccgcagtaatgcagccaagctggccctggatgagctgctgcagctggatgaacctgagccaagaattcttgaaactagtggaccaccaccttttcccgccgaacccgtagttcttagtgaactggcctacgtcagcaaggtccactatgagggccggcatattcagtacgcgaaaatctcccagattgtaaaagagaggtttaatcagctaattagtaaccgatcagaatatctgaagtactcttcaagcctggctgcattcattatcgagagatag

SEQ ID NO: 60153 - DNA, 1698 bp, Artificial Sequence
  derived and/or modified sequence
atggcatcaaacaatcattggttccagagcagtcaggtgcccagtttcgcacaaatgcttaaaaagaatttgccggtacagccagccaccaaaacgatcacaacccctacaggctggagcagtgagtcgtacggtctcagcaaaatggcaagtaaggtcacccaagtgacaggcaattttcccgagccactactgagtaagaatttatctagtatcagtaacccagttctccctccaaaaaagatacccaaggagtttatcatgaagtataagaggggggaaataaacccagtgtccgccttgcatcagttcgcgcagatgcagcgcgtgcagttagacctgaaagagactgtgactaccggaaatgttatgggcccatatttcgccttctgtgcagttgtggatggaattcaatataaaactgggctcgggcagaacaaaaaagaatcccgctctaatgcggcaaaactggcccttgatgagctgctgcagttggacgaacccgagcctagaatcctcgaaacttccggacctccaccctttccagccgagccagttgtcttgtcagaactggcgtacgtatcaaaggtgcattatgaaggtcggcacattcaatacgcaaagattagccagatagtcaaggagcgtttcaaccaacttatttccaataggtctgagtacctgaaatattcttctagcttggcggcattcatcatcgaacgcgctggccagcacgaggtggtggcaatcgggaccggcgaatacaactattctcaagacattaagcccgacgggcgagttctgcacgacactcatgccgtcgtcacagcgagacggtccctgttgtcaaagaatccagcaatgatggaaaagagtatattttgtacagaaccaaccagtaacttactaacattaaagcaaaatataaacatctgcctctacatgaatcaactgcccaaaggctcagcacagataaagagtcaactccgactgaatccacattctatctccgcctttgaagccaatgaagagttgtgccttcatgttgccgtggagggaaagatttatttgactgtatattgtcctaaggatggagtgaatcggatctcttcaatgtcaagctccgacaaactgactcgatgggaggtgctgggagttcagggtgcactcctttcgcatttcatccagccagtgtacatctcaagcatcctgataggcgacggcaactgttcggacactaggggcctcgaaatcgcaattaagcaaagagtggacgatgccctcacctcaaagctaccaatgttttatttggtcaaccggcctcatatcagccttgtgccgtccgcataccctctgcagatgaacctcgagtataagtttttatctctaaattgggcccagggggacgtatctttagagatagtggatggcctttccggcaagatcaccgaatcctctccatttaagtccggaatgtccatggcctcccgcctctgtaaagccgctatgttgagcaggttcaacctgttagccaaagaagccaaaaaggagctgttagaggctggcacgtaccacgctgctaaatgtatgtcagccagctaccaagaagcaaagtgcaaattgaaatcctatctgcaacagcacgggtatgggagctggatcgtgaagtcaccatgcatagagcagtttaatatgtag

SEQ ID NO: 60154 - DNA, 726 bp, Artificial Sequence
  derived and/or modified sequence
atggccagtaataatcactggttccaaagtagccaagtgccttcatttgctcagatgctgaaaaaaaatttgcctgtgcaacccgctactaaaaccataactaccccaacaggatggtcaagcgaatcctacgggcttagtaaaatggcttcaaaagtgactcaggtgacaggaaactttcctgaacctctgttgagtaaaaatctcagtagcatcagtaatcctgtgttgccccctaaaaagatacccaaggaattcatcatgaaatacaagcggggtgagatcaaccccgtctccgcactccaccagtttgcccagatgcagagggtgcaactggatttgaaagaaacggttactacaggaaatgtgatgggaccctactttgctttttgcgcagtcgtggatggtatccagtacaaaactgggctggggcagaataagaaagagtcgcgttctaatgcagcaaaactggccctggacgagctcctgcaactggatgagccagagccacggatactcgaaacttcagggccaccgccattccccgctgagcccgtggtgctttctgaactcgcctacgtgagcaaggtgcactacgaaggcaggcacattcagtatgcaaaaattagtcagattgtcaaagagcgcttcaaccagttgatcagcaacaggagcgagtacttgaaatactcaagctctctggcagcctttataatcgagagatag

SEQ ID NO: 60155 - DNA, 1698 bp, Artificial Sequence
  derived and/or modified sequence
atggccagcaacaaccactggttccagagcagccaggtgcccagcttcgcccagatgctgaagaagaacctgcccgtgcagcccgccaccaagaccatcaccacccccaccggctggagcagcgagagctacggcctgagcaagatggccagcaaggtgacccaggtgaccggcaacttccccgagcccctgctgagcaagaacctgagcagcatcagcaaccccgtgctgccccccaagaagatccccaaggagttcatcatgaagtacaagagaggcgagatcaaccccgtgagcgccctgcaccagttcgcccagatgcagagagtgcagctggacctgaaggagaccgtgaccaccggcaacgtgatgggcccctacttcgccttctgcgccgtggtggacggcatccagtacaagaccggcctgggccagaacaagaaggagagcagaagcaacgccgccaagctggccctggacgagctgctgcagctggacgagcccgagcccagaatcctggagaccagcggccccccccccttccccgccgagcccgtggtgctgagcgagctggcctacgtgagcaaggtgcactacgagggcagacacatccagtacgccaagatcagccagatcgtgaaggagagattcaaccagctgatcagcaacagaagcgagtacctgaagtacagcagcagcctggccgccttcatcatcgagagagccggccagcacgaggtggtggccatcggcaccggcgagtacaactacagccaggacatcaagcccgacggcagagtgctgcacgacacccacgccgtggtgaccgccagaagaagcctgctgagcaagaaccccgccatgatggagaagagcatcttctgcaccgagcccaccagcaacctgctgaccctgaagcagaacatcaacatctgcctgtacatgaaccagctgcccaagggcagcgcccagatcaagagccagctgagactgaacccccacagcatcagcgccttcgaggccaacgaggagctgtgcctgcacgtggccgtggagggcaagatctacctgaccgtgtactgccccaaggacggcgtgaacagaatcagcagcatgagcagcagcgacaagctgaccagatgggaggtgctgggcgtgcagggcgccctgctgagccacttcatccagcccgtgtacatcagcagcatcctgatcggcgacggcaactgcagcgacaccagaggcctggagatcgccatcaagcagagagtggacgacgccctgaccagcaagctgcccatgttctacctggtgaacagaccccacatcagcctggtgcccagcgcctaccccctgcagatgaacctggagtacaagttcctgagcctgaactgggcccagggcgacgtgagcctggagatcgtggacggcctgagcggcaagatcaccgagagcagccccttcaagagcggcatgagcatggccagcagactgtgcaaggccgccatgctgagcagattcaacctgctggccaaggaggccaagaaggagctgctggaggccggcacctaccacgccgccaagtgcatgagcgccagctaccaggaggccaagtgcaagctgaagagctacctgcagcagcacggctacggcagctggatcgtgaagagcccctgcatcgagcagttcaacatgtag

SEQ ID NO: 60156 - DNA, 726 bp, Artificial Sequence
  derived and/or modified sequence
atggccagcaacaaccactggttccagagcagccaggtgcccagcttcgcccagatgctgaagaagaacctgcccgtgcagcccgccaccaagaccatcaccacccccaccggctggagcagcgagagctacggcctgagcaagatggccagcaaggtgacccaggtgaccggcaacttccccgagcccctgctgagcaagaacctgagcagcatcagcaaccccgtgctgccccccaagaagatccccaaggagttcatcatgaagtacaagagaggcgagatcaaccccgtgagcgccctgcaccagttcgcccagatgcagagagtgcagctggacctgaaggagaccgtgaccaccggcaacgtgatgggcccctacttcgccttctgcgccgtggtggacggcatccagtacaagaccggcctgggccagaacaagaaggagagcagaagcaacgccgccaagctggccctggacgagctgctgcagctggacgagcccgagcccagaatcctggagaccagcggccccccccccttccccgccgagcccgtggtgctgagcgagctggcctacgtgagcaaggtgcactacgagggcagacacatccagtacgccaagatcagccagatcgtgaaggagagattcaaccagctgatcagcaacagaagcgagtacctgaagtacagcagcagcctggccgccttcatcatcgagagatag

SEQ ID NO: 60157 - protein, 649 aa, Artificial Sequence
  derived and/or modified sequence
MGTALVYHEDMTATRLLWDDPECEIERPERLTAALDRLRQRGLEQRCLRLSAREASEEELGLVHSPEYVSLVRETQVLGKEELQALSGQFDAIYFHPSTFHCARLAAGAGLQLVDAVLTGAVQNGLALVRPPGHHGQRAAANGFCVFNNVAIAAAHAKQKHGLHRILVVDWDVHHGQGIQYLFEDDPSVLYFSWHRYEHGRFWPFLRESDADAVGRGQGLGFTVNLPWNQVGMGNADYVAAFLHLLLPLAFEGQMQATPECFAHLTQLLQVLAGGRVCAVLEGGYHLESLAESVCMTVQTLLGDPAPPLSGPMAPCQSALESIQSARAAQAPHWKSLQQQDVTAVPMSPSSHSPEGRPPPLLPGGPVCKAAASAPSSLLDQPCLCPAPSVRTAVALTTPDITLVLPPDVIQQEASALREETEAWARPHESLAREEALTALGKLLYLLDGMLDGQVNSGIAATPASAAAATLDVAVRRGLSHGAQRLLCVALGQLDRPPDLAHDGRSLWLNIRGKEAAALSMFHVSTPLPVMTGGFLSCILGLVLPLAYGFQPDLVLVALGPGHGLQGPHAALLAAMLRGLAGGRVLALLEENSTPQLAGILARVLNGEAPPSLGPSSVASPEDVQALMYLRGQLEPQWKMLQCHPHLVA

SEQ ID NO: 60158 - DNA, 1950 bp, Artificial Sequence
  derived and/or modified sequence
atgggcaccgccctggtgtaccacgaggacatgaccgccaccagactgctgtgggacgaccccgagtgcgagatcgagagacccgagagactgaccgccgccctggacagactgagacagagaggcctggagcagagatgcctgagactgagcgccagagaggccagcgaggaggagctgggcctggtgcacagccccgagtacgtgagcctggtgagagagacccaggtgctgggcaaggaggagctgcaggccctgagcggccagttcgacgccatctacttccaccccagcaccttccactgcgccagactggccgccggcgccggcctgcagctggtggacgccgtgctgaccggcgccgtgcagaacggcctggccctggtgagaccccccggccaccacggccagagagccgccgccaacggcttctgcgtgttcaacaacgtggccatcgccgccgcccacgccaagcagaagcacggcctgcacagaatcctggtggtggactgggacgtgcaccacggccagggcatccagtacctgttcgaggacgaccccagcgtgctgtacttcagctggcacagatacgagcacggcagattctggcccttcctgagagagagcgacgccgacgccgtgggcagaggccagggcctgggcttcaccgtgaacctgccctggaaccaggtgggcatgggcaacgccgactacgtggccgccttcctgcacctgctgctgcccctggccttcgagggccagatgcaggccacccccgagtgcttcgcccacctgacccagctgctgcaggtgctggccggcggcagagtgtgcgccgtgctggagggcggctaccacctggagagcctggccgagagcgtgtgcatgaccgtgcagaccctgctgggcgaccccgccccccccctgagcggccccatggccccctgccagagcgccctggagagcatccagagcgccagagccgcccaggccccccactggaagagcctgcagcagcaggacgtgaccgccgtgcccatgagccccagcagccacagccccgagggcagacccccccccctgctgcccggcggccccgtgtgcaaggccgccgccagcgcccccagcagcctgctggaccagccctgcctgtgccccgcccccagcgtgagaaccgccgtggccctgaccacccccgacatcaccctggtgctgccccccgacgtgatccagcaggaggccagcgccctgagagaggagaccgaggcctgggccagaccccacgagagcctggccagagaggaggccctgaccgccctgggcaagctgctgtacctgctggacggcatgctggacggccaggtgaacagcggcatcgccgccacccccgccagcgccgccgccgccaccctggacgtggccgtgagaagaggcctgagccacggcgcccagagactgctgtgcgtggccctgggccagctggacagaccccccgacctggcccacgacggcagaagcctgtggctgaacatcagaggcaaggaggccgccgccctgagcatgttccacgtgagcacccccctgcccgtgatgaccggcggcttcctgagctgcatcctgggcctggtgctgcccctggcctacggcttccagcccgacctggtgctggtggccctgggccccggccacggcctgcagggcccccacgccgccctgctggccgccatgctgagaggcctggccggcggcagagtgctggccctgctggaggagaacagcaccccccagctggccggcatcctggccagagtgctgaacggcgaggccccccccagcctgggccccagcagcgtggccagccccgaggacgtgcaggccctgatgtacctgagaggccagctggagccccagtggaagatgctgcagtgccacccccacctggtggcctag

SEQ ID NO: 60159 - DNA, 1950 bp, Artificial Sequence
  derived and/or modified sequence
atggggaccgcgcttgtgtaccatgaggacatgacggccacccggctgctctgggacgaccccgagtgcgagatcgagcgtcctgagcgcctgaccgcagccctggatcgcctgcggcagcgcggcctggaacagaggtgtctgcggttgtcagcccgcgaggcctcggaagaggagctgggcctggtgcacagcccagagtatgtatccctggtcagggagacccaggtcctaggcaaggaggagctgcaggcgctgtccggacagttcgacgccatctacttccacccgagtacctttcactgcgcgcggctggccgcaggggctggactgcagctggtggacgctgtgctcactggagctgtgcaaaatgggcttgccctggtgaggcctcccgggcaccatggccagagggcggctgccaacgggttctgtgtgttcaacaacgtggccatagcagctgcacatgccaagcagaaacacgggctacacaggatcctcgtcgtggactgggatgtgcaccatggccaggggatccagtatctctttgaggatgaccccagcgtcctttacttctcctggcaccgctatgagcatgggcgcttctggcctttcctgcgagagtcagatgcagacgcagtggggcggggacagggcctcggcttcactgtcaacctgccctggaaccaggttgggatgggaaacgctgactacgtggctgccttcctgcacctgctgctcccactggcctttgaggggcaaatgcaggccacgccagagtgcttcgcccacctcacacagctgctgcaggtgctggccggcggccgggtctgtgccgtgctggagggcggctaccacctggagtcactggcggagtcagtgtgcatgacagtacagacgctgctgggtgacccggccccacccctgtcagggccaatggcgccatgtcagagtgccctagagtccatccagagtgcccgtgctgcccaggccccgcactggaagagcctccagcagcaagatgtgaccgctgtgccgatgagccccagcagccactccccagaggggaggcctccacctctgctgcctgggggtccagtgtgtaaggcagctgcatctgcaccgagctccctcctggaccagccgtgcctctgccccgcaccctctgtccgcaccgctgttgccctgacaacgccggatatcacattggttctgccccctgacgtcatccaacaggaagcgtcagccctgagggaggagacagaagcctgggccaggccacacgagtccctggcccgggaggaggccctcactgcacttgggaagctcctgtacctcttagatgggatgctggatgggcaggtgaacagtggtatagcagccactccagcctctgctgcagcagccaccctggatgtggctgttcggagaggcctgtcccacggagcccagaggctgctgtgcgtggccctgggacagctggaccggcctccagacctcgcccatgacgggaggagtctgtggctgaacatcaggggcaaggaggcggctgccctatccatgttccatgtctccacgccactgccagtgatgaccggtggtttcctgagctgcatcttgggcttggtgctgcccctggcctatggcttccagcctgacctggtgctggtggcgctggggcctggccatggcctgcagggcccccacgctgcactcctggctgcaatgcttcgggggctggcagggggccgagtcctggccctcctggaggagaactccacaccccagctagcagggatcctggcccgggtgctgaatggagaggcacctcctagcctaggcccttcctctgtggcctccccagaggacgtccaggccctgatgtacctgagagggcagctggagcctcagtggaagatgttgcagtgccatcctcacctggtggcttga

SEQ ID NO: 60160 - DNA, 1950 bp, Artificial Sequence
  derived and/or modified sequence
atgggcacggccctggtgtaccacgaggatatgaccgcaaccaggctcctctgggacgaccctgaatgtgaaatagaaaggcccgagcgcctgacagccgcgctcgatagattaagacagagggggctggagcagcgttgcctgcgtttgagcgccagggaagcctccgaagaggaactgggcctggttcactcacccgagtacgtgtctctggtgcgcgaaacccaagtgttagggaaagaggaactgcaggcactcagtggccagtttgacgccatatacttccatcccagcacattccactgcgccaggctggccgctggagcggggctgcagctcgtggatgccgtgctcacgggtgccgtgcagaacggattagccctagttcggcccccaggacaccacggtcagcgtgctgccgctaatggattctgtgttttcaacaatgtagccatcgctgcagcccatgccaaacaaaagcacggcctgcaccgaatcctcgtggtcgattgggacgtgcatcacggtcagggaatccagtacctgtttgaagatgacccatcagtcctgtacttttcctggcacagatacgaacacggaaggttctggccattccttcgagaaagtgacgccgacgccgtaggtcgtgggcagggattggggtttaccgtgaacctcccctggaaccaggtagggatgggaaacgccgattatgtcgccgcttttctgcacttactgctgccactggcctttgaggggcaaatgcaggcaacgcctgagtgctttgcccacttgacccagctgttgcaggtcctcgccggcggccgtgtgtgtgccgttctggagggaggctaccatctggagtccctcgctgagtccgtgtgtatgacagtgcaaacattacttggagaccccgcccctccgttgtctggccccatggctccctgtcagagtgccctcgagtccattcagtctgcccgtgcagcccaggccccgcactggaaatctcttcagcagcaagatgtgacagctgtgccgatgagcccatcctcgcactcccccgagggtcgcccgccacccctattgcccggagggcccgtgtgtaaagccgccgccagcgccccgtcttccctcctggaccagccttgcctgtgccccgccccatctgtcaggactgccgtagccttaactactcccgatatcacgctcgtgcttcctcccgacgtgattcagcaggaagcaagcgctcttagggaagagacggaagcctgggctagaccccacgagagtctggccagagaagaagcactcacagcccttggaaaactgctgtatttgctcgacggtatgctggacggtcaagtgaacagcggcatcgccgccacccccgctagcgccgcagccgctacccttgacgtcgcagttcgtagagggctgtctcatggggcccagcggctgctttgcgtagcgttgggccagctcgaccggcccccggatctggctcacgacgggcggtccctgtggttgaacatccggggcaaagaagccgctgcattgagcatgtttcacgtcagcaccccacttcccgttatgactggtggttttctcagttgcatcctcggattagtgctgccccttgcctatggcttccagccagatttggttttggtggccctgggtcctggccacggcctgcaaggcccccatgctgccctgctcgctgccatgctgcggggactggccggtggacgcgttcttgccctgctggaagagaacagtaccccgcagcttgccggcattttggctcgcgtcctcaatggagaagcaccccccagtctgggcccaagttccgtggccagtcctgaggatgtccaagccctcatgtatttgagaggtcagctggaaccgcaatggaaaatgctgcagtgccacccacacctggtcgcttag

SEQ ID NO: 60161 - DNA, 1950 bp, Artificial Sequence
  derived and/or modified sequence
atgggcacagccctggtgtaccacgaggacatgacagccacccggctgctgtgggatgatcctgaatgtgaaattgaaagacctgagcggctgacagctgccctggaccggctgcggcagaggggcctggagcagcgctgcctgcggctgagcgcccgggaggccagcgaggaggagctgggcctggtgcacagcccagaatatgtgtccctggtgcgggagacccaggtgctgggcaaggaggagctgcaggccctgagcggccagtttgatgccatctacttccaccccagcaccttccactgtgcccggctggccgccggggccggcctgcagctggtggatgctgtgctgactggagctgtgcagaatggcctggccctggtgcggcccccaggccaccacggccagagagctgctgccaacggcttctgtgtgttcaacaacgtggccatcgccgccgcccacgccaagcagaagcacggcctgcaccgcatcctggtggtggactgggatgtgcaccacggccagggcatccagtacctgtttgaagatgaccccagcgtgctgtacttctcctggcacagatatgaacatggccgcttctggcccttcctgcgggagagtgatgctgatgctgtgggccggggccagggcctgggcttcaccgtgaacctgccctggaaccaggtgggcatgggaaatgctgactatgtggccgccttcctgcacctgctgctgcccctggcctttgagggccagatgcaggccaccccagagtgctttgcccacctgacccagctgctgcaggtgctggccggcggccgggtgtgtgctgtgctggagggcggctaccacctggagagcctggccgagagcgtgtgcatgacagtgcagaccctgctgggggaccctgccccacccctgagcggccccatggccccctgccagagcgccctggagagcatccagagcgcccgggccgcccaggccccccactggaagagcctgcagcagcaggatgtgacagctgtgcccatgagccccagcagccacagccctgagggccggcccccacccctgctgcccggcggccctgtgtgcaaggctgctgccagcgcccccagcagcctgctggaccagccctgcctgtgcccagcccccagcgtgaggacagctgtggccctgaccaccccagacatcaccctggtgctgcccccagatgtgatccagcaggaggccagcgccctgcgggaggagacagaggcctgggcccggccccatgagagcctggcccgggaggaggccctgacagccctgggcaagctgctgtacctgctggatggcatgctggatggccaggtgaacagcggcattgctgccaccccagccagcgctgctgctgccaccctggatgtggccgtgcggcggggcctgagccatggagcccagaggctgctgtgtgtggccctgggccagctggaccggcccccagacctggcccatgatggccgcagcctgtggctgaacatccggggcaaggaggccgccgccctgtccatgtttcatgtgtccacccccctgcctgtgatgactggaggcttcctgagctgcatcctgggcctggtgctgcccctggcctacggcttccagcctgacctggtgctggtggccctgggccctggccacggcctgcagggcccccacgccgccctgctggccgccatgctgcggggcctggccggcggccgggtgctggccctgctggaggagaacagcaccccccagctggccggcatcctggcccgggtgctgaatggagaggccccacccagcctgggccccagctctgtggccagcccagaagatgtgcaggccctgatgtacctgcggggccagctggagccccagtggaagatgctgcagtgccacccccacctggtggcctag

SEQ ID NO: 60162 - DNA, 1950 bp, Artificial Sequence
  derived and/or modified sequence
atgggcaccgccctggtgtaccacgaggacatgaccgccacccggctgttgtgggacgaccctgagtgcgagatcgagaggcctgagaggctcaccgccgcactggatcggctccgccaaagaggcctggaacaacggtgcttgaggttaagtgcccgcgaggcctcagaagaagaactaggcctggtacatagcccagagtatgtgagtctggtgcgcgagacacaggtgctcgggaaggaggagctgcaggcacttagtggacagttcgatgcgatttattttcatccatctacattccattgcgcccgcttagctgctggcgccgggctgcagcttgtcgacgcagtcctcaccggtgctgtccagaatggcctggcattggtaaggccaccaggacatcacgggcagagagctgcggcaaacggtttttgtgttttcaacaatgtagcaattgccgccgcccacgccaagcaaaaacacggcctgcaccgcattcttgtggtggattgggacgtacatcacggacaggggatccagtacctctttgaggatgacccttccgtcctctatttcagctggcaccggtacgaacacggtcggttctggcccttcctccgggaatcagacgcagatgctgtagggcgaggacaggggcttggctttacagtaaaccttccatggaaccaggtggggatgggaaacgcagactacgtagcggcattccttcaccttctgttacccttagcgttcgagggccagatgcaggccactcctgagtgtttcgcccatttaacacagttgctgcaggtcctggccggcggaagagtttgtgctgttctggaaggtggctaccacctcgaaagtcttgcggagagcgtctgtatgactgtgcagacattgttgggggaccccgctccacccttgagcggaccaatggctccttgtcaatccgctctagaaagcatacaatccgctagagcagcgcaagctcctcattggaagtctctgcagcaacaagatgtgaccgcagtgcctatgtcgcctagtagccattcgcctgagggccgaccccctcctctgctgccgggaggccccgtgtgcaaagcggccgcctcagcacctagctcgctgctggatcagccctgtctctgcccggcaccttctgtccggacggccgtggctctgactactcctgacattactctggtgcttcctcctgacgtcatacaacaggaagccagtgctcttcgagaggaaactgaggcttgggctcggccacacgagtccctggcgagagaggaggccctgaccgcattaggcaaactgctctatctgctggatggtatgctggatgggcaggtgaactctggaatcgccgcgacaccagctagcgcagcggccgccaccttggatgtggcggttcgtcgcggcttgagccatggggctcagcgcttgttatgtgtggccctgggccagctcgaccgtcctccagaccttgcccacgacggacgctccctgtggctaaatattcgggggaaagaggcggctgctctctcaatgttccacgttagcacccctctgcctgtgatgaccgggggcttcctgtcttgcatccttggccttgtgcttcctttggcttacggattccagcccgatctggttctggtagcgctgggccctggtcacggcctgcaaggtcctcacgctgccctgttggctgccatgctgcgaggactggcaggtggcagagtattagcactgcttgaagagaactcaaccccccagttggctggaatccttgcgcgggttttaaacggggaggcacctccatctctcgggccctcttctgtggcatctcccgaagatgtgcaggctcttatgtatctccgtggacagctcgagccccaatggaaaatgctgcagtgtcacccgcacctagtggcctag

SEQ ID NO: 60163 - DNA, 1950 bp, Artificial Sequence
  derived and/or modified sequence
atgggaactgcgcttgtctaccacgaagatatgacagccacccgtctgttatgggatgacccggagtgcgagatcgaacggcctgagagactcacagctgctctggaccggttgaggcaacgcggactggagcagagatgtctgcggctcagcgcacgggaagcatcagaggaggagttggggttggtacactcccctgaatatgtgagcttggtcagggagacccaggtgctcgggaaagaagagctgcaagccttgtctgggcaattcgatgccatatacttccacccctctacatttcattgcgcccgattagccgctggggctggcctgcaactcgtggatgctgtgctcaccggtgccgtccagaacgggctggcccttgtccgcccaccaggacaccacggacagagagcagctgcaaatggattttgtgtttttaataatgtggcgatcgccgcagctcacgctaagcagaaacatgggctccatcgaattctggtggttgactgggacgtccatcacggtcagggcatccaatacctgtttgaagacgaccctagtgtgctctacttttcatggcaccggtacgaacatggtcgcttttggccctttctccgcgagtcagatgctgatgcagtggggaggggtcaagggttgggtttcaccgtcaacctgccctggaaccaggtgggaatggggaacgccgactacgtagctgcgtttctacacctgctgcttcccctggctttcgaaggacagatgcaggcgacaccagagtgttttgctcacttaactcagcttttgcaagtgctcgccggagggagggtttgtgctgtgctagaaggagggtatcatctggaatcccttgctgaatcagtctgtatgaccgtgcagacactgcttggtgaccctgccccaccactttccgggccaatggcgccatgtcaatctgcgcttgagagcatccagtccgccagagctgctcaagcccctcactggaagtctctccagcagcaagatgtgactgccgtcccgatgtcacccagctctcacagtcctgaggggaggcctccccctttgctcccaggcggtccggtatgcaaagccgctgcctctgctccatcttctctgttagaccagccctgcctgtgtcccgcaccttctgtaagaacggccgtggcattgacaacccctgacatcactcttgtccttccccctgacgttatacagcaggaggcttccgctcttcgggaggaaacggaagcctgggctagaccgcacgaatctctggcgagggaggaagccctgacagccttgggcaaattgctttatctgttggacgggatgctggatggacaggttaactcaggcattgccgcaactcctgcctccgctgctgccgctaccctggatgtggcagtgagacggggacttagtcatggagcccagcggctgttgtgtgtagcgttaggacagctcgaccggccaccagacctggcccacgacgggaggtccttatggctgaatattcggggtaaagaagctgccgctctgtctatgttccatgtgtcaaccccactccccgtcatgacaggcggtttcctgtcttgtattttaggcctggttctgccccttgcttatggcttccagcctgacctggtgctggtcgccctgggacccggacatggactgcagggccctcatgccgctcttctggccgcaatgcttagaggccttgctggagggagggttctggcactgctcgaggagaattccacccctcagctcgccggtattctggccagggtgctgaatggcgaagccccaccatccctaggccctagtagcgtcgcctctcctgaagatgttcaggccctgatgtacttacgaggccaattagagccacagtggaagatgctgcagtgtcatcctcacctagtggcctag

SEQ ID NO: 60164 - protein, 286 aa, Artificial Sequence
  derived and/or modified sequence
MAEDGEEAEFHFAALYISGQWPRLRADTDLQRLGSSAMAPSRKFFVGGNWKMNGRKQSLGELIGTLNAAKVPADTEVVCAPPTAYIDFARQKLDPKIAVAAQNCYKVTNGAFTGEISPGMIKDCGATWVVLGHSERRHVFGESDELIGQKVAHALAEGLGVIACIGEKLDEREAGITEKVVFEQTKVIADNVKDWSKVVLAYEPVWAIGTGKTATPQQAQEVHEKLRGWLKSNVSDAVAQSTRIIYGGSVTGATCKELASQPDVDGFLVGGASLKPEFVDIINAKQ

SEQ ID NO: 60165 - protein, 249 aa, Artificial Sequence
  derived and/or modified sequence
MAPSRKFFVGGNWKMNGRKQSLGELIGTLNAAKVPADTEVVCAPPTAYIDFARQKLDPKIAVAAQNCYKVTNGAFTGEISPGMIKDCGATWVVLGHSERRHVFGESDELIGQKVAHALAEGLGVIACIGEKLDEREAGITEKVVFEQTKVIADNVKDWSKVVLAYEPVWAIGTGKTATPQQAQEVHEKLRGWLKSNVSDAVAQSTRIIYGGSVTGATCKELASQPDVDGFLVGGASLKPEFVDIINAKQ

SEQ ID NO: 60166 - DNA, 861 bp, Artificial Sequence
  derived and/or modified sequence
atggcagaggacggcgaagaagctgaatttcacttcgctgccctgtatatttcagggcagtggcctcgcctacgagccgacacagacttgcagcggcttggttcaagtgccatggccccatcgcggaagttcttcgtgggtggcaattggaagatgaacggacggaaacagtccctgggagaacttattggaaccctgaacgccgcgaaggttccagccgacactgaagtggtctgtgcacctcctactgcttacattgacttcgccaggcagaagttagacccaaagatcgccgtggccgcacagaactgctacaaggtgacaaacggagctttcactggtgaaatatcccctggcatgatcaaagactgcggagcaacctgggttgtgcttggacactcagagcggcgacacgttttcggtgaatccgatgaacttattggtcagaaggtggcacacgctctggctgaaggcctgggagtcattgcatgtattggcgagaagctggacgagagggaggccgggatcaccgaaaaggtggtcttcgaacagactaaggtcatagccgataacgtgaaggactggagcaaggtggtcctagcgtatgagccggtctgggccatcggaacgggtaagaccgccacgccccagcaggcccaagaagtgcacgagaagctgagaggctggctaaagtccaacgtcagcgatgcagtggctcagagcacaagaattatctacggtggcagtgtgacaggcgcaacttgtaaggagctggcgagtcagcctgacgtggacggcttcctggtggggggagcaagcctgaaacccgagtttgtggacataatcaacgccaaacaatag

SEQ ID NO: 60167 - DNA, 861 bp, Artificial Sequence
  derived and/or modified sequence
atggctgaagatggagaggaggccgagttccactttgctgccctgtacatcagcggccagtggccccggctgcgggctgacacagacctgcagaggctgggcagcagcgccatggcccccagcaggaagttctttgtgggcggcaactggaagatgaatggaaggaagcagagcctgggggagctgattggcaccctgaatgctgccaaggtgcctgctgacacagaggtggtgtgtgccccacccacagcctacatcgactttgcccggcagaagctggaccccaagattgctgtggccgcccagaactgctacaaggtgaccaatggagccttcaccggggagatcagccctggcatgatcaaggactgtggggccacctgggtggtgctgggccacagcgagcggcggcacgtgtttggagagagtgatgagctgattggccagaaggtggcccacgccctggccgagggcctgggcgtcatcgcctgcattggagagaagctggatgagcgggaggccggcatcacagagaaggtggtgtttgagcagaccaaggtgattgctgacaacgtgaaggactggagcaaggtggtgctggcctatgagcctgtgtgggccatcggcaccgggaagacagccaccccccagcaggcccaggaggtgcatgagaagctgcggggctggctgaagagcaatgtgtctgatgctgtggcccagagcacccgcatcatctacggcggctctgtgactggagccacctgcaaggagctggccagccagccagatgtggatggcttcctggtgggcggggccagcctgaagccagagtttgtggacatcatcaatgccaagcagtag

SEQ ID NO: 60168 - DNA, 861 bp, Artificial Sequence
  derived and/or modified sequence
atggccgaggacggcgaggaggccgagttccacttcgccgccctgtatatatccggacagtggcctcggctccgggctgataccgatctccagcggctcggctctagcgctatggcgcctagccggaagttctttgtgggaggtaactggaagatgaacggcagaaaacagtctctcggtgaactgattggtaccctgaacgcagccaaggttcctgccgacacagaagtcgtatgtgccccaccaacagcttacattgatttcgctagacaaaagctcgatccgaaaattgccgtggctgcgcaaaactgctataaagtgaccaacggggcgttcacaggggaaatctcccccgggatgatcaaggattgtggagctacctgggtggtccttggccactccgagcgtcggcatgtttttggtgagagcgatgaactcatcgggcagaaggtcgcacatgctttagcagaggggctgggggtaatcgcctgcatcggagagaaactcgatgagcgggaagccggtatcacagagaaggtggtattcgagcaaaccaaggtgatcgccgacaatgtgaaggactggtccaaagtggtcctcgcctacgaaccagtgtgggcgatcggaacggggaaaacagctacccctcaacaagcccaggaggtgcatgagaagctgcgcggttggctaaaatctaacgtttctgacgcagtagcgcagtccacaagaataatttatgggggcagcgtaaccggcgctacctgtaaggagcttgcctcccagcccgatgtggacgggttcctcgttggcggcgcctcactcaaacccgaatttgttgatattattaatgccaaacagtag

SEQ ID NO: 60169 - DNA, 861 bp, Artificial Sequence
  derived and/or modified sequence
atggcggaggatggggaggaagcggagtttcatttcgccgcactctacattagcgggcagtggccgaggcttagggcggacactgatctacaaagactggggtcttccgctatggccccttccaggaaattcttcgtgggtgggaactggaaaatgaatggcaggaagcaaagcctgggcgaactcatcgggactttaaatgctgccaaagtccctgccgatacagaagttgtatgtgctcctcccacagcatacatcgactttgcaaggcaaaaactcgatcctaagattgccgtcgccgcacagaattgctacaaggtcacaaacggggcattcacaggagaaatcagccctggcatgatcaaagattgtggcgctacttgggtcgtgttagggcactctgaacggcgtcatgtgtttggcgaatccgacgaattaattggccagaaggtggctcacgctttggctgagggcctgggggtgatagcctgtattggggaaaaactggacgaaagagaagctgggataactgaaaaagttgtgttcgagcagactaaggtaatcgcagataatgtcaaggactggtccaaggttgtgcttgcctacgaaccggtctgggcaatcgggacaggcaagaccgccaccccacagcaggcacaggaagtgcacgaaaagctgagaggctggctcaagtctaacgtcagcgatgctgtagcgcaatcaacacgcatcatttatggcggaagtgtgacaggagccacttgtaaggaactcgcctcccagcctgatgtcgacggtttcctggtcggtggcgcttccctgaagcccgaatttgtcgatatcattaacgccaagcagtag

SEQ ID NO: 60170 - DNA, 1763 bp, Artificial Sequence
  derived and/or modified sequence
ggaggttgtctatcccacagttggagaggggccctctctgccccagtgggcgatctgggctacggccaagttgccaccagctagttccgcttgaaaaccacttctggccccgtgggggactcaagtcgccaagcgagggttcccctgagcgccggagctcacaggtctcgccttgtcccgaaagccccgcaatcgaggcggaggcgaccgagcccccgactctcctagaacgttgccacaagaagggggaacgtcggaacagtgcatcatcgggcggcggccggggcggcggcaggagggcgggcggggggcagggctccgggggactgggcgggccatggcggaggacggcgaggaggcggagttccacttcgcggcgctctatataagtgggcagtggccgcgactgcgcgcagacactgaccttcagcgcctcggctccagcgccatggcgccctccaggaagttcttcgttgggggaaactggaagatgaacgggcggaagcagagtctgggggagctcatcggcactctgaacgcggccaaggtgccggccgacaccgaggtggtttgtgctccccctactgcctatatcgacttcgcccggcagaagctagatcccaagattgctgtggctgcgcagaactgctacaaagtgactaatggggcttttactggggagatcagccctggcatgatcaaagactgcggagccacgtgggtggtcctggggcactcagagagaaggcatgtctttggggagtcagatgagctgattgggcagaaagtggcccatgctctggcagagggactcggagtaatcgcctgcattggggagaagctagatgaaagggaagctggcatcactgagaaggttgttttcgagcagacaaaggtcatcgcagataacgtgaaggactggagcaaggtcgtcctggcctatgagcctgtgtgggccattggtactggcaagactgcaacaccccaacaggcccaggaagtacacgagaagctccgaggatggctgaagtccaacgtctctgatgcggtggctcagagcacccgtatcatttatggaggctctgtgactggggcaacctgcaaggagctggccagccagcctgatgtggatggcttccttgtgggtggtgcttccctcaagcccgaattcgtggacatcatcaatgccaaacaatgagccccatccatcttccctacccttcctgccaagccagggactaagcagcccagaagcccagtaactgccctttccctgcatatgcttctgatggtgtcatctgctccttcctgtggcctcatccaaactgtatcttcctttactgtttatatcttcaccctgtaatggttgggaccaggccaatcccttctccacttactataatggttggaactaaacgtcaccaaggtggcttctccttggctgagagatggaaggcgtggtgggatttgctcctgggttccctaggccctagtgagggcagaagagaaaccatcctctcccttcttacaccgtgaggccaagatcccctcagaaggcaggagtgctgccctctcccatggtgcccgtgcctctgtgctgtgtatgtgaaccacccatgtgagggaataaacctggcactaggtcttgtggtttgtctgccttcactggacttgcccagataatcttcctttttgaggcagctatataaatgatcatttgtgcaagaaaaaaaaaaaaacaagaacaggtttctataacaaca

SEQ ID NO: 60171 - DNA, 1344 bp, Artificial Sequence
  derived and/or modified sequence
gcgcagacactgaccttcagcgcctcggctccagcgccatggcgccctccaggaagttcttcgttgggggaaactggaagatgaacgggcggaagcagagtctgggggagctcatcggcactctgaacgcggccaaggtgccggccgacaccgaggtggtttgtgctccccctactgcctatatcgacttcgcccggcagaagctagatcccaagattgctgtggctgcgcagaactgctacaaagtgactaatggggcttttactggggagatcagccctggcatgatcaaagactgcggagccacgtgggtggtcctggggcactcagagagaaggcatgtctttggggagtcagatgagctgattgggcagaaagtggcccatgctctggcagagggactcggagtaatcgcctgcattggggagaagctagatgaaagggaagctggcatcactgagaaggttgttttcgagcagacaaaggtcatcgcagataacgtgaaggactggagcaaggtcgtcctggcctatgagcctgtgtgggccattggtactggcaagactgcaacaccccaacaggcccaggaagtacacgagaagctccgaggatggctgaagtccaacgtctctgatgcggtggctcagagcacccgtatcatttatggaggctctgtgactggggcaacctgcaaggagctggccagccagcctgatgtggatggcttccttgtgggtggtgcttccctcaagcccgaattcgtggacatcatcaatgccaaacaatgagccccatccatcttccctacccttcctgccaagccagggactaagcagcccagaagcccagtaactgccctttccctgcatatgcttctgatggtgtcatctgctccttcctgtggcctcatccaaactgtatcttcctttactgtttatatcttcaccctgtaatggttgggaccaggccaatcccttctccacttactataatggttggaactaaacgtcaccaaggtggcttctccttggctgagagatggaaggcgtggtgggatttgctcctgggttccctaggccctagtgagggcagaagagaaaccatcctctcccttcttacaccgtgaggccaagatcccctcagaaggcaggagtgctgccctctcccatggtgcccgtgcctctgtgctgtgtatgtgaaccacccatgtgagggaataaacctggcactaggtcttgtggtttgtctgccttcactggacttgcccagataatcttcctttttgaggcagctatataaatgatcatttgtgcaagaaaaaaaaaaaaacaagaacaggtttct

SEQ ID NO: 60172 - DNA, 861 bp, Artificial Sequence
  derived and/or modified sequence
atggccgaggacggcgaggaggccgagttccacttcgccgccctgtacatcagcggccagtggcccagactgagagccgacaccgacctgcagagactgggcagcagcgccatggcccccagcagaaagttcttcgtgggcggcaactggaagatgaacggcagaaagcagagcctgggcgagctgatcggcaccctgaacgccgccaaggtgcccgccgacaccgaggtggtgtgcgccccccccaccgcctacatcgacttcgccagacagaagctggaccccaagatcgccgtggccgcccagaactgctacaaggtgaccaacggcgccttcaccggcgagatcagccccggcatgatcaaggactgcggcgccacctgggtggtgctgggccacagcgagagaagacacgtgttcggcgagagcgacgagctgatcggccagaaggtggcccacgccctggccgagggcctgggcgtgatcgcctgcatcggcgagaagctggacgagagagaggccggcatcaccgagaaggtggtgttcgagcagaccaaggtgatcgccgacaacgtgaaggactggagcaaggtggtgctggcctacgagcccgtgtgggccatcggcaccggcaagaccgccaccccccagcaggcccaggaggtgcacgagaagctgagaggctggctgaagagcaacgtgagcgacgccgtggcccagagcaccagaatcatctacggcggcagcgtgaccggcgccacctgcaaggagctggccagccagcccgacgtggacggcttcctggtgggcggcgccagcctgaagcccgagttcgtggacatcatcaacgccaagcagtag

SEQ ID NO: 60173 - protein, 558 aa, Artificial Sequence
  derived and/or modified sequence
MLKKNLPVQPATKTITTPTGWSSESYGLSKMASKVTQVTGNFPEPLLSKNLSSISNPVLPPKKIPKEFIMKYKRGEINPVSALHQFAQMQRVQLDLKETVTTGNVMGPYFAFCAVVDGIQYKTGLGQNKKESRSNAAKLALDELLQLDEPEPRILETSGPPPFPAEPVVLSELAYVSKVHYEGRHIQYAKISQIVKERFNQLISNRSEYLKYSSSLAAFIIERAGQHEVVAIGTGEYNYSQDIKPDGRVLHDTHAVVTARRSLLRYFYRQLLLFYSKNPAMMEKSIFCTEPTSNLLTLKQNINICLYMNQLPKGSAQIKSQLRLNPHSISAFEANEELCLHVAVEGKIYLTVYCPKDGVNRISSMSSSDKLTRWEVLGVQGALLSHFIQPVYISSILIGDGNCSDTRGLEIAIKQRVDDALTSKLPMFYLVNRPHISLVPSAYPLQMNLEYKFLSLNWAQGDVSLEIVDGLSGKITESSPFKSGMSMASRLCKAAMLSRFNLLAKEAKKELLEAGTYHAAKCMSASYQEAKCKLKSYLQQHGYGSWIVKSPCIEQFNM

SEQ ID NO: 60174 - DNA, 1677 bp, Artificial Sequence
  derived and/or modified sequence
atgttaaaaaagaatcttcctgtgcaacctgccaccaaaacaatcacaactccgacaggctggagttccgaatcttacggactcagtaaaatggcaagcaaggtgacccaggtgacaggcaatttcccagaaccactgctgtcgaagaatttgtcctccatctcaaatccggtgctgcctcctaagaagatccccaaagagtttatcatgaagtacaaacggggggagatcaaccccgtgtctgcgctgcaccagtttgcacagatgcagcgtgtccagttggaccttaaggagacagtgaccactgggaacgtgatgggtccttacttcgccttctgtgccgtcgtcgatggcattcagtataagactggcttgggtcagaataagaaggagtcgcggtccaatgctgctaagttggctctggatgagctgctccagctggacgagcccgaaccacgaatactagagactagcgggccgccccccttccccgccgagcctgtcgttctgtctgagctcgcatacgtgtcaaaggttcattacgaggggagacacatccagtatgctaagatctctcagatcgtgaaagaacgcttcaaccagctgattagcaaccgcagtgagtatctgaaatactccagctctcttgcggcctttatcattgaaagggcaggtcagcacgaagtggtggcaatcggtactggtgagtacaattatagccaggacatcaaacctgacggacgtgttttacatgacacccatgccgtagtaaccgctcgaagaagtctgttacgctacttctatagacagctgctcttgttctactcaaagaatcccgctatgatggagaagagcatcttttgtacggaaccgacatccaacctgttgactttgaaacagaatattaatatctgcctatacatgaaccagctgcccaagggaagcgcccagatcaagagccagttgcgccttaatccacacagcataagcgcctttgaggccaacgaggagttgtgcctgcacgtggccgtggaagggaagatataccttaccgtgtactgccctaaggatggagtgaacagaatttcttctatgagcagttccgataagttgacccgctgggaggtgctgggcgtgcagggtgctcttctctcccacttcatccagccagtctacatttcatcgatactgattggcgatggaaattgttcagatacaaggggactggagattgcgattaaacagcgggttgacgacgccttgacctcaaagctcccgatgttctacctcgtcaatagaccccacatctctctggttccttccgcctaccctctgcaaatgaacctcgagtacaagtttctgtcacttaattgggctcagggcgacgtcagcctcgagatcgtggacgggctgtcaggtaagattactgagtcttcgccgtttaagagcggaatgagtatggcctctagactgtgcaaagcggccatgctctcacgcttcaatctgttggcgaaggaggccaaaaaggagctgctagaggcagggacatatcatgccgcgaagtgcatgagcgccagctaccaggaggcaaaatgtaagctgaaatcttatctgcaacagcatgggtatgggagttggatcgtaaagagcccgtgcattgagcaattcaacatgtag

SEQ ID NO: 60175 - DNA, 1677 bp, Artificial Sequence
  derived and/or modified sequence
atgctgaagaagaacctgcctgtgcagcctgccaccaagaccatcaccacccccaccggctggagcagcgagagctatggcctgagcaagatggccagcaaggtgacccaggtgactggaaacttccctgagcccctgctgagcaagaacctgagcagcatcagcaaccctgtgctgccccccaagaagatccccaaggagttcatcatgaagtacaagagaggagagatcaaccctgtgtctgccctgcaccagtttgcccagatgcagagggtgcagctggacctgaaggagaccgtgaccactggaaatgtgatgggcccctactttgccttctgtgctgtggtggatggcatccagtacaagacaggcctgggccagaacaagaaggagagccgcagcaatgctgccaagctggccctggatgagctgctgcagctggatgagcctgagccccgcatcctggagaccagcggccccccacccttccctgctgagcctgtggtgctgtctgagctggcctacgtgtccaaggtgcactatgagggccgccacatccagtatgccaagatcagccagatcgtgaaggagcgcttcaaccagctgatcagcaacagaagtgagtacctgaagtacagcagcagcctggccgccttcatcatcgagcgggccggccagcacgaggtggtggccatcggcaccggggagtacaactacagccaggacatcaagccagatggccgggtgctgcatgacacccatgctgtggtgacagcccggcgcagcctgctgcgctacttctaccggcagctgctgctcttctacagcaagaacccagccatgatggagaagagcatcttctgcacagagcccaccagcaacctgctgaccctgaagcagaacatcaacatctgcctgtacatgaaccagctgcccaagggcagcgcccagatcaagagccagctgcggctgaacccccacagcatcagcgcctttgaggccaatgaggagctgtgcctgcacgtggccgtggagggcaagatctacctgactgtgtactgccccaaggatggagtgaaccgcatcagctccatgagcagcagtgacaagctgacccgctgggaggtgctgggcgtgcagggcgccctgctgagccacttcatccagcctgtgtacatcagcagcatcctgattggagatggcaactgcagcgacacccggggcctggagatcgccatcaagcagagggtggatgatgccctgaccagcaagctgcccatgttctacctggtgaaccggccccacatcagcctggtgcccagcgcctaccccctgcagatgaacctggagtacaagttcctgagcctgaactgggcccagggagatgtgtccctggagatcgtggatggcctgagcggcaagatcacagagagcagccccttcaagagcggcatgtccatggccagccggctgtgcaaggccgccatgctgagccgcttcaacctgctggccaaggaggccaagaaggagctgctggaggccggcacctaccacgccgccaagtgcatgtctgccagctaccaggaggccaagtgcaagctgaagagctacctgcagcagcacggctacggctcctggatcgtgaagagcccctgcatcgagcagttcaacatgtag

SEQ ID NO: 60176 - DNA, 1677 bp, Artificial Sequence
  derived and/or modified sequence
atgctgaagaagaacctgcccgtgcagcccgccaccaagaccatcactacccccaccggctggtcctccgagtcatacggactcagcaaaatggctagcaaggtgactcaggtgacggggaattttcctgagcccctgttgtctaagaatctgagctcaatcagcaatcctgtgctaccccccaaaaaaattccaaaggaattcattatgaaatacaagcggggggagattaatcccgtctctgcgttgcaccaatttgcacagatgcagcgagtgcaactggacctgaaagaaacagtcaccacgggaaacgtcatggggccttacttcgcattctgcgctgtcgtggatgggattcagtacaaaacagggttaggccagaataaaaaagagtccaggtccaacgctgccaagttggctctcgatgaattactgcagctcgatgagccggagccacgtattctggaaacttctggaccccccccctttcctgcggagccggtggtgctcagtgagctggcctatgtgagtaaggtccattacgaaggaagacatattcagtacgccaaaataagtcaaatcgtgaaagagaggtttaaccagctcatttccaatagatccgaatatctgaaatattcgagctcactcgctgccttcattattgagcgagctggccagcatgaggttgtagccatcgggaccggggagtacaattatagccaggacatcaaaccagacggaagagtcctgcatgacactcacgccgttgtcaccgcgagacggagcctgttacggtatttctaccgacagctactgcttttttactctaagaatcccgccatgatggagaaaagcatattttgtacagagcctacctccaacctgctcacactcaaacagaatatcaatatctgcctgtacatgaatcagctgccaaagggtagcgcacaaataaagtctcaactgcgtttaaatccacacagcatatccgcctttgaggccaacgaggaactatgcttacacgtggccgttgagggaaaaatctatctcactgtgtactgccccaaggatggagttaatagaatttcatcgatgagcagctcagacaaacttaccagatgggaagtgctgggcgtgcaaggggcactcctttcgcacttcattcagcctgtctatatcagcagtattttgatcggggatggaaattgttctgacacgcggggacttgagattgccatcaagcaacgcgtggacgatgctctgacgagcaaattacctatgttttaccttgtgaataggccacatatctctctggtgcccagcgcatacccactccagatgaacctggaatacaaattcttgagtctgaactgggctcagggggacgtgagtctggagatagtcgatgggctatcaggaaagatcaccgagtcttctccctttaagtccgggatgtccatggcaagcagattgtgtaaagccgcaatgctatcccgattcaacctactcgcgaaggaagccaagaaggagctcctggaggccggcacgtatcacgccgccaaatgcatgtccgccagctaccaggaagccaagtgcaagttgaagagctacctgcagcagcatggatatgggtcatggattgttaagagtccatgcattgagcagttcaacatgtag

SEQ ID NO: 60177 - DNA, 1677 bp, Artificial Sequence
  derived and/or modified sequence
atgctgaagaaaaatttaccagttcagccagccaccaagactatcaccacccctaccggctggtcctcggagtcttatggtctgtctaaaatggcctccaaagtgacgcaagtgaccggcaattttcccgaacccttgttgtctaagaatctgagcagtatttctaacccagtgctgccacccaagaagattcctaaggagtttatcatgaagtacaagcggggtgaaattaatcccgtgagcgcgctccatcagttcgcgcagatgcaacgggttcagctagatttgaaggaaactgtgacaaccgggaatgttatggggccatacttcgcgttttgtgctgtagttgacggcatccaatataaaacaggtctcggccagaacaagaaagagagccgttccaatgctgctaaactggccttagacgaacttctgcagcttgatgagcccgaaccacgcatcctcgagaccagcggccctccgccattcccagcagagcctgttgtactgtccgaacttgcatatgtgtcaaaagtacactacgaaggtagacacatccaatacgccaagatctcacagatcgttaaagagaggtttaatcagctgatatcaaatcgctctgaataccttaagtattccagcagcctggcagcgttcattatagagagagcaggtcaacacgaggttgtcgccataggaacgggagaatataattattctcaagacatcaagcctgacggccgagtgttacacgatacacacgccgtggtgacggcaaggagaagtttattgaggtacttttaccggcaactgttactgttttactcaaagaaccctgctatgatggaaaagtctattttttgcaccgagcctacttcaaatctcctgacgctgaaacagaatatcaacatctgcctgtacatgaaccagctgcctaaagggtccgctcagatcaagtcccaactccggctcaatccccattccatttcagccttcgaggctaatgaagagctatgtctgcatgttgctgtcgagggaaaaatctaccttacagtctactgtcctaaggacggcgttaataggatttcctcaatgtcctcatccgacaaactgaccaggtgggaggtgctcggcgtccaaggcgctttactgagccactttatccaaccggtgtacatctctagcattttaatcggcgacgggaactgttccgacacccgcggactggaaatcgccatcaaacagcgagtggatgatgccctcacctcaaagttgcctatgttctacctggtaaatcgaccccacattagcctcgtgcccagcgcgtatccactgcagatgaatttggaatacaagtttctgtcactgaactgggcccagggggatgtgtctctggagatagtggacggactgagtgggaagataaccgagtcctccccatttaagagtggcatgtcaatggcatctcggctgtgcaaggcagcaatgctgagtaggtttaaccttctcgcgaaggaggccaagaaagaactgctggaagctggaacttaccacgcggctaaatgtatgtctgcttcctatcaggaagctaagtgcaagctgaagagctacctacagcagcacggctacggcagctggattgtgaagagcccttgcatcgagcaattcaatatgtag

SEQ ID NO: 60178 - DNA, 1677 bp, Artificial Sequence
  derived and/or modified sequence
atgctgaagaagaacctgcccgtgcagcccgccaccaagaccatcaccacccccaccggctggagcagcgagagctacggcctgagcaagatggccagcaaggtgacccaggtgaccggcaacttccccgagcccctgctgagcaagaacctgagcagcatcagcaaccccgtgctgccccccaagaagatccccaaggagttcatcatgaagtacaagagaggcgagatcaaccccgtgagcgccctgcaccagttcgcccagatgcagagagtgcagctggacctgaaggagaccgtgaccaccggcaacgtgatgggcccctacttcgccttctgcgccgtggtggacggcatccagtacaagaccggcctgggccagaacaagaaggagagcagaagcaacgccgccaagctggccctggacgagctgctgcagctggacgagcccgagcccagaatcctggagaccagcggccccccccccttccccgccgagcccgtggtgctgagcgagctggcctacgtgagcaaggtgcactacgagggcagacacatccagtacgccaagatcagccagatcgtgaaggagagattcaaccagctgatcagcaacagaagcgagtacctgaagtacagcagcagcctggccgccttcatcatcgagagagccggccagcacgaggtggtggccatcggcaccggcgagtacaactacagccaggacatcaagcccgacggcagagtgctgcacgacacccacgccgtggtgaccgccagaagaagcctgctgagatacttctacagacagctgctgctgttctacagcaagaaccccgccatgatggagaagagcatcttctgcaccgagcccaccagcaacctgctgaccctgaagcagaacatcaacatctgcctgtacatgaaccagctgcccaagggcagcgcccagatcaagagccagctgagactgaacccccacagcatcagcgccttcgaggccaacgaggagctgtgcctgcacgtggccgtggagggcaagatctacctgaccgtgtactgccccaaggacggcgtgaacagaatcagcagcatgagcagcagcgacaagctgaccagatgggaggtgctgggcgtgcagggcgccctgctgagccacttcatccagcccgtgtacatcagcagcatcctgatcggcgacggcaactgcagcgacaccagaggcctggagatcgccatcaagcagagagtggacgacgccctgaccagcaagctgcccatgttctacctggtgaacagaccccacatcagcctggtgcccagcgcctaccccctgcagatgaacctggagtacaagttcctgagcctgaactgggcccagggcgacgtgagcctggagatcgtggacggcctgagcggcaagatcaccgagagcagccccttcaagagcggcatgagcatggccagcagactgtgcaaggccgccatgctgagcagattcaacctgctggccaaggaggccaagaaggagctgctggaggccggcacctaccacgccgccaagtgcatgagcgccagctaccaggaggccaagtgcaagctgaagagctacctgcagcagcacggctacggcagctggatcgtgaagagcccctgcatcgagcagttcaacatgtag

SEQ ID NO: 60179 - protein, 551 aa, Artificial Sequence
  derived and/or modified sequence
MRTRPRPRLRRTENFLTAVHHGKKEEKAAVERRRLHVLKALKKLRIEADEAPVVAVLGSGGGLRAHIACLGVLSEMKEQGLLDAVTYLAGVSGSTWAISSLYTNDGDMEALEADLKHRFTRQEWDLAKSLQKTIQAARSENYSLTDFWAYMVISKQTRELPESHLSNMKKPVEEGTLPYPIFAAIDNDLQPSWQEARAPETWFEFTPHHAGFSALGAFVSITHFGSKFKKGRLVRTHPERDLTFLRGLWGSALGNTEVIREYIFDQLRNLTLKGLWRRAVANAKSIGHLIFARLLRLQESSQGEHPPPEDEGGEPEHTWLTEMLENWTRTSLEKQEQPHEDPERKGSLSNLMDFVKKTGICASKWEWGTTHNFLYKHGGIRDKIMSSRKHLHLVDAGLAINTPFPLVLPPTREVHLILSFDFSAGDPFETIRATTDYCRRHKIPFPQVEEAELDLWSKAPASCYILKGETGPVVMHFPLFNIDACGGDIEAWSDTYDTFKLADTYTLDVVVLLLALAKKNVRENKKKILRELMNVAGLYYPKDSARSCCLA

SEQ ID NO: 60180 - DNA, 1656 bp, Artificial Sequence
  derived and/or modified sequence
atgcgtacgcggccaaggccaaggctgaggaggaccgaaaatttccttacagctgtgcaccacggcaagaaggaggaaaaggccgcagtcgagcgccgaagactgcatgtgctgaaggcactcaagaaactgaggatagaagctgacgaggctcctgtagtggcagtgctggggagcgggggcgggcttcgggcccacatcgcatgtcttggcgttctctccgagatgaaagaacaagggctgctggacgccgtcacctacctggccggcgtgtcagggagcacctgggcgatttctagcctgtacactaatgacggagacatggaggcacttgaagccgatcttaaacatcggttcacgaggcaagaatgggatctggcgaagtccctacagaagactatccaggccgcgcgttcggagaactatagcctcaccgacttttgggcctacatggtcatctctaagcagacacgggagctccccgagtctcatctgagcaatatgaaaaaaccagtggaagaaggcactctcccatatcccatcttcgcggccatcgacaatgatctgcagccttcgtggcaggaagccagagctccggaaacctggttcgagtttacaccacaccatgccggattttcggctctgggggccttcgtctctattacacattttggatccaaatttaaaaaaggaagactggttcggacccaccctgagcgggatttaacgttcttacggggcttgtggggatccgctttgggaaacacagaagtcattagagaatacatttttgaccagttaagaaacctcactttgaaagggctttggcgtcgtgctgtcgccaacgccaagtcaatcggtcacctcatttttgccagactgctgcgcctgcaggagtcttctcagggtgagcacccacctccagaggatgagggtggggaacctgagcacacttggctgactgaaatgctggagaactggaccagaacgtcattggaaaaacaggagcagccccatgaggaccccgaacgcaaagggtcgttgtcaaatctgatggacttcgtgaaaaagactgggatctgcgcctctaaatgggaatgggggaccactcacaattttctgtataagcacggagggattagggacaagattatgagttctcggaagcacttacatctcgttgacgcgggtcttgccatcaataccccttttccacttgtcctcccgcccacccgcgaggtccatctcatactgtccttcgacttctctgctggagatccttttgagacaatacgcgccactacagactattgtcggcgacacaagatacccttcccacaagttgaggaggccgagctagacctgtggagcaaggctcccgctagctgctacatcctcaaaggcgagaccgggcctgtggtaatgcattttcctctgtttaacattgatgcctgtggaggggacatcgaggcatggagcgacacgtacgatacctttaaattggcagatacttacaccctcgacgtcgtggttctcttactagccctagcgaaaaaaaatgtgagagagaacaaaaagaaaatactgagagagcttatgaacgttgctgggctttattaccctaaggacagcgcccgctcttgttgccttgcttag

SEQ ID NO: 60181 - DNA, 1656 bp, Artificial Sequence
  derived and/or modified sequence
atgaggacccggccccggccccggctgcggaggacagagaacttcctgacagctgtgcaccacggcaagaaggaggagaaggctgctgtggagcggcggcggctgcacgtgctgaaggccctgaagaagctgcgcatcgaggctgatgaggcccctgtggtggccgtgctgggcagcggcggcggcctgcgggcccacatcgcctgcctgggcgtgctgtctgagatgaaggagcagggcctgctggatgctgtgacctacctggccggcgtgtctggcagcacctgggccatcagcagcctgtacaccaatgatggagacatggaggccctggaggccgacctgaagcaccgcttcacccggcaggagtgggacctggccaagagcctgcagaagaccatccaggccgcccggtctgagaactacagcctgacagacttctgggcctacatggtgatcagcaagcagacccgggagctgcctgagagccacctgagcaacatgaagaagcctgtggaggagggcaccctgccctaccccatctttgctgccatcgacaatgacctgcagcccagctggcaggaggcccgggcccctgagacctggtttgagttcaccccccaccacgccggcttcagcgccctgggcgcctttgtgtccatcacccacttcggcagcaagttcaagaagggccgcctggtgaggacccaccctgagcgggacctgaccttcctgcggggcctgtggggcagcgccctgggcaacacagaggtgatccgggagtacatctttgaccagctgaggaacctgaccctgaagggcctgtggaggagagctgtggccaatgccaagagcatcggccacctgatctttgcccggctgctgcggctgcaggagagcagccagggcgagcaccccccaccagaagatgagggcggggagcctgagcacacctggctgacagagatgctggagaactggaccaggaccagcctggagaagcaggagcagccccatgaggaccctgagaggaagggcagcctgagcaacctgatggactttgtgaagaagacaggcatctgtgccagcaagtgggagtggggcaccacccacaacttcctgtacaagcatggaggcatccgggacaagatcatgagcagcaggaagcacctgcacctggtggatgctggcctggccatcaacacccccttccccctggtgctgccccccacccgggaggtgcacctgatcctgagctttgacttctctgctggggacccctttgagaccatccgggccaccacagactactgcagaagacacaagatccccttcccccaggtggaggaggccgagctggacctgtggagcaaggccccagccagctgctacatcctgaagggggagaccggccctgtggtgatgcacttccccctcttcaacattgatgcctgtggcggggacatcgaggcctggagcgacacctatgacaccttcaagctggccgacacctacaccctggatgtggtggtgctgctgctggccctggccaagaagaatgtgcgggagaacaagaagaagatcctgcgggagctgatgaatgtggccggcctgtactaccccaaggacagcgcccggagctgctgcctggcctag

SEQ ID NO: 60182 - DNA, 1656 bp, Artificial Sequence
  derived and/or modified sequence
atgcggacccggccccggccccggctgcggcggaccgagaacttcctgactgctgtgcatcacgggaagaaggaggagaaggccgcagtggagcggcggcgtctccacgtccttaaagccctcaagaagctgcggatcgaagcagacgaagcgcccgtcgtggcagtgctcggatcaggcggtgggttgagagctcacattgcttgcctgggagtgctgtcagaaatgaaggagcagggccttctcgacgctgttacctatctagctggggtttctgggagtacatgggccatctcaagcctgtacacaaacgatggtgacatggaagcgctggaggccgacttgaagcatcgcttcacgagacaggagtgggacctggccaagtctttgcagaagaccatccaggcagctcggagcgaaaactatagcctgacggacttttgggcttatatggtgattagcaagcagacccgggagctcccagagagccatctctcaaacatgaaaaagccagtggaagagggcactcttccgtaccccatttttgcggcaatagataacgatctccaaccttcctggcaagaagcgcgcgctcccgagacttggttcgagtttactccacatcatgcgggcttttccgccctaggagcattcgtgtctataacacactttgggagcaaatttaaaaaaggcagactagtgcgcacgcatccagaacgtgatttgacatttctgcgcggcctctggggtagtgccctgggtaacactgaggttattagggaatatattttcgatcagttgcgcaatctaacgctgaaaggtctatggaggcgcgctgtcgccaacgcaaagagcatcggccaccttatttttgctcgtcttctccggctgcaggaaagctcccagggagaacatccacccccagaggatgaggggggggaacctgagcacacatggctgaccgagatgctggagaactggactcgcaccagccttgagaagcaggagcagcctcatgaggaccccgagaggaaaggatccctgtcaaacttgatggatttcgtcaaaaaaaccggaatctgcgcttctaagtgggagtggggtaccacccataatttcttatacaagcacggtggtatacgagataagattatgtctagcaggaagcaccttcatctcgtagatgctggactcgcaatcaacaccccgtttccgctagtattgccaccaacaagggaagtacatctgattctgagcttcgacttttccgcaggagatcccttcgagaccatcagagcaaccaccgactattgtcgccggcataaaatcccttttccccaggtggaagaagcagaacttgacctgtggtcaaaggctccggccagttgttacattctaaaaggcgaaacgggaccagtggttatgcatttccctctcttcaatatcgacgcttgtggaggagatattgaagcttggtctgacacctatgacactttcaagttagccgacacatacacactggacgtggtggtgctcctgctcgcacttgccaagaaaaacgtcagggaaaataaaaaaaagatcctgcgagagttgatgaacgtcgctggactgtactaccccaaggactccgcccggtcatgttgcctggcatag

SEQ ID NO: 60183 - DNA, 2458 bp, Artificial Sequence
  derived and/or modified sequence
agctgaaaaagctggagcaaccaagcagggcctacaagccgaggagggctgtttaaaggcgcaggggccattttacctccaggttggccctgctcaggaccaggaggaaacacctccagcccgcgacctcctcccacagggggaaaaggaaagcaggaggaccacagaagctttggcaccgaggatccccgcagtcttcacccgcggagattccggctgaaggagctgtccagcgactacaccgctaagcgcagggagcccaagcctccgcaccggattccggagcacaagctccaccgcgcatgcgcacacgccccagacccaggctcaggaggactgagaattttctgaccgcagtgcaccatgggaagaaagaagaaaaggcggccgtggagagacgaagacttcatgtgctgaaagctctgaagaagctaaggattgaggctgatgaggccccagttgttgctgtgctgggctcaggcggaggactgcgggctcacattgcctgccttggggtcctgagtgagatgaaagaacagggcctgttggatgccgtcacgtacctcgcaggggtctctggatccacttgggcaatatcttctctctacaccaatgatggtgacatggaagctctcgaggctgacctgaaacatcgatttacccgacaggagtgggacttggctaagagcctacagaaaaccatccaagcagcgaggtctgagaattactctctgaccgacttctgggcctacatggttatctctaagcaaaccagagaactgccggagtctcatttgtccaatatgaagaagcccgtggaagaagggacactaccctacccaatatttgcagccattgacaatgacctgcaaccttcctggcaggaggcaagagcaccagagacctggttcgagttcacccctcaccacgctggcttctctgcactgggggcctttgtttccataacccacttcggaagcaaattcaagaagggaagactggtcagaactcaccctgagagagacctgactttcctgagaggtttatggggaagtgctcttggtaacactgaagtcattagggaatacatttttgaccagttaaggaatctgaccctgaaaggtttatggagaagggctgttgctaatgctaaaagcattggacaccttatttttgcccgattactgaggctgcaagaaagttcacaaggggaacatcctcccccagaagatgaaggcggtgagcctgaacacacctggctgactgagatgctcgagaattggaccaggacctccctggaaaagcaggagcagccccatgaggaccccgaaaggaaaggctcactcagtaacttgatggattttgtgaagaaaacaggcatttgcgcttcaaagtgggaatgggggaccactcacaacttcctgtacaaacacggtggcatccgggacaagataatgagcagccggaagcacctccacctggtggatgctggtttagccatcaacactcccttcccactcgtgctgcccccgacgcgggaggttcacctcatcctctccttcgacttcagtgccggagatcctttcgagaccatccgggctaccactgactactgccgccgccacaagatcccctttccccaagtagaagaggctgagctggatttgtggtccaaggcccccgccagctgctacatcctgaaaggagaaactggaccagtggtgatgcattttcccctgttcaacatagatgcctgtggaggtgatattgaggcatggagtgacacatacgacacattcaagcttgctgacacctacactctagatgtggtggtgctactcttggcattagccaagaagaatgtcagggaaaacaagaagaagatccttagagagttgatgaacgtggccgggctctactacccgaaggatagtgcccgaagttgctgcttggcatagatgagcctcagcttccagggcactgtgggcctgttggtctactagggccctgatgtccacctggccttcctgttcttcactcccttcagccacacgcttcatggccttgagttcaccttggctgtcctaacagggccaatcaccagtgaccagctagactgtgattttgatagcgtcattcagaagaaggcgtccaaggagctgaaggtggtgaaatttgtcctgcaggtccctcgggagatcctggagctggagcatgagtgtctgacaatcagaagcatcatgtccaatgtccagatggccagaatgaatgtgatagttcagaccaatgccttccactgctcctttatgactgcacttctagccagtagctctgcacaagttagctctgtagaagtaagaacttgggcttaaatcatgggctatctctccacagccaagtggagctctgagaatacaacaagtgctcaataaatgcttgctgattgactgatggatta

SEQ ID NO: 60184 - DNA, 1656 bp, Artificial Sequence
  derived and/or modified sequence
atgcgtacacgaccccgaccccgtctgcggagaacagaaaacttcttaactgccgtccatcacggtaagaaggaagagaaggcggctgtggaacgaaggcgcctccacgtcctgaaggcactgaaaaaactccgtattgaagcagatgaggcccctgtagtggccgttctgggctccggcggagggctgagggcccacattgcctgccttggcgtattgtccgaaatgaaagaacagggtctgctggacgcagttacatatctagctggagttagcggttccacatgggctatcagttccctgtacacaaacgatggagacatggaggcattagaagctgatctcaagcataggtttaccagacaggagtgggacttggccaaaagcctgcagaagaccattcaggccgctcgatcagagaactattccctgactgacttttgggcctatatggtgatttcaaagcagacccgggagctgccagaatcccatctcagcaacatgaaaaaacctgtagaagagggcaccctaccttaccccatcttcgccgctatcgacaacgacctccagccctcttggcaagaggcacgcgcacccgagacttggttcgagtttacgcctcatcacgccggtttctctgcactgggcgcatttgtgagcattacccattttggtagcaagtttaaaaagggacgcctggtgcggacacatccggaacgggacctgacgtttctcagagggctgtggggctccgcactcggcaacacagaggttatccgtgaatacatatttgaccagctacgtaacctcactctcaaaggtctgtggaggcgcgcagtggcaaacgctaagtcaattggccatctgattttcgctcggttgttaagactccaggaatcctcgcagggcgaacatccgccacccgaggatgaagggggtgagcccgagcatacctggctcacagaaatgctggagaactggactcggacctcgctcgaaaaacaggagcagccccacgaggatccagagcggaagggctctctcagcaacctgatggatttcgtgaagaagactggaatttgcgccagtaagtgggagtgggggaccactcacaattttctttacaagcacggcggaattagggacaagatcatgagttccagaaagcacctgcatttagtcgacgctggccttgctatcaacacacccttcccattagtgctgcctcccacccgggaagtccatctgatcctttcctttgacttctcagctggcgacccatttgagaccattagggccaccacggattattgccgccgtcacaagatcccctttccccaggttgaagaagccgaactcgacctctggtctaaggctcctgcctcctgctatatcctcaaaggcgagactggccctgtggtcatgcattttccactgtttaacattgatgcatgcggaggggacattgaggcctggagtgatacttatgacacctttaagttggctgacacatatacacttgatgttgtcgtgctacttctggctctggcaaagaagaatgtacgcgagaacaagaagaaaatcttaagagaactgatgaacgtggctgggctgtactatccaaaagacagcgcacgcagttgctgcctggcttag

SEQ ID NO: 60185 - DNA, 1656 bp, Artificial Sequence
  derived and/or modified sequence
atgagaaccagacccagacccagactgagaagaaccgagaacttcctgaccgccgtgcaccacggcaagaaggaggagaaggccgccgtggagagaagaagactgcacgtgctgaaggccctgaagaagctgagaatcgaggccgacgaggcccccgtggtggccgtgctgggcagcggcggcggcctgagagcccacatcgcctgcctgggcgtgctgagcgagatgaaggagcagggcctgctggacgccgtgacctacctggccggcgtgagcggcagcacctgggccatcagcagcctgtacaccaacgacggcgacatggaggccctggaggccgacctgaagcacagattcaccagacaggagtgggacctggccaagagcctgcagaagaccatccaggccgccagaagcgagaactacagcctgaccgacttctgggcctacatggtgatcagcaagcagaccagagagctgcccgagagccacctgagcaacatgaagaagcccgtggaggagggcaccctgccctaccccatcttcgccgccatcgacaacgacctgcagcccagctggcaggaggccagagcccccgagacctggttcgagttcaccccccaccacgccggcttcagcgccctgggcgccttcgtgagcatcacccacttcggcagcaagttcaagaagggcagactggtgagaacccaccccgagagagacctgaccttcctgagaggcctgtggggcagcgccctgggcaacaccgaggtgatcagagagtacatcttcgaccagctgagaaacctgaccctgaagggcctgtggagaagagccgtggccaacgccaagagcatcggccacctgatcttcgccagactgctgagactgcaggagagcagccagggcgagcaccccccccccgaggacgagggcggcgagcccgagcacacctggctgaccgagatgctggagaactggaccagaaccagcctggagaagcaggagcagccccacgaggaccccgagagaaagggcagcctgagcaacctgatggacttcgtgaagaagaccggcatctgcgccagcaagtgggagtggggcaccacccacaacttcctgtacaagcacggcggcatcagagacaagatcatgagcagcagaaagcacctgcacctggtggacgccggcctggccatcaacacccccttccccctggtgctgccccccaccagagaggtgcacctgatcctgagcttcgacttcagcgccggcgaccccttcgagaccatcagagccaccaccgactactgcagaagacacaagatccccttcccccaggtggaggaggccgagctggacctgtggagcaaggcccccgccagctgctacatcctgaagggcgagaccggccccgtggtgatgcacttccccctgttcaacatcgacgcctgcggcggcgacatcgaggcctggagcgacacctacgacaccttcaagctggccgacacctacaccctggacgtggtggtgctgctgctggccctggccaagaagaacgtgagagagaacaagaagaagatcctgagagagctgatgaacgtggccggcctgtactaccccaaggacagcgccagaagctgctgcctggcctag

SEQ ID NO: 60186 - DNA, 1584 bp, Artificial Sequence
  derived and/or modified sequence
atgggctcctcagaagtctcgataatcccaggattacagaaggaggaaaaagccgcggtcgaaagaaggcggctgcacgtgctaaaggccctcaaaaaactcagaatcgaggccgatgaagcacccgtggtggcagtgttaggatccggaggtggcttgagagcccacatcgcttgtctaggcgttctgtccgagatgaaagagcagggcctgctagatgccgtgacatacctggcaggagtttccggctctacgtgggccattagctcactgtacacaaatgatggggatatggaggctttagaagccgacctgaagcacagattcacgaggcaagagtgggatctggccaagtccctccagaaaacaatccaggccgcacgctccgagaattacagtctgactgacttttgggcctatatggtgatttctaagcagacccgagagttgcctgagagccatctctccaacatgaaaaaaccagtcgaggaaggaactttgccatatcctatcttcgcagccatcgacaatgatctgcagcccagctggcaggaagctcgagcgccggagacttggtttgagttcacaccacaccacgccggattctctgcactgggcgcctttgtcagcattacacacttcggaagcaaatttaagaagggtcgattagtgcggacacatccagaacgggatttgacgtttctgcggggtctctggggcagcgccctcggtaatactgaggtgataagggaatacatctttgatcagcttcgcaacctcactctgaagggcctgtggaggagagccgtggccaatgccaagtccatcggtcacttgattttcgccagactactgagactccaagagagctctcagggcgagcacccaccccctgaggacgagggtggcgaacctgaacatacctggttaactgagatgctggaaaattggacccggacttcattggaaaagcaagagcagccccatgaggatcccgaacgaaaaggctccttgtctaatcttatggactttgtcaaaaagactggcatctgtgcctcaaaatgggaatggggcacgactcacaacttcctttataagcacggaggtatccgcgacaagatcatgtcttccagaaagcatctgcatctggtggatgcgggccttgctattaataccccattccccctggtgttaccacctacgagagaggttcatctaatattgtcattcgacttctccgctggggatccgttcgagactatccgggcaacgaccgattattgtagacggcacaaaataccctttcctcaggtagaggaggctgaactcgacctctggtctaaagcaccagctagctgctatattttgaagggggagacgggtcccgtggtgatgcacttcccactgttcaatattgacgcatgcggtggagacattgaagcctggtccgacacctatgatacgttcaagctggccgacacctacacactggacgtcgtagtactcctgctggccctggccaaaaaaaatgttcgagagaataagaaaaagatactgcgggagctgatgaatgtggcgggttag

SEQ ID NO: 60187 - DNA, 1584 bp, Artificial Sequence
  derived and/or modified sequence
atgggcagcagcgaggtgtccatcatccctggcctgcagaaggaggagaaggctgctgtggagcggcggcggctgcacgtgctgaaggccctgaagaagctgcgcatcgaggctgatgaggcccctgtggtggccgtgctgggcagcggcggcggcctgcgggcccacatcgcctgcctgggcgtgctgtctgagatgaaggagcagggcctgctggatgctgtgacctacctggccggcgtgtctggcagcacctgggccatcagcagcctgtacaccaatgatggagacatggaggccctggaggccgacctgaagcaccgcttcacccggcaggagtgggacctggccaagagcctgcagaagaccatccaggccgcccggtctgagaactacagcctgacagacttctgggcctacatggtgatcagcaagcagacccgggagctgcctgagagccacctgagcaacatgaagaagcctgtggaggagggcaccctgccctaccccatctttgctgccatcgacaatgacctgcagcccagctggcaggaggcccgggcccctgagacctggtttgagttcaccccccaccacgccggcttcagcgccctgggcgcctttgtgtccatcacccacttcggcagcaagttcaagaagggccgcctggtgaggacccaccctgagcgggacctgaccttcctgcggggcctgtggggcagcgccctgggcaacacagaggtgatccgggagtacatctttgaccagctgaggaacctgaccctgaagggcctgtggaggagagctgtggccaatgccaagagcatcggccacctgatctttgcccggctgctgcggctgcaggagagcagccagggcgagcaccccccaccagaagatgagggcggggagcctgagcacacctggctgacagagatgctggagaactggaccaggaccagcctggagaagcaggagcagccccatgaggaccctgagaggaagggcagcctgagcaacctgatggactttgtgaagaagacaggcatctgtgccagcaagtgggagtggggcaccacccacaacttcctgtacaagcatggaggcatccgggacaagatcatgagcagcaggaagcacctgcacctggtggatgctggcctggccatcaacacccccttccccctggtgctgccccccacccgggaggtgcacctgatcctgagctttgacttctctgctggggacccctttgagaccatccgggccaccacagactactgcagaagacacaagatccccttcccccaggtggaggaggccgagctggacctgtggagcaaggccccagccagctgctacatcctgaagggggagaccggccctgtggtgatgcacttccccctcttcaacattgatgcctgtggcggggacatcgaggcctggagcgacacctatgacaccttcaagctggccgacacctacaccctggatgtggtggtgctgctgctggccctggccaagaagaatgtgcgggagaacaagaagaagatcctgcgggagctgatgaatgtggccggctag

SEQ ID NO: 60188 - DNA, 1584 bp, Artificial Sequence
  derived and/or modified sequence
atgggcagcagcgaggtgagcatcatccccggcctgcagaaggaggaaaaagctgccgttgagcgacgtcggctacatgtgttaaaggctctgaaaaaactgaggattgaagccgatgaagcaccagttgtcgctgttttgggttcaggtggagggctgagagcacatattgcctgtctgggcgttctttccgagatgaaggaacagggcctgctagatgcggtcacatacctcgctggcgtgagtggctcaacatgggcaattagcagcttgtatacaaacgacggtgacatggaagcgcttgaggctgatctgaaacacagattcacaagacaggagtgggacctggcaaagtctctccagaaaaccatccaagccgcaagatctgagaactactcgctgaccgatttttgggcatatatggtcatatctaaacagaccagggagctgcccgagtcccatctctcaaacatgaaaaagcccgtcgaggagggcacactcccctacccgatttttgcagcaattgataacgatttacaaccatcttggcaggaggcccgcgcccccgagacttggtttgagtttaccccacaccacgcagggttttccgccctgggagccttcgtatccataacccactttgggtccaaatttaaaaaaggaaggctcgttagaactcacccagagcgggatttgacattcctgagagggctttggggctctgcacttgggaatacagaggtaattagggagtacatcttcgatcagctgagaaatctgactcttaaggggctttggcgaagggcagtcgccaatgctaagtccattgggcacctgatctttgcccgtcttctgcgtctgcaggagagctcgcagggtgagcaccccccacctgaggacgagggcggcgaacccgagcacacctggctgacagagatgctggagaactggacccggacatctctggagaagcaggagcagccgcatgaggacccggagagaaaaggaagtctgtccaatctgatggactttgtcaaaaaaaccggaatttgcgcaagcaagtgggaatggggcacaactcataatttcctttataagcatggaggaatccgtgataaaatcatgtcatcccgcaagcaccttcacttagtggatgccgggcttgctatcaacaccccctttccactagtgcttcctcctacacgtgaggttcatcttattctcagtttcgacttctctgcaggggacccgtttgagactattagagctaccacggactactgtaggaggcacaaaatccctttccctcaggtagaggaagctgaactagacttgtggagcaaggcccccgcaagctgttacatcctcaagggcgagaccggccccgtcgtcatgcattttcctctttttaacatcgatgcctgtggtggggacatcgaggcttggagcgatacttacgatacatttaagctcgcagacacctatacactcgatgtcgtcgtcttgctgctggcgcttgccaagaaaaacgtacgcgagaataaaaagaaaattcttcgcgagcttatgaacgtggccggatag

SEQ ID NO: 60189 - DNA, 2567 bp, Artificial Sequence
  derived and/or modified sequence
cacggatgaaaatagctccgggtgagctctggaacagctgaaaaagctggagcaaccaagcagggcctacaagccgaggagggctgtttaaaggcgcaggggccattttacctccaggttggccctgctcaggaccaggaggaaacacctccagcccgcgacctcctcccacagggggaaaaggaaagcaggaggaccacagaagctttggcaccgaggatccccgcagtcttcacccgcggagattccggctgaaggagctgtccagcgactacaccgctaagcgcagggagcccaagcctccgcaccggattccggagcacaagctccaccgcgcatgcgcacacgccccagacccaggctcaggaggactgagaattttctgaccgcagtgcaccatgggaagctctgaagtttccataattcctgggctccagaaagaagaaaaggcggccgtggagagacgaagacttcatgtgctgaaagctctgaagaagctaaggattgaggctgatgaggccccagttgttgctgtgctgggctcaggcggaggactgcgggctcacattgcctgccttggggtcctgagtgagatgaaagaacagggcctgttggatgccgtcacgtacctcgcaggggtctctggatccacttgggcaatatcttctctctacaccaatgatggtgacatggaagctctcgaggctgacctgaaacatcgatttacccgacaggagtgggacttggctaagagcctacagaaaaccatccaagcagcgaggtctgagaattactctctgaccgacttctgggcctacatggttatctctaagcaaaccagagaactgccggagtctcatttgtccaatatgaagaagcccgtggaagaagggacactaccctacccaatatttgcagccattgacaatgacctgcaaccttcctggcaggaggcaagagcaccagagacctggttcgagttcacccctcaccacgctggcttctctgcactgggggcctttgtttccataacccacttcggaagcaaattcaagaagggaagactggtcagaactcaccctgagagagacctgactttcctgagaggtttatggggaagtgctcttggtaacactgaagtcattagggaatacatttttgaccagttaaggaatctgaccctgaaaggtttatggagaagggctgttgctaatgctaaaagcattggacaccttatttttgcccgattactgaggctgcaagaaagttcacaaggggaacatcctcccccagaagatgaaggcggtgagcctgaacacacctggctgactgagatgctcgagaattggaccaggacctccctggaaaagcaggagcagccccatgaggaccccgaaaggaaaggctcactcagtaacttgatggattttgtgaagaaaacaggcatttgcgcttcaaagtgggaatgggggaccactcacaacttcctgtacaaacacggtggcatccgggacaagataatgagcagccggaagcacctccacctggtggatgctggtttagccatcaacactcccttcccactcgtgctgcccccgacgcgggaggttcacctcatcctctccttcgacttcagtgccggagatcctttcgagaccatccgggctaccactgactactgccgccgccacaagatcccctttccccaagtagaagaggctgagctggatttgtggtccaaggcccccgccagctgctacatcctgaaaggagaaactggaccagtggtgatgcattttcccctgttcaacatagatgcctgtggaggtgatattgaggcatggagtgacacatacgacacattcaagcttgctgacacctacactctagatgtggtggtgctactcttggcattagccaagaagaatgtcagggaaaacaagaagaagatccttagagagttgatgaacgtggccgggtaggtgggagaccatagtcgctctgatgcctatgctcgttcagctctactacccgaaggatagtgcccgaagttgctgcttggcatagatgagcctcagcttccagggcactgtgggcctgttggtctactagggccctgatgtccacctggccttcctgttcttcactcccttcagccacacgcttcatggccttgagttcaccttggctgtcctaacagggccaatcaccagtgaccagctagactgtgattttgatagcgtcattcagaagaaggcgtccaaggagctgaaggtggtgaaatttgtcctgcaggtccctcgggagatcctggagctggagcatgagtgtctgacaatcagaagcatcatgtccaatgtccagatggccagaatgaatgtgatagttcagaccaatgccttccactgctcctttatgactgcacttctagccagtagctctgcacaagttagctctgtagaagtaagaacttgggcttaaatcatgggctatctctccacagccaagtggagctctgagaatacaacaagtgctcaataaatgcttgctgattgactgatggatta

SEQ ID NO: 60190 - DNA, 1584 bp, Artificial Sequence
  derived and/or modified sequence
atgggctcttcagaggtgtctattattcctggcctgcagaaggaagagaaagccgcagtggagaggcgaaggttgcacgtgctaaaggccctgaagaaactccgcatcgaggcagatgaggccccagttgtagccgtcctcggatcaggcggtggactcagagcccacatagcctgccttggtgtcctctccgagatgaaggagcagggtctgctggacgcggtgacctacctggctggcgtgtccgggagcacttgggctatctccagcctgtatactaatgacggtgacatggaggccctagaagcagacttgaagcataggtttacccggcaggaatgggatctggcaaaaagtctgcaaaaaaccatccaggctgccagaagcgaaaactactcactgaccgacttctgggcttatatggttatctcaaaacagacgcgcgaactgcctgaatctcatctgagcaatatgaaaaagcccgtagaagaaggaacactcccataccccattttcgcagccattgataacgatctgcagccatcctggcaagaagctcgggcacccgagacttggtttgaatttacacctcaccacgctggcttctccgcactcggggcatttgtttcgattacacacttcgggagcaagtttaagaagggacgactggtcaggactcatccagagagggatctgacatttctgcgagggctatggggatcagctctcgggaacacagaagtgatccgggaatatattttcgatcagcttaggaatttgacattgaagggcttatggcgtcgcgctgtcgccaacgctaagagtattggacacttaatttttgcacgtctcctgcgactccaggaaagtagccaaggggagcacccccctcctgaagacgaaggcggagaacccgaacatacatggttaaccgaaatgctggagaattggacccggactagcctggaaaaacaagagcagccccatgaagatccggagcgtaaaggatccctatctaatttaatggacttcgttaagaagactgggatttgcgcttccaaatgggagtggggtactacccataattttttgtataagcatgggggaatacgtgacaaaataatgtcgtcgcgaaagcacctgcacttggtagatgcgggtctcgctatcaataccccgttcccgctcgtgcttccccctacaagggaggtgcatttgattctgtcgtttgacttttccgcaggtgatccctttgagaccatacgtgccaccaccgactactgtagaaggcataagattccttttcctcaggttgaggaagctgagttggatttatggtccaaggcgccagcgagctgttacatcctcaaaggcgagacaggccctgtcgtgatgcacttccccctctttaacatcgatgcctgtggaggagatatagaggcttggtcagatacatacgacactttcaaactagccgatacctacaccctggatgtagtggtgctgttgctagccctggccaaaaagaatgtgcgtgagaataagaaaaagatattgcgcgaactcatgaatgtggcgggatag

SEQ ID NO: 60191 - DNA, 1584 bp, Artificial Sequence
  derived and/or modified sequence
atgggcagcagcgaggtgagcatcatccccggcctgcagaaggaggagaaggccgccgtggagagaagaagactgcacgtgctgaaggccctgaagaagctgagaatcgaggccgacgaggcccccgtggtggccgtgctgggcagcggcggcggcctgagagcccacatcgcctgcctgggcgtgctgagcgagatgaaggagcagggcctgctggacgccgtgacctacctggccggcgtgagcggcagcacctgggccatcagcagcctgtacaccaacgacggcgacatggaggccctggaggccgacctgaagcacagattcaccagacaggagtgggacctggccaagagcctgcagaagaccatccaggccgccagaagcgagaactacagcctgaccgacttctgggcctacatggtgatcagcaagcagaccagagagctgcccgagagccacctgagcaacatgaagaagcccgtggaggagggcaccctgccctaccccatcttcgccgccatcgacaacgacctgcagcccagctggcaggaggccagagcccccgagacctggttcgagttcaccccccaccacgccggcttcagcgccctgggcgccttcgtgagcatcacccacttcggcagcaagttcaagaagggcagactggtgagaacccaccccgagagagacctgaccttcctgagaggcctgtggggcagcgccctgggcaacaccgaggtgatcagagagtacatcttcgaccagctgagaaacctgaccctgaagggcctgtggagaagagccgtggccaacgccaagagcatcggccacctgatcttcgccagactgctgagactgcaggagagcagccagggcgagcaccccccccccgaggacgagggcggcgagcccgagcacacctggctgaccgagatgctggagaactggaccagaaccagcctggagaagcaggagcagccccacgaggaccccgagagaaagggcagcctgagcaacctgatggacttcgtgaagaagaccggcatctgcgccagcaagtgggagtggggcaccacccacaacttcctgtacaagcacggcggcatcagagacaagatcatgagcagcagaaagcacctgcacctggtggacgccggcctggccatcaacacccccttccccctggtgctgccccccaccagagaggtgcacctgatcctgagcttcgacttcagcgccggcgaccccttcgagaccatcagagccaccaccgactactgcagaagacacaagatccccttcccccaggtggaggaggccgagctggacctgtggagcaaggcccccgccagctgctacatcctgaagggcgagaccggccccgtggtgatgcacttccccctgttcaacatcgacgcctgcggcggcgacatcgaggcctggagcgacacctacgacaccttcaagctggccgacacctacaccctggacgtggtggtgctgctgctggccctggccaagaagaacgtgagagagaacaagaagaagatcctgagagagctgatgaacgtggccggctag

SEQ ID NO: 60192 - protein, 506 aa, Artificial Sequence
  derived and/or modified sequence
MTSGGSRFLWLLKILVIILVLGIVGFMFGSMFLQAVFSSPKPELPSPAPGVQKLKLLPEERLRNLFSYDGIWLFPKNQCKCEANKEQGGYNFQDAYGQSDLPAVKARRQAEFEHFQRREGLPRPLPLLVQPNLPFGYPVHGVEVMPLHTVPIPGLQFEGPDAPVYEVTLTASLGTLNTLADVPDSVVQGRGQKQLIISTSDRKLLKFILQHVTYTSTGYQHQKVDIVSLESRSSVAKFPVTIRHPVIPKLYDPGPERKLRNLVTIATKTFLRPHKLMIMLRSIREYYPDLTVIVADDSQKPLEIKDNHVEYYTMPFGKGWFAGRNLAISQVTTKYVLWVDDDFLFNEETKIEVLVDVLEKTELDVVGGSVLGNVFQFKLLLEQSENGACLHKRMGFFQPLDGFPSCVVTSGVVNFFLAHTERLQRVGFDPRLQRVAHSEFFIDGLGTLLVGSCPEVIIGHQSRSPVVDSELAALEKTYNTYRSNTLTRVQFKLALHYFKNHLQCAA

SEQ ID NO: 60193 - DNA, 1521 bp, Artificial Sequence
  derived and/or modified sequence
atgaccagcggcggcagcagattcctgtggctgctgaagatcctggtgatcatcctggtgctgggcatcgtgggcttcatgttcggcagcatgttcctgcaggccgtgttcagcagccccaagcccgagctgcccagccccgcccccggcgtgcagaagctgaagctgctgcccgaggagagactgagaaacctgttcagctacgacggcatctggctgttccccaagaaccagtgcaagtgcgaggccaacaaggagcagggcggctacaacttccaggacgcctacggccagagcgacctgcccgccgtgaaggccagaagacaggccgagttcgagcacttccagagaagagagggcctgcccagacccctgcccctgctggtgcagcccaacctgcccttcggctaccccgtgcacggcgtggaggtgatgcccctgcacaccgtgcccatccccggcctgcagttcgagggccccgacgcccccgtgtacgaggtgaccctgaccgccagcctgggcaccctgaacaccctggccgacgtgcccgacagcgtggtgcagggcagaggccagaagcagctgatcatcagcaccagcgacagaaagctgctgaagttcatcctgcagcacgtgacctacaccagcaccggctaccagcaccagaaggtggacatcgtgagcctggagagcagaagcagcgtggccaagttccccgtgaccatcagacaccccgtgatccccaagctgtacgaccccggccccgagagaaagctgagaaacctggtgaccatcgccaccaagaccttcctgagaccccacaagctgatgatcatgctgagaagcatcagagagtactaccccgacctgaccgtgatcgtggccgacgacagccagaagcccctggagatcaaggacaaccacgtggagtactacaccatgcccttcggcaagggctggttcgccggcagaaacctggccatcagccaggtgaccaccaagtacgtgctgtgggtggacgacgacttcctgttcaacgaggagaccaagatcgaggtgctggtggacgtgctggagaagaccgagctggacgtggtgggcggcagcgtgctgggcaacgtgttccagttcaagctgctgctggagcagagcgagaacggcgcctgcctgcacaagagaatgggcttcttccagcccctggacggcttccccagctgcgtggtgaccagcggcgtggtgaacttcttcctggcccacaccgagagactgcagagagtgggcttcgaccccagactgcagagagtggcccacagcgagttcttcatcgacggcctgggcaccctgctggtgggcagctgccccgaggtgatcatcggccaccagagcagaagccccgtggtggacagcgagctggccgccctggagaagacctacaacacctacagaagcaacaccctgaccagagtgcagttcaagctggccctgcactacttcaagaaccacctgcagtgcgccgcctag

SEQ ID NO: 60194 - DNA, 1521 bp, Artificial Sequence
  derived and/or modified sequence
atgacctcaggcggctctaggttcctttggcttctgaagatccttgtgatcatactcgtcctcggaatcgtgggatttatgtttggtagcatgttcctgcaggccgtctttagttctccaaaaccggaattaccatccccagccccaggcgtccaaaagttgaagctgctgccagaagagagattaagaaatctgttctcttacgacggaatctggcttttccctaagaatcagtgtaaatgtgaagccaataaagaacaagggggctacaatttccaggatgcctatgggcagagtgaccttcccgctgtgaaggcccgtaggcaggcagagtttgagcatttccaaaggcgcgaagggttgccaagacccctgccgttgcttgtgcagccaaacctaccctttggataccccgtgcacggcgtcgaagtcatgcctctccacaccgtccccataccaggcctccagtttgagggccctgacgcacccgtgtatgaagtgaccctaacagcttccctcggcacgttgaatacgctggctgatgtacctgacagcgttgttcaaggccgaggccaaaaacagcttataatttctaccagcgaccggaaattgttgaaatttatattgcagcatgtgacatacacctcaaccgggtatcagcaccagaaggtcgacatagtgagtcttgagagtcgaagcagcgtggctaaatttccagtcacaattcggcaccctgtgatccctaaactctatgatcctggcccagagagaaagctgcggaacctggtcactatcgcgacaaagacctttctgagaccacacaaactgatgattatgctccgaagtatccgtgagtactaccctgacctcaccgtcatcgtggctgatgactcgcagaagcctctcgagataaaagacaaccacgttgagtactacaccatgccttttggaaaggggtggttcgctgggcgaaatctggctatcagccaagtgacaaccaagtacgtgctgtgggttgacgacgattttttgttcaacgaagaaacaaaaattgaggtactggttgatgttctcgaaaagaccgagctagacgttgtgggtgggagcgtcttggggaatgtattccagttcaagttgctgctggagcaaagcgagaacggcgcttgtcttcataagcggatgggattctttcagccattggacggattcccttcatgtgttgtcaccagcggagtagtgaacttctttctcgctcacacagaaagacttcagagagtaggtttcgatcctcgcctgcagagggttgctcatagcgaattcttcatcgacgggttaggcacactcctcgtcggctcatgtcctgaggtgatcatcgggcaccagtcccggtcccctgtggtggactccgaacttgccgccctggagaaaacctacaatacatatcgatcaaataccctgactcgtgtacagttcaagctggctcttcattattttaaaaatcaccttcaatgtgccgcgtag

SEQ ID NO: 60195 - DNA, 1521 bp, Artificial Sequence
  derived and/or modified sequence
atgaccagcggcggcagccgcttcctgtggctgctgaagatcctggtgatcatcctggtgctgggcatcgtgggcttcatgtttggctccatgttcctgcaggccgtgttcagcagccccaagccagagctgcccagccctgcccctggggtgcagaagctgaagctgctgcctgaggagcggctgaggaacctcttctcctatgatggcatctggctgttccccaagaaccagtgcaagtgtgaggccaacaaggagcagggcggctacaacttccaggatgcctacggccagagcgacctgcctgctgtgaaggcccggcggcaggccgagtttgagcacttccagaggcgggagggcctgccccggcccctgcccctgctggtgcagcccaacctgcccttcggctaccctgtgcacggcgtggaggtgatgcccctgcacacagtgcccatccctggcctgcagtttgagggcccagatgcccctgtgtatgaggtgaccctgacagccagcctgggcaccctgaacaccctggctgatgtgcctgattctgtggtgcagggccggggccagaagcagctgatcatcagcaccagtgacaggaagctgctgaagttcatcctgcagcacgtgacctacaccagcacaggctaccagcaccagaaggtggacatcgtgtccctggagagccgcagctctgtggccaagtttcctgtgaccatccgccaccctgtgatccccaagctgtatgaccccggccctgagaggaagctgaggaacctggtgaccatcgccaccaagaccttcctgcggccccacaagctgatgatcatgctgcggagcatccgggagtactacccagacctgactgtgattgtggctgatgacagccagaagcccctggagatcaaggacaaccacgtggagtactacaccatgccctttgggaagggctggtttgctggcaggaacctggccatcagccaggtgaccaccaagtatgtgctgtgggtggatgatgacttcctgttcaatgaggagaccaagattgaggtgctggtggatgtgctggagaagacagagctggatgtggtgggcggctctgtgctgggcaatgtgttccagttcaagctgctgctggagcagagtgaaaatggagcctgcctgcacaagaggatgggcttcttccagcccctggatggcttccccagctgtgtggtgaccagcggcgtggtgaacttcttcctggcccacacagagcggctgcagagggtgggctttgacccccggctgcagagggtggcccacagcgagttcttcattgatggcctgggcaccctgctggtgggcagctgcccagaggtgatcatcggccaccagagccgcagccctgtggtggacagcgagctggccgccctggagaagacctacaacacctaccgcagcaacaccctgaccagggtgcagttcaagctggccctgcactacttcaagaaccacctgcagtgtgccgcctag

SEQ ID NO: 60196 - DNA, 1521 bp, Artificial Sequence
  derived and/or modified sequence
atgaccagcggcggcagccggttcctgtggctgctgaagatcctggtgatcatcctggtactaggtattgtgggctttatgtttggcagcatgttcctccaagctgtcttctcctcccctaaacccgaactcccaagcccagctcccggagtccaaaagctgaaattactgcccgaggagcggctgagaaacctgttcagttacgatggtatctggcttttccctaaaaaccagtgcaaatgcgaggcaaacaaggaacagggaggctacaacttccaggacgcttatggccagtctgatttgcccgcagttaaggcccggcgtcaggccgagttcgagcactttcagagacgggaagggttgccccgacccctgcctcttctagtccagcccaatctgccattcgggtacccagtgcacggggtggaggtgatgcccctccacaccgtcccaattccgggcttgcagttcgagggaccagacgcccccgtttacgaagtcacccttacggcctccttagggaccctcaataccttagcagatgttcccgactccgtagtgcagggcagaggacaaaagcagctgatcatttccacctctgatagaaagttgctgaagtttattctgcagcatgtgacttacacttcaacaggatatcaacaccagaaagtcgatatcgtatcacttgaaagccgctccagtgtcgctaagtttcccgtgactatccggcatcctgtcatccccaagttgtatgatccaggtcccgagcgcaaattacggaacttggtcacaatcgctacaaagacctttttgcgcccccacaagctgatgatcatgctgagaagcattagagagtactaccctgacttaaccgtgattgtggctgacgatagtcagaagccgctggagatcaaagataatcacgttgagtattataccatgcctttcggtaagggctggttcgccggccgcaatttggcaattagccaggtaaccacaaagtacgtactgtgggttgatgacgacttcctctttaatgaggagaccaaaatcgaagtgttggttgacgtgttggagaaaaccgagctcgatgtggtcggtgggtctgtcttgggaaatgtcttccagttcaagctcctgctggagcaatcagaaaacggcgcatgcctgcacaaacgaatgggctttttccagccgctcgatggcttcccttcctgtgtggtaacatctggcgttgttaactttttcctggcccatactgaacgcctgcaacgggttggttttgaccctcgcctgcagagggtcgcccattctgaatttttcatagatggactgggcactctccttgtcggatcgtgtcccgaggtgatcattggacatcaatcgagatcaccagttgtcgattcagaactggccgcactggagaagacatataacacatatagatctaacactctcacgagagtgcagtttaaactggctctacattatttcaagaaccacttacaatgtgcggcgtag

SEQ ID NO: 60197 - DNA, 1521 bp, Artificial Sequence
  derived and/or modified sequence
atgacctcagggggaagccggttcttgtggcttctgaagatcctggtcatcatcttggtattgggcattgtggggttcatgttcgggtctatgttcctgcaggctgtattcagctctccaaaacctgaacttccaagtccagccccaggagtccagaaacttaagctcctccctgaagagaggctgcgaaatctcttcagctacgacggcatttggttgtttccaaagaaccagtgtaagtgtgaagcaaacaaagagcaaggaggatacaacttccaggacgcttatggccaaagtgacttgcctgccgtcaaggccagaaggcaggcagaattcgagcacttccagagaagagaagggctgcccaggcccctgccccttctggtgcagcccaacctgcccttcgggtacccagtgcacggagtcgaggttatgcctctgcacacagtccctattcccggactgcagttcgagggccctgatgccccagtgtacgaagtcacgctcacggcttcgctgggaaccctgaatactctcgctgacgtcccagacagtgtggtccagggaaggggccaaaagcagcttattatcagcacgtctgataggaagttgctcaaatttattctccaacacgttacatacacctccacaggttatcagcaccagaaggtggatattgttagccttgaatctcgaagtagtgtggctaagttccctgtcaccattaggcaccctgtgattccaaagctttatgatccgggtcccgaacggaagctgagaaacctggtgacaatagcgactaaaaccttcctgagaccccacaagcttatgattatgctgcgttcgatacgggaatactacccagacctgaccgttatcgtagcagatgattcccagaaacccctcgaaataaaggataaccatgtggagtattacacaatgcctttcggcaaaggatggttcgctgggaggaatctggccatttcacaggttacgaccaaatacgtgctctgggtcgacgatgacttcctgttcaacgaagagaccaagatagaagtactggtggacgtgttagaaaagaccgagttagacgttgtgggcggatctgtgctcgggaacgttttccaattcaaactgctgcttgagcagagcgaaaatggcgcttgcctgcacaaacggatgggattctttcagcctctcgacggattcccttcatgcgtagttacttcgggggtggtcaactttttcctggcacacaccgagaggttacagagggtgggcttcgaccccaggttgcaaagagttgcccactcagaattctttattgatggcctcggaaccctgttagtgggaagctgtccggaagtcataatcgggcaccagtctcgaagtccagtagttgatagtgaattggctgctctggagaaaacttacaatacatatcgctcaaacactctgacacgcgtccagttcaagctggctctgcactatttcaaaaaccatttacaatgcgctgcgtag

SEQ ID NO: 60198 - DNA, 1691 bp, Artificial Sequence
  derived and/or modified sequence
agtctgagggcggcgggattcgggatgacttcgggcggctcgagatttctgtggctcctcaagatattggtcataatcctggtacttggcattgttggatttatgttcggaagcatgttccttcaagcagtgttcagcagccccaagccagaactcccaagtcctgccccgggtgtccagaagctgaagcttctgcctgaggaacgtctcaggaacctcttttcctacgatggaatctggctgttcccgaaaaatcagtgcaaatgtgaagccaacaaagagcagggaggttacaactttcaggatgcctatggccagagcgacctcccagcggtgaaagcgaggagacaggctgaatttgaacactttcagaggagagaagggctgccccgcccactgcccctgctggtccagcccaacctcccctttgggtacccagtccacggagtggaggtgatgcccctgcacacggttcccatcccaggcctccagtttgaaggacccgatgcccccgtctatgaggtcaccctgacagcttctctggggacactgaacacccttgctgatgtcccagacagtgtggtgcagggcagaggccagaagcagctgatcatttctaccagtgaccggaagctgttgaagttcattcttcagcacgtgacatacaccagcacggggtaccagcaccagaaggtagacatagtgagtctggagtccaggtcctcagtggccaagtttccagtgaccatccgccatcctgtcatacccaagctatacgaccctggaccagagaggaagctcagaaacctggttaccattgctaccaagactttcctccgcccccacaagctcatgatcatgctccggagtattcgagagtattacccagacttgaccgtaatagtggctgatgacagccagaagcccctggaaattaaagacaatcacgtggagtattacactatgccctttgggaagggttggtttgctggtaggaacctggccatatctcaggtcaccaccaaatacgttctctgggtggacgatgattttctcttcaacgaggagaccaagattgaggtgctggtggatgtcctggagaaaacagaactggacgtggtaggcggcagtgtgctgggaaatgtgttccagtttaagttgttgctggaacagagtgagaatggggcctgccttcacaagaggatgggatttttccaacccctggatggcttccccagctgcgtggtgaccagtggcgtggtcaacttcttcctggcccacacggagcgactccaaagagttggctttgatccccgcctgcaacgagtggctcactcagaattcttcattgatgggctagggaccctactcgtggggtcatgcccagaagtgattataggtcaccagtctcggtctccagtggtggactcagaactggctgccctagagaagacctacaatacataccggtccaacaccctcacccgggtccagttcaagctggccctccactacttcaagaaccatctccaatgtgccgcataaaggtgtgagggcataggagaaacactaggctggctggttatggtatctatagcaggccaccaaaaactggactcctgataggtgaacgttgtaccaaaccagctggtgggtagggaaaagggaaatggctcagttactggaagtac

SEQ ID NO: 60199 - protein, 480 aa, Artificial Sequence
  derived and/or modified sequence
MFGSMFLQAVFSSPKPELPSPAPGVQKLKLLPEERLRNLFSYDGIWLFPKNQCKCEANKEQGGYNFQDAYGQSDLPAVKARRQAEFEHFQRREGLPRPLPLLVQPNLPFGYPVHGVEVMPLHTVPIPGLQFEGPDAPVYEVTLTASLGTLNTLADVPDSVVQGRGQKQLIISTSDRKLLKFILQHVTYTSTGYQHQKVDIVSLESRSSVAKFPVTIRHPVIPKLYDPGPERKLRNLVTIATKTFLRPHKLMIMLRSIREYYPDLTVIVADDSQKPLEIKDNHVEYYTMPFGKGWFAGRNLAISQVTTKYVLWVDDDFLFNEETKIEVLVDVLEKTELDVVGGSVLGNVFQFKLLLEQSENGACLHKRMGFFQPLDGFPSCVVTSGVVNFFLAHTERLQRVGFDPRLQRVAHSEFFIDGLGTLLVGSCPEVIIGHQSRSPVVDSELAALEKTYNTYRSNTLTRVQFKLALHYFKNHLQCAA

SEQ ID NO: 60200 - protein, 218 aa, Artificial Sequence
  derived and/or modified sequence
MLRRPLAGLAAAALGRAPPDGMSGPRPVVLSGPSGAGKSTLLKRLLQEHSGIFGFSVSHTTRNPRPGEENGKDYYFVTREVMQRDIAAGDFIEHAEFSGNLYGTSKVAVQAVQAMNRICVLDVDLQGVRNIKATDLRPIYISVQPPSLHVLEQRLRQRNTETEESLVKRLAAAQADMESSPAGLESCPTAAVRTAAGQSPACLMWSSLTTAWTRPTQS

SEQ ID NO: 60201 - protein, 218 aa, Artificial Sequence
  derived and/or modified sequence
MLRRPLAGLAAAALGRAPPDGMSGPRPVVLSGPSGAGKSTLLKRLLQEHSGIFGFSVSHTTRNPRPGEENGKDYYFVTREVMQRDIAAGDFIEHAEFSGNLYGTSKVAVQAVQAMNRICVLDVDLQGVRNIKATDLRPIYISVQPPSLHVLEQRLRQRNTETEESLVKRLAAAQADMESSKEPGLFDVVIINDSLDQAYAELKEALSEEIKKAQRTGA

SEQ ID NO: 60202 - protein, 217 aa, Artificial Sequence
  derived and/or modified sequence
MLRRPLAGLAAAALGRAPPDGMSGPRPVVLSGPSGAGKSTLLKRLLQEHSGIFGFSVSHTTRNPRPGEENGKDYYFVTREVMQRDIAAGDFIEHAEFSGNLYGTSKVAVQAVQAMNRICVLDVDLQGVRNIKATDLRPIYISVQPPSLHVLEQRLRQRNTETEESLVKRLAAAQADMESSKEPGLFDVVIINDSLDQAYAELKEALSEEIKKAQRTG

SEQ ID NO: 60203 - DNA, 657 bp, Artificial Sequence
  derived and/or modified sequence
atgttgagacgcccgctagccggtctcgccgccgcggctctgggccgcgcacctcctgacgggatgagcgggccacggcccgtcgtcctcagcggcccctcaggtgcagggaaaagcaccttgctaaagcggctgctgcaagaacactccggaatttttggattttctgtgtcacataccacaagaaaccctaggcctggagaagagaacggaaaggactattacttcgttacaagggaggtcatgcagcgtgatattgccgctggcgatttcattgagcatgctgagttttctggcaatctttatggcacatccaaagtggcagtgcaggcggtgcaggctatgaatcgaatctgtgtgcttgacgtagatttgcaaggggtacggaatattaaagcaactgacctgagaccaatctacatatccgtccagccaccatctctgcatgtactggagcagagactgcgacagagaaacaccgaaacagaagagagcctggtaaaaaggctggccgccgctcaagcagacatggaaagcagtccggccggcttggaatcttgtcccacggccgctgttcggacagctgccggccaatcccccgcatgtctgatgtggtcttcgctgaccactgcctggacacggcctacgcagagttag

SEQ ID NO: 60204 - DNA, 657 bp, Artificial Sequence
  derived and/or modified sequence
atgctgcgcagaccattggctgggcttgcggctgctgccttgggaagagctccacctgacggcatgtcggggcctagacccgtggtgctctccggccctagcggtgccggcaagtcaactctcctgaaaaggctgctgcaggaacacagcggaatcttcgggttcagtgttagtcacaccacgcggaacccccgcccgggcgaagagaacgggaaagactattactttgtgacccgtgaagtaatgcaaagagacattgccgccggtgattttatagagcatgctgaattctctggtaacctctacggaaccagcaaagtcgccgtgcaggccgtgcaggccatgaacagaatctgtgtgcttgatgtggacctccaaggtgtccggaacattaaagcgacagacttgagacctatctacatctcagtacaaccaccatccttgcacgtcctggagcaacggcttcggcagaggaatacagagactgaggaaagtctggtgaaaagactcgcggccgcccaggctgatatggagtcctccaaggagcccggcctctttgacgttgtgattataaatgattcgttggatcaggcttatgcggaactgaaagaggctttgtccgaggagatcaaaaaagcccagcggacaggggcctag

SEQ ID NO: 60205 - DNA, 654 bp, Artificial Sequence
  derived and/or modified sequence
atgctgcgccggcctctggccggcctggcagctgctgccctcgggcgtgcccccccggacggcatgagcggcccgcgaccggttgtcttgtctggccccagcggcgctggaaagagcactctgcttaagcgattgctacaagagcactcagggatctttggcttttccgttagccatactaccagaaacccacggcccggagaggaaaatggcaaagactattatttcgttacgcgggaagttatgcagcgggacattgccgcgggcgatttcatcgaacacgcagaatttagtggaaatctgtatggaaccagtaaagtggccgtgcaggctgtgcaggcgatgaaccgcatttgcgtcctagacgttgatctgcagggtgtgagaaatatcaaagccacggatttgaggcctatatatatcagcgtgcagcctccttctctgcacgttctggagcagagattgcggcagaggaacacagagaccgaggagagtctggtaaaacgtctcgccgccgcccaggccgacatggagagtagtaaagagcccggcctctttgacgtggtgataatcaacgactccttagaccaggcgtacgctgagctaaaggaagcactttcagaggaaattaaaaaagcgcagagaaccggctag

SEQ ID NO: 60206 - DNA, 1084 bp, Artificial Sequence
  derived and/or modified sequence
gaggtggccccggatgctgcggcgcccgctggccgggctggctgcggccgccctgggccgggccccaccggacggcttgctctgctctttacctggggttgctgtcgaggaccctgtgcaagactcggccggtttttctttctccctgatggacagacccaaacatagccgcgcagcatcgtgaagggctggggccttcactcctctgtggctctggaagagcccgatttcctcaggaggcatgtcgggccccaggcctgtggtgctgagcgggccttcgggagctgggaagagcaccctgctgaagaggctgctccaggagcacagcggcatctttggcttcagcgtgtcccataccacgaggaacccgaggcccggcgaggagaacggcaaagattactactttgtaaccagggaggtgatgcagcgtgacatagcagccggcgacttcatcgagcatgccgagttctcggggaacctgtatggcacgagcaaggtggcggtgcaggccgtgcaggccatgaaccgcatctgtgtgctggacgtggacctgcagggtgtgcggaacatcaaggccaccgatctgcggcccatctacatctctgtgcagccgccttcactgcacgtgctggagcagcggctgcggcagcgcaacactgaaaccgaggagagcctggtgaagcggctggctgctgcccaggccgacatggagagcagcaaggagcccggcctgtttgatgtggtcatcattaacgacagcctggaccaggcctacgcagagctgaaggaggcgctctctgaggaaatcaagaaagctcaaaggaccggcgcctgaggcttgctgtctgttctcggcaccccgggcccatacaggaccagggcagcagcattgagccacccccttggcaggcgatacggcagctctgtgcccttggccagcatgtggagtggaggagatgctgcccctgtggttggaacatcctggggtgacccccgacccagcctcgctgggctgtcccctgtccctatctctcactctggacccagggctgacatcctaataaaataactgttggattagaaa

SEQ ID NO: 60207 - DNA, 940 bp, Artificial Sequence
  derived and/or modified sequence
cagcagatggggactagaggccgcactgctatccacagcctctcttctcacccccaggcatgtcgggccccaggcctgtggtgctgagcgggccttcgggagctgggaagagcaccctgctgaagaggctgctccaggagcacagcggcatctttggcttcagcgtgtcccataccacgaggaacccgaggcccggcgaggagaacggcaaagattactactttgtaaccagggaggtgatgcagcgtgacatagcagccggcgacttcatcgagcatgccgagttctcggggaacctgtatggcacgagcaaggtggcggtgcaggccgtgcaggccatgaaccgcatctgtgtgctggacgtggacctgcagggtgtgcggaacatcaaggccaccgatctgcggcccatctacatctctgtgcagccgccttcactgcacgtgctggagcagcggctgcggcagcgcaacactgaaaccgaggagagcctggtgaagcggctggctgctgcccaggccgacatggagagcagcaaggagcccggcctgtttgatgtggtcatcattaacgacagcctggaccaggcctacgcagagctgaaggaggcgctctctgaggaaatcaagaaagctcaaaggaccggcgcctgaggcttgctgtctgttctcggcaccccgggcccatacaggaccagggcagcagcattgagccacccccttggcaggcgatacggcagctctgtgcccttggccagcatgtggagtggaggagatgctgcccctgtggttggaacatcctggggtgacccccgacccagcctcgctgggctgtcccctgtccctatctctcactctggacccagggctgacatcctaataaaataactgttggattagaaactccataaatgagtggaatgtggccccaaggttggtgg

SEQ ID NO: 60208 - DNA, 1275 bp, Artificial Sequence
  derived and/or modified sequence
cgcctcgcctgagttgtgtccaaggtgtgcgtgtggccaggggtccatccgcttccctctagcccagcccctgaacacagctgcagtgcacggccccactcctcagctctgctccccatcccaactcgaagacgctgccctggccctgtgtgtgcagctcatgtggactgggagggcagggcaggtgcaggtcttggggcaagagctggagctgtcttttccttcctgcacagccgcagagcaggtggatggggctgcttccctgcaagggcccagggccaggccccctggggatttattcgtggcttagaagggtggggccagaagcaggcgtagtggggattagggactcagcacccccagctctcagtccagcagacagacccaccccaggctgactacagaggctgcacctcagcaaacaggcatgtcgggccccaggcctgtggtgctgagcgggccttcgggagctgggaagagcaccctgctgaagaggctgctccaggagcacagcggcatctttggcttcagcgtgtcccataccacgaggaacccgaggcccggcgaggagaacggcaaagattactactttgtaaccagggaggtgatgcagcgtgacatagcagccggcgacttcatcgagcatgccgagttctcggggaacctgtatggcacgagcaaggtggcggtgcaggccgtgcaggccatgaaccgcatctgtgtgctggacgtggacctgcagggtgtgcggaacatcaaggccaccgatctgcggcccatctacatctctgtgcagccgccttcactgcacgtgctggagcagcggctgcggcagcgcaacactgaaaccgaggagagcctggtgaagcggctggctgctgcccaggccgacatggagagcagcaaggagcccggcctgtttgatgtggtcatcattaacgacagcctggaccaggcctacgcagagctgaaggaggcgctctctgaggaaatcaagaaagctcaaaggaccggcgcctgaggcttgctgtctgttctcggcaccccgggcccatacaggaccagggcagcagcattgagccacccccttggcaggcgatacggcagctctgtgcccttggccagcatgtggagtggaggagatgctgcccctgtggttggaacatcctggggtgacccccgacccagcctcgctgggctgtcccctgtccctatctctcactctggacccagggctgacatcctaataaaataactgttggattagaaactcca

SEQ ID NO: 60209 - DNA, 689 bp, Artificial Sequence
  derived and/or modified sequence
tgcggccgccctgggccgggccccaccggacggcatgtcgggccccaggcctgtggtgctgagcgggccttcgggagctgggaagagcaccctgctgaagaggctgctccaggagcacagcggcatctttggcttcagcgtgtcccgtgagtccagggctctcgtggagggataccacgaggaacccgaggcccggcgaggagaacggcaaagggaggtgatgcagcgtgacatagcagccggcgacttcatcgagcatgccgagttctcggggaacctgtatggcacgagcaaggtggcggtgcaggccgtgcaggccatgaaccgcatctgtgtgctggacgtggacctgcagggtgtgcggaacatcaaggccaccgatctgcggcccatctacatctctgtgcagccgccttcactgcacgtgctggagcagcggctgcggcagcgcaacactgaaaccgaggagagcctggtgaagcggctggctgctgcccaggccgacatggagagcagcaaggagcccggcctgtttgatgtggtcatcattaacgacagcctggaccaggcctacgcagagctgaaggaggcgctctctgaggaaatcaagaaagctcaaaggaccggcgcctgaggcttgctgtctgttctcggcaccccgggcccatacaggaccagggcagcagcat

SEQ ID NO: 60210 - DNA, 850 bp, Artificial Sequence
  derived and/or modified sequence
gctggccgggctggctgcggccgccctgggccgggccccaccggacgcctctcttctcacccccaggcatgtcgggccccaggcctgtggtgctgagcgggccttcgggagctgggaagagcaccctgctgaagaggctgctccaggagcacagcggcatctttggcttcagcgtgtcccataccacgaggaacccgaggcccggcgaggagaacggcaaagattactactttgtaaccagggaggtgatgcagcgtgacatagcagccggcgacttcatcgagcatgccgagttctcggggaacctgtatggcacgagcaaggtggcggtgcaggccgtgcaggccatgaaccgcatctgtgtgctggacgtggacctgcagggtgtgcggaacatcaaggccaccgatctgcggcccatctacatctctgtgcagccgccttcactgcacgtgctgcggctgcggcagcgcaacactgaaaccgaggagagcctggtgaagcggctggctgctgcccaggccgacatggagagcagcaaggagcccggcctgtttgatgtggtcatcattaacgacagcctggaccaggcctacgcagagctgaaggaggcgctctctgaggtgggcccatccttgtgcctacctgggcaaggcccaaggggaggcctgggggccaggcctttgttgtccatgaggccactgaggaaatcaagaaagctcaaaggaccggcgcctgaggcttgctgtctgttctcggcaccccgggcccatacaggaccagggcagcagcattgagccacccccttggcaggcgatacggcagctctgtgcccttggccagcatgtgg

SEQ ID NO: 60211 - DNA, 844 bp, Artificial Sequence
  derived and/or modified sequence
gatgctgcggcgcccgctggccgggctggctgcggccgccctgggccgggccccaccggacggcatgtcgggccccaggcctgtggtgctgagcgggccttcgggagctgggaagagcaccctgctgaagaggctgctccaggagcacagcggcatctttggcttcagcgtgtcccataccacgaggaacccgaggcccggcgaggagaacggcaaagattactactttgtaaccagggaggtgatgcagcgtgacatagcagccggcgacttcatcgagcatgccgagttctcggggaacctgtatggcacgagcaaggtggcggtgcaggccgtgcaggccatgaaccgcatctgtgtgctggacgtggacctgcagggtgtgcggaacatcaaggccaccgatctgcggcccatctacatctctgtgcagccgccttcactgcacgtgctggagcagcggctgcggcagcgcaacactgaaaccgaggagagcctggtgaagcggctggctgctgcccaggccgacatggagagcagcccggctgggctggaaagctgtcccacagccgcagtgaggacagccgcaggccagagcccggcctgtttgatgtggtcatcattaacgacagcctggaccaggcctacgcagagctgaaggaggcgctctctgaggaaatcaagaaagctcaaaggaccggcgcctgaggcttgctgtctgttctcggcaccccgggcccatacaggaccagggcagcagcattgagccacccccttggcaggcgatacggcagctctgtgcccttggccagcatgtggagtggaggagatgctgcccctgtgg

SEQ ID NO: 60212 - DNA, 873 bp, Artificial Sequence
  derived and/or modified sequence
agaggtggccccggatgctgcggcgcccgctggccgggctggctgcggccgccctgggccgggccccaccggacgcctctcttctcacccccaggcatgtcgggccccaggcctgtggtgctgagcgggccttcgggagctgggaagagcaccctgctgaagaggctgctccaggagcacagcggcatctttggcttcagcgtgtcccataccacgaggaacccgaggcccggcgaggagaacggcaaagattactactttgtaaccagggaggtgatgcagcgtgacatagcagccggcgacttcatcgagcatgccgagttctcggggaacctgtatggcacgagcaaggtggcggtgcaggccgtgcaggccatgaaccgcatctgtgtgctggacgtggacctgcagggtgtgcggaacatcaaggccaccgatctgcggcccatctacatctctgtgcagccgccttcactgcacgtgctggagcagcggctgcggcagcgcaacactgaaaccgaggagagcctggtgaagcggctggctgctgcccaggccgacatggagagcagcaaggagcccggcctgtttgatgtggtcatcattaacgacagcctggaccaggcctacgcagagctgaaggaggcgctctctgaggaaatcaagaaagctcaaaggaccggcgcctgaggcttgctgtctgttctcggcaccccgggcccatacaggaccagggcagcagcattgagccacccccttggcaggcgatacggcagctctgtgcccttggccagcatgtggagtggaggagatgctgcccctgtggttggaacatcctggggtgacccccgacccagcctcgctgggctgtcc

SEQ ID NO: 60213 - DNA, 937 bp, Artificial Sequence
  derived and/or modified sequence
cttctctgagtgacaagcgggacaagtacgccgtgggcggggccggcgggtcgtgatgttagttcgcgctgtgtggaggcgggccggcgtggcgctgtgacgcagcgggagaagacgggctgggagggcgctgtgctgaacgcccctgcggtcgcgacaggccagcgcaggtggaggcggggctagcgaggcactgaggcatgtcgggccccaggcctgtggtgctgagcgggccttcgggagctgggaagagcaccctgctgaagaggctgctccaggagcacagcggcatctttggcttcagcgtgtcccataccacgaggaacccgaggcccggcgaggagaacggcaaagattactactttgtaaccagggaggtgatgcagcgtgacatagcagccggcgacttcatcgagcatgccgagttctcggggaacctgtatggcacgagcaaggtggcggtgcaggccgtgcaggccatgaaccgcatctgtgtgctggacgtggacctgcagggtgtgcggaacatcaaggccaccgatctgcggcccatctacatctctgtgcagccgccttcactgcacgtgctggagcagcggctgcggcagcgcaacactgaaaccgaggagagcctggtgaagcggctggctgctgcccaggccgacatggagagcagcaaggagcccggcctgtttgatgtggtcatcattaacgacagcctggaccaggcctacgcagagctgaaggaggcgctctctgaggaaatcaagaaagctcaaaggaccggcgcctgaggcttgctgtctgttctcggcaccccgggcccatacaggaccagggcagcagcattgagccacccccttggcaggcgatacggcagctctgtgcccttggccagcatgtggagtggaggagatgctgcccctgtggttggaac

SEQ ID NO: 60214 - DNA, 990 bp, Artificial Sequence
  derived and/or modified sequence
agtctcgcgcgcgggcggaggtgggccggtgcggcgctgtcacgtaggttcagtgggcggaagaggtggccccggatgctgcggcgcccgctggccgggctggctgcggccgccctgggccgggccccaccggacggcatgtcgggccccaggcctgtggtgctgagcgggccttcgggagctgggaagagcaccctgctgaagaggctgctccaggagcacagcggcatctttggcttcagcgtgtcccataccacgaggaacccgaggcccggcgaggagaacggcaaagattactactttgtaaccagggaggtgatgcagcgtgacatagcagccggcgacttcatcgagcatgccgagttctcggggaacctgtatggcacgagcaaggtggcggtgcaggccgtgcaggccatgaaccgcatctgtgtgctggacgtggacctgcagggtgtgcggaacatcaaggccaccgatctgcggcccatctacatctctgtgcagccgccttcactgcacgtgctggagcagcggctgcggcagcgcaacactgaaaccgaggagagcctggtgaagcggctggctgctgcccaggccgacatggagagcagcaaggagcccggcctgtttgatgtggtcatcattaacgacagcctggaccaggcctacgcagagctgaaggaggcgctctctgaggaaatcaagaaagctcaaaggaccggcgcctgaggcttgctgtctgttctcggcaccccgggcccatacaggaccagggcagcagcattgagccacccccttggcaggcgatacggcagctctgtgcccttggccagcatgtggagtggaggagatgctgcccctgtggttggaacatcctggggtgacccccgacccagcctcgctgggctgtcccctgtccctatctctcactctggacccagggctgacatcctaataaaataactgttggattagaaactccataaa

SEQ ID NO: 60215 - DNA, 656 bp, Artificial Sequence
  derived and/or modified sequence
cccggatgctgcggcgcccgctggccgggctggctgcggccgccctgggccgggccccaccggacggcatgtcgggccccaggcctgtggtgctgagcgggccttcgggagctgggaagagcaccctgctgaagaggctgctccaggagcacagcggcatctttggcttcagcgtgtcccataccacgaggaacccgaggcccggcgaggagaacggcaaagattactactttgtaaccagggaggtgatgcagcgtgacatagcagccggcgacttcatcgagcatgccgagttctcggggaacctgtatggcacgagcaaggtggcggtgcaggccgtgcaggccatgaaccgcatctgtgtgctggacgtggacctgcagggtgtgcggaacatcaaggccaccgatctgcggcccatctacatctctgtgcagccgccttcactgcacgtgctggagcagcggctgcggcagcgcaacactgaaaccgaggagagcctggtgaagcggctggctgctgcccaggccgacatggagagcagcaaggagcccggcctgtttgatgtggtcatcattaacgacagcctggaccaggcctacgcagagctgaaggaggcgctctctgaggaaatcaagaaagctcaaaggaccggc

SEQ ID NO: 60216 - DNA, 657 bp, Artificial Sequence
  derived and/or modified sequence
atgctgcggcggcccctggccggcctggccgccgccgccctgggccgggcccccccagatggcatgagcggccccaggcctgtggtgctgagcggccccagcggggccggcaagagcaccctgctgaagaggctgctgcaggagcacagcggcatcttcggcttctctgtgagccacaccaccaggaaccccaggcctggagaagaaaatggcaaggactactactttgtgacccgggaggtgatgcagagggacattgctgctggggacttcatcgagcacgccgagttcagcggcaacctgtatggcaccagcaaggtggccgtgcaggccgtgcaggccatgaaccgcatctgtgtgctggatgtggacctgcagggcgtgaggaacatcaaggccacagacctgcggcccatctacatctctgtgcagccccccagcctgcacgtgctggagcagaggctgcggcagaggaacacagaaacagaggagagcctggtgaagaggctggccgccgcccaggccgacatggagagcagccctgctggcctggagagctgccccacagctgctgtgaggacagctgctggccagagccctgcctgcctgatgtggagcagcctgaccacagcctggacccggcccacccagagctag

SEQ ID NO: 60217 - DNA, 657 bp, Artificial Sequence
  derived and/or modified sequence
atgctgcggcggcccctggccggcctggccgccgccgccctgggccgggcccccccagatggcatgagcggccccaggcctgtggtgctgagcggccccagcggggccggcaagagcaccctgctgaagaggctgctgcaggagcacagcggcatcttcggcttctctgtgagccacaccaccaggaaccccaggcctggagaagaaaatggcaaggactactactttgtgacccgggaggtgatgcagagggacattgctgctggggacttcatcgagcacgccgagttcagcggcaacctgtatggcaccagcaaggtggccgtgcaggccgtgcaggccatgaaccgcatctgtgtgctggatgtggacctgcagggcgtgaggaacatcaaggccacagacctgcggcccatctacatctctgtgcagccccccagcctgcacgtgctggagcagaggctgcggcagaggaacacagaaacagaggagagcctggtgaagaggctggccgccgcccaggccgacatggagagcagcaaggagcccggcctgtttgatgtggtgatcatcaatgacagcctggaccaggcctatgcagagctgaaggaggccctgtctgaggagatcaagaaggcccagaggactggagcctag

SEQ ID NO: 60218 - DNA, 654 bp, Artificial Sequence
  derived and/or modified sequence
atgctgcggcggcccctggccggcctggccgccgccgccctgggccgggcccccccagatggcatgagcggccccaggcctgtggtgctgagcggccccagcggggccggcaagagcaccctgctgaagaggctgctgcaggagcacagcggcatcttcggcttctctgtgagccacaccaccaggaaccccaggcctggagaagaaaatggcaaggactactactttgtgacccgggaggtgatgcagagggacattgctgctggggacttcatcgagcacgccgagttcagcggcaacctgtatggcaccagcaaggtggccgtgcaggccgtgcaggccatgaaccgcatctgtgtgctggatgtggacctgcagggcgtgaggaacatcaaggccacagacctgcggcccatctacatctctgtgcagccccccagcctgcacgtgctggagcagaggctgcggcagaggaacacagaaacagaggagagcctggtgaagaggctggccgccgcccaggccgacatggagagcagcaaggagcccggcctgtttgatgtggtgatcatcaatgacagcctggaccaggcctatgcagagctgaaggaggccctgtctgaggagatcaagaaggcccagaggactggatag

SEQ ID NO: 60219 - DNA, 657 bp, Artificial Sequence
  derived and/or modified sequence
atgctgcggcggcccctggccggcctggccgccgccgccctgggcagggccccacctgacggcatgagcgggccccggcctgtggttctgagtggcccgagcggagcaggcaagagcaccctgctgaaacgtctgttgcaggagcatagcggaatcttcggctttagcgtgagtcacaccacacgcaatccccggccaggggaggaaaatggcaaggattattactttgtgacccgagaagttatgcagcgagatatagccgcaggcgacttcatcgagcacgcagagtttagtggcaacctctacggtactagtaaggtagccgtacaggccgttcaggctatgaaccggatatgcgtgctggatgtggatcttcagggagttaggaacatcaaggcgacagacctgcgacccatttacatctctgtccaacctccatcgttgcacgtgctggagcagagactgcggcagagaaatactgagactgaagagtctctcgtgaaaaggctcgctgccgcacaggcggacatggaatcttcacccgccgggttggaatcctgccctacggccgccgtgagaaccgctgccggtcaatctcctgcgtgcctgatgtggtcctcgctgaccactgcctggactcggccaacacagtcttag

SEQ ID NO: 60220 - DNA, 657 bp, Artificial Sequence
  derived and/or modified sequence
atgctgcggcggcccctggccggcctggccgccgccgccctgggcagggccccgcctgacggtatgtcaggcccccggccagtcgtgttaagcggtccatctggagcagggaaaagcacacttctgaagcggctgttgcaggagcactccggtatctttggatttagcgtcagtcacaccacacggaaccctagaccgggagaagagaacggtaaagattattactttgtaacccgagaagtgatgcagcgggacatcgcagccggcgatttcatcgaacacgcagaattttcaggaaacctctatggtacttccaaagtagccgtgcaggctgtgcaggcaatgaatcggatctgcgtcctggatgtcgatctgcagggcgtgcgcaatataaaagctacagatctgcgacctatatacatctcggtacaaccaccttctctgcacgtgctggagcaaaggttgagacagaggaataccgagactgaagagagcctggtgaagaggctagcagccgcgcaggctgatatggagagtagcaaagagccaggcttgttcgacgtggtgataattaatgactctctcgatcaagcttatgcagagctcaaagaggctctgtctgaggagattaagaaggcacagaggacgggggcatag

SEQ ID NO: 60221 - DNA, 654 bp, Artificial Sequence
  derived and/or modified sequence
atgctgcggcggcccctggccggcctggccgccgccgccctgggccgtgccccacccgacggaatgtccgggccccggccagttgtcctttctggccctagcggggcggggaagagtacacttttgaaaaggctgctacaggagcattccggcatcttcggtttttcagtgagtcacacaactcgtaatccacgaccaggagaagaaaatggtaaggactattactttgtgacccgggaggtgatgcagcgtgacattgctgcgggggacttcattgaacatgctgagtttagcggcaacctgtatggcacaagtaaagttgccgtgcaggccgtgcaggccatgaacagaatctgtgtgctggatgttgacctccagggcgtgcggaacatcaaggctacagaccttcggcccatctatatctccgtgcagccacccagtctccacgtgctggaacagaggctccggcagcggaacacagaaacggaagagtcactggtcaagcgcctggcggccgcccaggcagacatggagtcttccaaggagcctggactctttgatgtagtcattattaacgacagcctggatcaggcttacgccgagctcaaagaagcattatccgaagagatcaagaaagcgcaaaggactggttag

SEQ ID NO: 60222 - DNA, 657 bp, Artificial Sequence
  derived and/or modified sequence
atgttaaggcgccctctagctgggctggctgcagcagccctggggagagctcctcccgatggaatgagtggtccgcgaccagtggttttgtccggcccatctggcgcaggcaaatctactttactcaagcgcctactgcaggaacatagcggaattttcggcttctctgtgtctcacacgactagaaatcctcggccaggagaggagaatggcaaagattattatttcgtcacgcgagaagtgatgcagcgcgacatcgcagcaggcgactttatcgagcacgcagaattttccggaaacttgtatggaacttccaaggtggctgtccaggctgttcaggccatgaaccgcatttgcgttctggacgtggatttgcagggggtgcggaatatcaaggccacagacttgcggcctatttacatctctgtacagccaccctcactgcacgtactcgaacagcgactccggcagaggaacacggagaccgaagagtccctggtcaaaaggcttgcagctgcccaagctgacatggagagcagccctgccggactggagagctgtcccaccgccgctgtaagaacagccgcagggcagtcacctgcttgtcttatgtggtcaagtctcaccacagcatggacacgcccaacccaatcctag

SEQ ID NO: 60223 - DNA, 657 bp, Artificial Sequence
  derived and/or modified sequence
atgctccgcaggcctctcgctggtttggcggcagctgctctcggcagggcacccccagacggaatgagcggaccacgtcccgttgtgctgagtggccctagcggcgcaggcaaaagtaccctgctaaaacggcttctgcaggagcatagcggcatctttggattctcggttagccacaccacgcggaacccgcgacccggagaggaaaatggaaaagattactacttcgtgactcgcgaagtgatgcagcgagatatcgctgcgggtgatttcatcgagcatgcagaattttcaggtaacctgtatggtacgtcgaaagtggccgtgcaggccgtgcaggcaatgaacaggatctgtgtgcttgacgtggaccttcagggcgtgagaaatattaaggccactgatctgcggccaatatacatatctgttcagccacctagcttacacgtgttggagcagaggctgcgacagcggaacacagagaccgaggaatccctcgtgaagcggctcgcagccgcacaggccgatatggagtcgtccaaggagcctggcctgtttgatgtggtcattatcaacgattctttggaccaagcatacgctgagctaaaggaggcgctgagcgaagagataaagaaggcccagcgcacaggcgcttag

SEQ ID NO: 60224 - DNA, 654 bp, Artificial Sequence
  derived and/or modified sequence
atgctgagaagacctttagccggactcgcagccgctgcgttgggcagagcacctccagacggcatgagtggacctagacccgtcgtgcttagcgggcctagcggagcagggaagtcaactctgctgaaacgcctgctgcaagaacactccgggatattcggtttcagtgtcagtcacaccactaggaaccccaggcctggtgaagagaacgggaaggattactactttgtgacaagagaggtcatgcagagagatatagcagcgggtgacttcattgaacacgccgagtttagcggcaacttgtacgggaccagcaaggtggcggtgcaggcggtgcaggcaatgaacaggatatgcgtgcttgatgtggacctgcaaggggtacgtaatattaaagctaccgacctgcgcccaatttatatatctgtccagcccccatctctgcacgtactggaacagcgtctacgccagcgaaatacggaaacagaagagagtctggttaagcggctggccgcagcccaggccgacatggagagctctaaagagccaggtcttttcgatgttgtcatcatcaacgacagtcttgatcaggcttacgccgagctgaaagaggcattgtcagaagagataaagaaagcccagcggaccggttag

SEQ ID NO: 60225 - DNA, 657 bp, Artificial Sequence
  derived and/or modified sequence
atgctgagaagacccctggccggcctggccgccgccgccctgggcagagccccccccgacggcatgagcggccccagacccgtggtgctgagcggccccagcggcgccggcaagagcaccctgctgaagagactgctgcaggagcacagcggcatcttcggcttcagcgtgagccacaccaccagaaaccccagacccggcgaggagaacggcaaggactactacttcgtgaccagagaggtgatgcagagagacatcgccgccggcgacttcatcgagcacgccgagttcagcggcaacctgtacggcaccagcaaggtggccgtgcaggccgtgcaggccatgaacagaatctgcgtgctggacgtggacctgcagggcgtgagaaacatcaaggccaccgacctgagacccatctacatcagcgtgcagccccccagcctgcacgtgctggagcagagactgagacagagaaacaccgagaccgaggagagcctggtgaagagactggccgccgcccaggccgacatggagagcagccccgccggcctggagagctgccccaccgccgccgtgagaaccgccgccggccagagccccgcctgcctgatgtggagcagcctgaccaccgcctggaccagacccacccagagctag

SEQ ID NO: 60226 - DNA, 657 bp, Artificial Sequence
  derived and/or modified sequence
atgctgagaagacccctggccggcctggccgccgccgccctgggcagagccccccccgacggcatgagcggccccagacccgtggtgctgagcggccccagcggcgccggcaagagcaccctgctgaagagactgctgcaggagcacagcggcatcttcggcttcagcgtgagccacaccaccagaaaccccagacccggcgaggagaacggcaaggactactacttcgtgaccagagaggtgatgcagagagacatcgccgccggcgacttcatcgagcacgccgagttcagcggcaacctgtacggcaccagcaaggtggccgtgcaggccgtgcaggccatgaacagaatctgcgtgctggacgtggacctgcagggcgtgagaaacatcaaggccaccgacctgagacccatctacatcagcgtgcagccccccagcctgcacgtgctggagcagagactgagacagagaaacaccgagaccgaggagagcctggtgaagagactggccgccgcccaggccgacatggagagcagcaaggagcccggcctgttcgacgtggtgatcatcaacgacagcctggaccaggcctacgccgagctgaaggaggccctgagcgaggagatcaagaaggcccagagaaccggcgcctag

SEQ ID NO: 60227 - DNA, 654 bp, Artificial Sequence
  derived and/or modified sequence
atgctgagaagacccctggccggcctggccgccgccgccctgggcagagccccccccgacggcatgagcggccccagacccgtggtgctgagcggccccagcggcgccggcaagagcaccctgctgaagagactgctgcaggagcacagcggcatcttcggcttcagcgtgagccacaccaccagaaaccccagacccggcgaggagaacggcaaggactactacttcgtgaccagagaggtgatgcagagagacatcgccgccggcgacttcatcgagcacgccgagttcagcggcaacctgtacggcaccagcaaggtggccgtgcaggccgtgcaggccatgaacagaatctgcgtgctggacgtggacctgcagggcgtgagaaacatcaaggccaccgacctgagacccatctacatcagcgtgcagccccccagcctgcacgtgctggagcagagactgagacagagaaacaccgagaccgaggagagcctggtgaagagactggccgccgcccaggccgacatggagagcagcaaggagcccggcctgttcgacgtggtgatcatcaacgacagcctggaccaggcctacgccgagctgaaggaggccctgagcgaggagatcaagaaggcccagagaaccggctag

SEQ ID NO: 60228 - protein, 197 aa, Artificial Sequence
  derived and/or modified sequence
MSGPRPVVLSGPSGAGKSTLLKRLLQEHSGIFGFSVSHTTRNPRPGEENGKDYYFVTREVMQRDIAAGDFIEHAEFSGNLYGTSKVAVQAVQAMNRICVLDVDLQGVRNIKATDLRPIYISVQPPSLHVLEQRLRQRNTETEESLVKRLAAAQADMESSKEPGLFDVVIINDSLDQAYAELKEALSEEIKKAQRTGA

SEQ ID NO: 60229 - protein, 199 aa, Artificial Sequence
  derived and/or modified sequence
MSGPRPVVLSGPSGAGKSTLLKRLLQEHSGIFGFSVSRESRALVEGYHEEPEARRGERQREVMQRDIAAGDFIEHAEFSGNLYGTSKVAVQAVQAMNRICVLDVDLQGVRNIKATDLRPIYISVQPPSLHVLEQRLRQRNTETEESLVKRLAAAQADMESSKEPGLFDVVIINDSLDQAYAELKEALSEEIKKAQRTGA

SEQ ID NO: 60230 - protein, 242 aa, Artificial Sequence
  derived and/or modified sequence
MSGPRPVVLSGPSGAGKSTLLKRLLQEHSGIFGFSVSHTTRNPRPGEENGKDYYFVTREVMQRDIAAGDFIEHAEFSGNLYGTSKVAVQAVQAMNRICVLDVDLQGVRNIKATDLRPIYISVQPPSLHVLRLRQRNTETEESLVKRLAAAQADMESSKEPGLFDVVIINDSLDQAYAELKEALSEVGPSLCLPGQGPRGGLGARPLLSMRPLRKSRKLKGPAPEACCLFSAPRAHTGPGQQH

SEQ ID NO: 60231 - protein, 171 aa, Artificial Sequence
  derived and/or modified sequence
MSGPRPVVLSGPSGAGKSTLLKRLLQEHSGIFGFSVSRESNTTRNPRPGEENGKDYYFVTREVMQRDIAAGDFIEHAEFSGNLYGTSKVAVQAVQAMNRICVLDVDLQGVRNIKATDLRPIYISVQPPSLHVLEQRLRQRNTETEESLVKRLAAAQADMESEIKKAQRTGA

SEQ ID NO: 60232 - DNA, 594 bp, Artificial Sequence
  derived and/or modified sequence
atgagcgggccccggcccgttgtcctcagcgggccctccggcgccggcaaaagtaccctcctgaagcggctgttgcaagagcatagtggcatctttgggttttctgtgtcgcacactacgcggaatcctcgcccaggggaggagaacgggaaagattactacttcgtcacccgtgaagtgatgcaaagggatatcgctgccggagatttcatcgagcatgctgagtttagcggcaatctctacggtacctctaaggttgcagtgcaggccgtacaggccatgaatagaatctgtgtgttagatgtagatcttcaaggggtacggaacattaaagccacagatcttaggcctatctacatctccgtacaaccccctagcctgcatgtgttagagcagagactccggcagagaaacaccgaaactgaggaatccctggtcaagaggctggcagctgcgcaggccgatatggaaagcagcaaagagccggggcttttcgatgttgtcatcataaacgacagtctggaccaggcttatgctgaacttaaagaggctctgagtgaagaaattaagaaggcacagcgcacaggcgcctag

SEQ ID NO: 60233 - DNA, 594 bp, Artificial Sequence
  derived and/or modified sequence
atgtctggccccaggccggtagtcctctctggcccaagtggggcaggcaagtccacactcttaaaaagactgctgcaggaacactctgggatcttcggcttctctgtgagtcatacaacgcgcaacccgaggcccggagaggagaatgggaaggactactacttcgttacaagggaagtgatgcaacgggacattgcagcaggcgacttcatcgaacacgccgaattcagcggcaacctgtatgggacaagcaaggtggctgtgcaagccgtccaggcaatgaaccggatttgcgtactcgatgttgacctccaaggagtgagaaacattaaagcaacagacctgcgccctatctacatatccgtccagcctcccagcctgcacgttctggagcaaaggctgaggcaaaggaatacagagacagaggagagccttgtaaagagattggcagctgcccaggcggacatggaatcatcgaaagagcctggcttgtttgatgtagttattataaacgactctctcgatcaggcatatgcagagctcaaggaggcccttagcgaggaaataaagaaggcgcagcgaactggggcttag

SEQ ID NO: 60234 - DNA, 594 bp, Artificial Sequence
  derived and/or modified sequence
atgtctgggcctcggcccgtggtcctgtctgggccttccggcgccggtaaaagcactcttctaaaaaggttgctgcaggagcacagtgggatcttcggctttagcgtgtcacatactacaaggaatcctagacccggggaagaaaatggaaaggactactatttcgttactagagaagtcatgcagcgggacatcgccgccggcgactttatcgagcatgctgaattttccggaaatctatacggcacttcaaaagtggccgtgcaggcggtacaggccatgaaccgcatttgcgtgctcgacgttgacctgcagggcgtccgaaacattaaggccacggacctgagacccatatacattagtgtccagccaccaagcctacatgttctagagcagcgattgcggcaaaggaacacagagaccgaggagtccctcgtgaaacgactggctgctgctcaggccgacatggaatcctcaaaagaacccggcctgttcgatgtagtgatcatcaatgacagtctggatcaggcatacgccgagcttaaagaggcattatccgaggagatcaagaaggcacagcgcacaggcgcctag

SEQ ID NO: 60235 - DNA, 600 bp, Artificial Sequence
  derived and/or modified sequence
atgagcggacctcgcccagtggtcttatccggccctagcggcgccggaaagagtactcttttgaagagactgttgcaagagcactcagggatttttggctttagtgtctcccgcgagtccagggcactcgtcgaaggataccatgaagagcctgaagctcgccgcggagaacgtcagcgagaggtgatgcagcgggacattgccgctggggatttcatcgaacacgcagagttctccgggaatctctatgggactagcaaggtcgccgtacaggccgtccaggcaatgaataggatttgcgtcttggacgtggatcttcagggggtgagaaatattaaggccaccgacctgagaccaatctatatcagtgtgcagccacctagcctacacgtcctcgagcaacgattgcgccagagaaatacagagactgaagaatcactggtgaagagactggctgctgcccaggccgacatggaatccagtaaggagccaggtctctttgacgtcgtcattataaacgatagtcttgatcaagcttacgccgagttgaaggaagccctaagcgaggagataaagaaggcacagcgcactggtgcctag

SEQ ID NO: 60236 - DNA, 729 bp, Artificial Sequence
  derived and/or modified sequence
atgagcggtccgcggcctgttgtactctcaggtccctccggcgcaggtaagagcacccttctgaaaagattgctccaggaacacagtggtatttttggcttctctgtgtcgcacacaacccggaatccccgtccgggagaagaaaacggcaaggactattattttgtgacaagggaagttatgcaacgggacatcgcagccggtgatttcatcgaacacgccgagttcagtggtaacctttacggtacttcaaaggtggccgtccaggcagtccaagccatgaaccgcatctgcgtgctggacgtcgacctgcagggagtgcgcaacatcaaggctactgacttacgtccaatctacatttccgtgcagccaccctccctgcacgtattacggttgagacagagaaacaccgagacagaagagtctcttgtaaagcggcttgcggctgcccaagccgatatggaaagcagtaaagaacccggtttgtttgatgtggtgattatcaatgacagcttggatcaggcttacgccgagctgaaagaagccctgagcgaggtggggccaagtctttgtctgcctgggcaaggccctagaggtgggctgggggctaggcctttactcagtatgcgacccctgagaaagagccggaagcttaaggggcccgcccccgaggcatgctgtctgttttcagctccaagggcacacacaggccctggacaacagcactag

SEQ ID NO: 60237 - DNA, 594 bp, Artificial Sequence
  derived and/or modified sequence
atgtcaggtcctaggccagtcgttttgagtggtccctcgggagctggaaaaagtacgttactcaagaggctacttcaagagcatagcggtattttcggcttctctgtgtcccatacaacccgcaaccctcgcccaggggaggagaacggaaaggactactatttcgtgacgagagaggtaatgcaacgtgacatcgcagccggtgattttattgagcacgccgaattcagcggcaatctgtacggtacttcgaaggttgcagtgcaggccgtccaggccatgaaccgaatttgtgtcctggacgtggatctccagggggttcggaatattaaagctaccgatctgagacctatctatatttctgtgcagccaccgtccctgcatgttcttgaacagaggcttcgacaacgcaatacagagaccgaagagagcctagttaaaaggctggccgccgcacaggccgatatggagtcttctaaggagcccggtctgtttgacgtcgttatcatcaatgactctctggaccaagcctatgctgagttaaaagaggccttatctgaagagatcaagaaggcacaaaggaccggtgcttag

SEQ ID NO: 60238 - DNA, 594 bp, Artificial Sequence
  derived and/or modified sequence
atgtcaggacccagaccagtcgtgctctctggcccttcgggcgccggcaaatctactttgctgaagcgcttgttgcaggaacacagtggcatctttggtttttctgtgagtcataccactaggaatcccagacccggtgaggagaacggcaaagactattacttcgtaacgcgggaagtaatgcagagggacatcgctgctggcgactttatagagcacgcagaattttccggcaacttgtacggcacctctaaggttgctgttcaagcggttcaggcaatgaatagaatctgcgtgctggacgtcgatctgcaaggcgttaggaacattaaagccactgatttaaggcccatctacatttctgtccagcctccgtcgctgcacgtgctcgagcagcggctccgccagcgaaatacagagacagaggagtctctggtgaagaggctggccgcggcccaggccgacatggagagttccaaagagcccggtcttttcgacgttgttataataaacgacagcttggatcaggcctacgctgagctgaaagaagctttgagtgaggagattaaaaaggcccaacgaaccggcgcctag

SEQ ID NO: 60239 - DNA, 516 bp, Artificial Sequence
  derived and/or modified sequence
atgtccggcccacggcccgtggttctgagtggaccaagtggggccgggaaaagcacccttctaaagcgtctgcttcaggaacactcaggaatttttggcttctcagtctcacgcgagagcaacaccacacgaaacccaaggcccggggaggagaacggcaaagattattacttcgtgacaagggaggtgatgcagcgggatatagccgcaggagactttatagagcacgccgagttttctggaaacctatatgggacctccaaagtggctgtgcaggcggtgcaggccatgaataggatctgcgtcctggatgtggacttgcaaggagtccgtaacatcaaggctacagacttgaggccaatttacatttcagttcagccgcctagtcttcatgtcctggagcagagattaaggcagcgaaacacggagacggaggagtccttggtcaaaaggctggctgcagcccaggccgatatggaaagcgagattaagaaggcccagaggacaggggcatag

SEQ ID NO: 60240 - DNA, 594 bp, Artificial Sequence
  derived and/or modified sequence
atgagcggccccaggcctgtggtgctgagcggccccagcggggccggcaagagcaccctgctgaagaggctgctgcaggagcacagcggcatcttcggcttctctgtgagccacaccaccaggaaccccaggcctggagaggagaatggcaaggactactactttgtgacccgggaggtgatgcagagggacattgctgctggggacttcattgaacatgctgagttcagcggcaacctgtatggcaccagcaaggtggccgtgcaggccgtgcaggccatgaaccgcatctgtgtgctggatgtggacctgcagggcgtgaggaacatcaaggccacagacctgcggcccatctacatctctgtgcagccccccagcctgcacgtgctggagcagaggctgcggcagaggaacacagaaacagaggagagcctggtgaagaggctggccgccgcccaggccgacatggagagcagcaaggagcccggcctgtttgatgtggtgatcatcaatgacagcctggaccaggcctatgcagagctgaaggaggccctgtctgaggagatcaagaaggcccagaggactggagcctag

SEQ ID NO: 60241 - DNA, 600 bp, Artificial Sequence
  derived and/or modified sequence
atgagcggccccaggcctgtggtgctgagcggccccagcggggccggcaagagcaccctgctgaagaggctgctgcaggagcacagcggcatcttcggcttctctgtgtcccgggagagccgggccctggtggagggctaccacgaggagcctgaggcccggcggggggagcggcagcgggaggtgatgcagagggacattgctgctggggacttcattgaacatgctgagttcagcggcaacctgtatggcaccagcaaggtggccgtgcaggccgtgcaggccatgaaccgcatctgtgtgctggatgtggacctgcagggcgtgaggaacatcaaggccacagacctgcggcccatctacatctctgtgcagccccccagcctgcacgtgctggagcagaggctgcggcagaggaacacagaaacagaggagagcctggtgaagaggctggccgccgcccaggccgacatggagagcagcaaggagcccggcctgtttgatgtggtgatcatcaatgacagcctggaccaggcctatgcagagctgaaggaggccctgtctgaggagatcaagaaggcccagaggactggagcctag

SEQ ID NO: 60242 - DNA, 729 bp, Artificial Sequence
  derived and/or modified sequence
atgagcggccccaggcctgtggtgctgagcggccccagcggggccggcaagagcaccctgctgaagaggctgctgcaggagcacagcggcatcttcggcttctctgtgagccacaccaccaggaaccccaggcctggagaggagaatggcaaggactactactttgtgacccgggaggtgatgcagagggacattgctgctggggacttcattgaacatgctgagttcagcggcaacctgtatggcaccagcaaggtggccgtgcaggccgtgcaggccatgaaccgcatctgtgtgctggatgtggacctgcagggcgtgaggaacatcaaggccacagacctgcggcccatctacatctctgtgcagccccccagcctgcacgtgctgcggctgcggcagaggaacacagaaacagaggagagcctggtgaagaggctggccgccgcccaggccgacatggagagcagcaaggagcccggcctgtttgatgtggtgatcatcaatgacagcctggaccaggcctatgcagagctgaaggaggccctgtctgaggtgggccccagcctgtgcctgcccggccagggcccccggggcggcctgggcgcccggcccctgctgtccatgaggcccctgaggaagagcaggaagctgaagggccctgcccctgaggcctgctgcctcttcagcgccccccgggcccacacaggccctggccagcagcactag

SEQ ID NO: 60243 - DNA, 516 bp, Artificial Sequence
  derived and/or modified sequence
atgagcggccccaggcctgtggtgctgagcggccccagcggggccggcaagagcaccctgctgaagaggctgctgcaggagcacagcggcatcttcggcttctctgtgtcccgggagagcaacaccaccaggaaccccaggcctggagaagaaaatggcaaggactactactttgtgacccgggaggtgatgcagagggacattgctgctggggacttcatcgagcacgccgagttcagcggcaacctgtatggcaccagcaaggtggccgtgcaggccgtgcaggccatgaaccgcatctgtgtgctggatgtggacctgcagggcgtgaggaacatcaaggccacagacctgcggcccatctacatctctgtgcagccccccagcctgcacgtgctggagcagaggctgcggcagaggaacacagaaacagaggagagcctggtgaagaggctggccgccgcccaggccgacatggagagcgagatcaagaaggcccagaggactggagcctag

SEQ ID NO: 60244 - DNA, 594 bp, Artificial Sequence
  derived and/or modified sequence
atgagcggcccccggcccgtggtgctgagcggccccagcggcgccggcaaaagcaccctactgaagagactgttacaggagcattccggaatctttggttttagcgtaagccatacaaccaggaatcctagacccggcgaagagaacgggaaggattactattttgttactcgggaggtgatgcagcgggatattgcggccggggatttcatagaacacgctgaattcagcggcaatctctacggaacatcaaaagtggccgtgcaagcagtgcaggctatgaaccggatttgcgtcttggacgttgaccttcaaggggtccggaatatcaaagccaccgatctccgccctatatacatttcagtacagcccccatccttgcacgtgctggagcagcgccttaggcaaagaaataccgagaccgaggagtctctagtgaagaggctggccgccgctcaggccgacatggagagctctaaagagcccggtctgtttgatgtggtcatcattaacgattctcttgatcaggcctatgccgaactgaaggaagccttaagcgaggaaattaaaaaggctcagcggacaggggcttag

SEQ ID NO: 60245 - DNA, 594 bp, Artificial Sequence
  derived and/or modified sequence
atgagcggcccccggcccgtggtgctgagcggccccagcggcgccgggaaaagtacactactcaaaagactgttacaagaacactcgggcattttcgggttttcggtttctcatacaaccagaaatccccggcctggagaggaaaacggaaaggattactatttcgtgacacgggaggtgatgcagagggatatcgccgcaggagattttattgagcacgccgagttttcgggcaacctgtacgggacaagcaaggttgctgtgcaggcagtgcaggcaatgaataggatatgcgtgctcgatgtcgacctgcagggcgtcaggaacatcaaggccacagacttacgtcccatttatatttctgttcaaccaccgtccttgcacgtgctggaacagagactgcgtcagaggaataccgaaactgaagagtcactagtaaagcggctggcggcggcacaggccgatatggagtcctcgaaggagcctgggctgtttgacgtggtcataattaacgactctctagaccaagcatacgccgagcttaaagaggctttatccgaggagatcaagaaagcacagaggaccggtgcgtag

SEQ ID NO: 60246 - DNA, 594 bp, Artificial Sequence
  derived and/or modified sequence
atgagcggcccccggcccgtggtgctgagcggccccagcggcgccggcaaaagtactttgctcaagaggctgctccaagagcattctggaatctttggcttttccgttagccacactactcgtaatcccagacctggggaggaaaatggaaaagactactacttcgttactagggaggtgatgcaacgtgacattgccgcgggagactttatagagcatgctgagttctccggcaatttatatggaacaagcaaagtcgccgtacaagctgttcaggccatgaaccggatctgtgtcttagacgtcgacctgcaaggagtgcgcaatatcaaggccactgacctgaggccaatctatatatctgtacagcccccctccttgcacgtccttgagcaaaggctaaggcagaggaacacagaaaccgaggaatctttggtgaagaggttggcagccgctcaggccgatatggagtcgagcaaggaacccggattattcgacgtagtgatcatcaatgattcactcgatcaggcctatgctgagctgaaagaagcactgagcgaggagatcaaaaaagcccaacgcacgggcgcttag

SEQ ID NO: 60247 - DNA, 600 bp, Artificial Sequence
  derived and/or modified sequence
atgagcggcccccggcccgtggtgctgagcggccccagcggcgccggcaaatctacgctgctgaaaaggctgttgcaggagcattccggcatttttggtttcagcgtcagtcgcgaatcaagagccttggtcgagggctaccatgaagagccggaggcacggcgcggtgagaggcagcgggaggtcatgcagagggacatcgctgccggagactttatcgagcatgccgaattctctgggaacctgtacggaacaagcaaagtagctgtccaggccgttcaggcaatgaataggatctgtgtcctggatgtagacttgcagggggtaaggaacatcaaggccacggacctgcgcccaatctacattagcgttcagcctcctagtctccacgtactggagcagcggctgcgacagcgtaataccgagacagaagaatccctggtcaaacgtctggcggctgcacaagcagatatggagtcgagtaaagagcccggcctgttcgatgttgtcatcatcaacgactctttagatcaggcctacgctgagctcaaggaggccctcagcgaagagatcaagaaagcccaacggactggagcttag

SEQ ID NO: 60248 - DNA, 729 bp, Artificial Sequence
  derived and/or modified sequence
atgagcggcccccggcccgtggtgctgagcggccccagcggcgccgggaaatccacactcctgaagcgactcctgcaggagcactccgggatattcggtttctcggtcagtcacaccacgagaaatccacgccccggtgaggaaaatggtaaagactactactttgtgacccgggaggtgatgcagcgggatattgcggctggcgatttcatcgagcatgcggagtttagtggcaacttgtacggaacaagcaaggtagctgtccaggcagttcaggctatgaacaggatctgcgtgctcgatgtcgatctccagggcgtacgaaatataaaggctacagatttacggcccatttatatcagcgtgcagcccccatctctccatgtcttacgtctgcggcaaagaaacacagaaaccgaggagagtctagtgaaaaggctggccgcagcccaagctgatatggaatccagtaaggaacccgggctgtttgatgtggtgatcatcaacgactctttagaccaggcgtacgccgaacttaaagaggccctgtcagaagtggggccttctctctgccttcctggtcagggtcctcgaggagggctgggggccaggcccctcttgtccatgagacccttgcgcaaatcccggaaattgaaggggcccgctcctgaggcatgttgcttgttctcagctcctagggcccacactggccctggacagcagcattag

SEQ ID NO: 60249 - DNA, 594 bp, Artificial Sequence
  derived and/or modified sequence
atgagcggcccccggcccgtggtgctgagcggccccagcggcgccggaaagagcaccttgctgaaacgcctacttcaggaacactctgggattttcggcttttctgtctcacatacaacaagaaacccaaggccaggtgaagagaacgggaaggactactatttcgtcacccgcgaggtcatgcaaagagatatcgcagcgggtgattttatagaacacgctgaattcagcggcaatctctacggcacctctaaggtagcagtgcaggccgtgcaagccatgaacaggatctgcgtcttagatgtcgatcttcagggcgtccgaaatattaaggccacagacctccggccgatttacatcagcgtccagccaccctccttacacgtgctggagcagcgactccgccagcggaacaccgaaacagaggaatccctggttaagcggctagctgccgcccaggccgatatggagtccagcaaagaacctggcctcttcgacgtcgtcatcataaacgactccctggatcaggcctacgcagagctgaaggaggcattgagtgaggaaattaaaaaagcccagaggaccggggcatag

SEQ ID NO: 60250 - DNA, 594 bp, Artificial Sequence
  derived and/or modified sequence
atgagcggcccccggcccgtggtgctgagcggccccagcggcgccggcaagagcaccttgctcaaacgccttctacaggagcattctgggatatttggattttcggtaagtcacacaacaaggaatccgcggcctggagaggagaatggaaaggactactacttcgtcacccgtgaggttatgcagcgggatatagctgctggagactttatcgagcatgcagagttcagcggaaacctctacggtaccagtaaggtagccgtgcaagccgtgcaagccatgaaccgcatttgtgtacttgacgtggatctccaaggcgtgcgcaacatcaaagccactgatctgaggcctatctacatttctgtgcagccaccaagtttacatgtcctggagcagcgactgcggcagagaaataccgaaactgaggaatctcttgtaaaacggctagctgctgctcaagccgacatggagagcagtaaagagcccggcttatttgacgtggtcatcattaatgactcacttgatcaggcctacgcggaactcaaagaggctttgtccgaggagatcaaaaaagcgcagcgaactggcgcctag

SEQ ID NO: 60251 - DNA, 516 bp, Artificial Sequence
  derived and/or modified sequence
atgagcggcccccggcccgtggtgctgagcggccccagcggcgccggaaaatcaaccttgctgaagagactgcttcaggagcatagcggaatcttcgggttctctgtctcgcgcgagtctaacactaccagaaaccctaggcctggcgaggagaatggcaaggactactacttcgtaacaagagaagtcatgcaaagagatatcgccgcaggtgactttatcgagcacgccgagttctccgggaacttatacggaacaagtaaagtggctgtgcaggctgtccaggcaatgaaccggatatgcgtgctagatgtggatttgcagggtgtccggaatatcaaggcaacagatctcaggcctatctatattagcgtccagccaccctctctacatgtactggagcagcgtctaagacaaagaaatactgaaacagaggagagcctggtgaagcgcctggccgccgcccaagccgacatggagagcgagatcaaaaaagctcagaggacaggcgcctag

SEQ ID NO: 60252 - DNA, 594 bp, Artificial Sequence
  derived and/or modified sequence
atgtcaggacctcgccctgtcgttctgtctggaccgtctggcgcagggaaatctacactgctgaaaagactgctgcaggaacacagtggtatattcggctttagcgttagccacacgactcgcaatcccaggcccggtgaggagaatgggaaagactactactttgtgacccgcgaggtcatgcagagagacattgccgctggtgattttattgagcatgccgagttttccggcaacctatacggaactagcaaagtcgcagtgcaagccgtgcaagccatgaacaggatctgtgtgctggatgtagacctgcagggggttaggaacattaaagccacagatttgcgacccatctatatctcagtgcaaccaccctctctgcatgtcctggagcaacggcttcgccagcggaacacagaaaccgaagagtctttagtgaaacggctggcagcagcccaggcagacatggagagctccaaggaacctggattatttgacgtagttataatcaacgattcccttgatcaggcttacgctgagctgaaagaagctctgagcgaggaaattaagaaagctcagcggaccggagcctag

SEQ ID NO: 60253 - DNA, 594 bp, Artificial Sequence
  derived and/or modified sequence
atgtctggcccaaggccagtagtccttagcggaccgtcaggggctgggaaatccaccctgctcaaacgattattgcaagagcatagtggaatctttgggtttagtgtgtcacatacaactagaaacccacggcctggcgaggaaaacggtaaggactactactttgttacacgggaggtaatgcagcgggatatcgccgctggagacttcattgagcacgcagagttttctgggaacctgtacggaacgtccaaagtcgcggtgcaggccgtgcaggccatgaataggatatgtgttctcgacgttgatctccaaggcgtgcggaatattaaagcgacagacctgcgcccaatttacatatctgttcagccaccatcactgcatgtcttggaacaacgtctccgacaacgcaatacagagacagaagagagtctggtgaaacggctagctgcagcccaggccgatatggagtccagcaaggaaccagggctgttcgatgtcgtgattataaacgacagtcttgatcaggcctatgccgagctgaaagaggcactatcagaagagatcaaaaaggcacagcgcacaggcgcttag

SEQ ID NO: 60254 - DNA, 594 bp, Artificial Sequence
  derived and/or modified sequence
atgtctggacctagacccgttgtgctatcagggccttccggcgcaggaaagagtaccttgctgaagcgactgctccaggaacactccggtatatttgggttctcagtgtcccatacaacaagaaatcctcgacccggagaggagaatggtaaagattactacttcgtgactcgtgaggtgatgcagcgggatattgccgcaggagattttatcgagcatgcagagtttagtggcaatctctacggaactagcaaagttgccgtacaggcagtccaagcaatgaatcggatctgcgtgctagatgtagacctccagggagtgaggaatataaaggccactgatcttcggccaatctacatttccgtccagcctccttcactgcacgttctggaacaacgactccgtcaacgcaacacagagacggaagagtcactcgtcaagagactcgccgcagcccaggctgacatggaaagtagcaaggagcccggactttttgacgtggtcataattaacgactctttggaccaggcatacgctgagctcaaggaggccttgagcgaagagattaagaaggcgcaacggactggcgcatag

SEQ ID NO: 60255 - DNA, 600 bp, Artificial Sequence
  derived and/or modified sequence
atgtcaggtccccgacctgtcgtgctgagcgggccaagcggggctggcaaaagcacactgttgaaaaggctgctgcaggagcactcaggtatcttcggattcagcgtatcacgagaatcccgcgcacttgtcgagggataccacgaagaaccggaggcaaggaggggcgagcggcaaagggaggttatgcagagagacatcgccgctggtgacttcatcgagcacgccgaattctccggtaatctgtacggcacatccaaggtggccgtccaggcagtgcaggctatgaacaggatatgcgttttagacgtggatctccagggggtgagaaacattaaggcgactgaccttcgtccgatctatatatccgtgcaaccaccctcactgcacgttctggagcagcggctgcgccagcgaaacaccgaaaccgaggagtccctggtgaagagattagccgctgcacaagcagacatggaaagttcgaaggaaccaggcctgttcgatgtggtgattatcaacgacagtctggaccaggcttacgcagagcttaaggaggccctcagtgaggaaattaaaaaggcccaacgcaccggcgcttag

SEQ ID NO: 60256 - DNA, 729 bp, Artificial Sequence
  derived and/or modified sequence
atgagtggcccacgtcccgtagtgttgagcggcccatccggggctggcaagtcaacgctgctcaagcggttgctgcaggaacacagcgggatttttggctttagcgtgtcacataccactcggaaccctcgcccaggcgaggaaaatggtaaggattattattttgtgacacgagaagtcatgcagcgggatattgcagccggagactttattgaacacgctgaattttctggcaacctgtacggaacgagcaaagttgctgtacaggctgtgcaggcgatgaaccggatttgtgtgttggacgtcgacctgcaaggagttagaaatattaaggcaaccgatctccggcctatctatatttcagtgcagccccctagtctgcacgtgctgagattacggcagcgcaacaccgagaccgaagagagtcttgtcaaaaggcttgccgctgcacaggctgacatggaaagtagcaaggaacccggactcttcgatgtggtcatcattaacgattctctcgatcaagcttatgccgaactgaaagaggctctgtcggaggtcggcccttcactgtgcctgccgggtcaaggccctcggggaggcctgggcgcacgtcccctgctgtcaatgagaccactacgcaaatcgaggaaactcaagggacctgccccagaggcttgttgccttttctccgcccctagggcccatacgggccctggtcagcagcactag

SEQ ID NO: 60257 - DNA, 594 bp, Artificial Sequence
  derived and/or modified sequence
atgtctggaccgaggcccgtagtgctgtctggaccctcaggagcagggaaatccacattgctgaagcgactgctccaggagcattctggcattttcggattctctgtgtcgcacactaccaggaacccaaggccgggagaggaaaacggcaaagattattactttgtgacccgcgaagtgatgcagcgggatatcgctgccggagatttcattgagcatgccgagttttccggcaatctatacggcacatcgaaggtggccgtccaggccgtacaagccatgaaccggatttgtgttctggacgtagatcttcagggcgttaggaatatcaaggccacagacctgcggcctatctatatctcagtgcagccaccgagccttcacgtcctcgagcagaggctccgacagaggaatactgagaccgaggagagcctggtaaagcgactcgcagccgctcaggctgacatggagagtagtaaagaacctggcctctttgacgtggtcattatcaacgatagccttgaccaggcctatgcagaactcaaagaagccttaagtgaggaaatcaaaaaggcacagagaactggggcatag

SEQ ID NO: 60258 - DNA, 594 bp, Artificial Sequence
  derived and/or modified sequence
atgagcggcccaagacccgtggttttgagcggtcctagcggggctggcaagtcaacccttctgaagcgtctcctccaagagcacagtggaatatttggcttttcagtgagccatactactagaaaccctcgtccgggtgaagaaaacgggaaggactattattttgtgacgagagaagtaatgcagagggatattgccgcaggcgatttcattgagcacgccgagttttcaggtaatctgtacggtacatccaaggtggcggtacaggccgttcaggccatgaaccgcatctgtgtgctggacgtcgatctgcagggggtccggaatatcaaggcgaccgacttacgtccgatatatatttctgtccaacccccttccctgcacgttctggagcaaagactgcgtcaacgcaatactgaaacagaggagagcttggtaaaaaggctcgccgcagcccaggccgacatggagagttcgaaagagcccggactgtttgatgtggtcatcattaacgacagccttgatcaagcgtacgccgagctgaaagaggcgttgtctgaggagatcaagaaggcccaaagaactggggcttag

SEQ ID NO: 60259 - DNA, 516 bp, Artificial Sequence
  derived and/or modified sequence
atgtctggtcctcgtccagtggtgttgtcaggtccttctggtgccggtaaaagcaccttactgaaacggcttctccaggaacattccggcattttcggcttcagcgtctcccgtgaatcaaatacaacaaggaacccgcgtcctggcgaggaaaacggaaaagattactactttgtaacccgcgaggttatgcagagggatattgccgctggtgattttatagagcatgctgaattttccggcaatctctatggaaccagcaaggtggccgtgcaggccgtgcaggcaatgaatagaatttgtgtcctggacgttgaccttcagggcgtaagaaatattaaagccactgatcttaggcctatctatatctctgtgcagcccccaagcctgcatgttcttgaacaaagactacgacagaggaacaccgagactgaagaatccctggttaaaaggctggccgcagcccaggcggacatggagtctgaaatcaagaaggcgcaacggactggagcctag

SEQ ID NO: 60260 - DNA, 594 bp, Artificial Sequence
  derived and/or modified sequence
atgagcggccccagacccgtggtgctgagcggccccagcggcgccggcaagagcaccctgctgaagagactgctgcaggagcacagcggcatcttcggcttcagcgtgagccacaccaccagaaaccccagacccggcgaggagaacggcaaggactactacttcgtgaccagagaggtgatgcagagagacatcgccgccggcgacttcatcgagcacgccgagttcagcggcaacctgtacggcaccagcaaggtggccgtgcaggccgtgcaggccatgaacagaatctgcgtgctggacgtggacctgcagggcgtgagaaacatcaaggccaccgacctgagacccatctacatcagcgtgcagccccccagcctgcacgtgctggagcagagactgagacagagaaacaccgagaccgaggagagcctggtgaagagactggccgccgcccaggccgacatggagagcagcaaggagcccggcctgttcgacgtggtgatcatcaacgacagcctggaccaggcctacgccgagctgaaggaggccctgagcgaggagatcaagaaggcccagagaaccggcgcctag

SEQ ID NO: 60261 - DNA, 600 bp, Artificial Sequence
  derived and/or modified sequence
atgagcggccccagacccgtggtgctgagcggccccagcggcgccggcaagagcaccctgctgaagagactgctgcaggagcacagcggcatcttcggcttcagcgtgagcagagagagcagagccctggtggagggctaccacgaggagcccgaggccagaagaggcgagagacagagagaggtgatgcagagagacatcgccgccggcgacttcatcgagcacgccgagttcagcggcaacctgtacggcaccagcaaggtggccgtgcaggccgtgcaggccatgaacagaatctgcgtgctggacgtggacctgcagggcgtgagaaacatcaaggccaccgacctgagacccatctacatcagcgtgcagccccccagcctgcacgtgctggagcagagactgagacagagaaacaccgagaccgaggagagcctggtgaagagactggccgccgcccaggccgacatggagagcagcaaggagcccggcctgttcgacgtggtgatcatcaacgacagcctggaccaggcctacgccgagctgaaggaggccctgagcgaggagatcaagaaggcccagagaaccggcgcctag

SEQ ID NO: 60262 - DNA, 729 bp, Artificial Sequence
  derived and/or modified sequence
atgagcggccccagacccgtggtgctgagcggccccagcggcgccggcaagagcaccctgctgaagagactgctgcaggagcacagcggcatcttcggcttcagcgtgagccacaccaccagaaaccccagacccggcgaggagaacggcaaggactactacttcgtgaccagagaggtgatgcagagagacatcgccgccggcgacttcatcgagcacgccgagttcagcggcaacctgtacggcaccagcaaggtggccgtgcaggccgtgcaggccatgaacagaatctgcgtgctggacgtggacctgcagggcgtgagaaacatcaaggccaccgacctgagacccatctacatcagcgtgcagccccccagcctgcacgtgctgagactgagacagagaaacaccgagaccgaggagagcctggtgaagagactggccgccgcccaggccgacatggagagcagcaaggagcccggcctgttcgacgtggtgatcatcaacgacagcctggaccaggcctacgccgagctgaaggaggccctgagcgaggtgggccccagcctgtgcctgcccggccagggccccagaggcggcctgggcgccagacccctgctgagcatgagacccctgagaaagagcagaaagctgaagggccccgcccccgaggcctgctgcctgttcagcgcccccagagcccacaccggccccggccagcagcactag

SEQ ID NO: 60263 - DNA, 516 bp, Artificial Sequence
  derived and/or modified sequence
atgagcggccccagacccgtggtgctgagcggccccagcggcgccggcaagagcaccctgctgaagagactgctgcaggagcacagcggcatcttcggcttcagcgtgagcagagagagcaacaccaccagaaaccccagacccggcgaggagaacggcaaggactactacttcgtgaccagagaggtgatgcagagagacatcgccgccggcgacttcatcgagcacgccgagttcagcggcaacctgtacggcaccagcaaggtggccgtgcaggccgtgcaggccatgaacagaatctgcgtgctggacgtggacctgcagggcgtgagaaacatcaaggccaccgacctgagacccatctacatcagcgtgcagccccccagcctgcacgtgctggagcagagactgagacagagaaacaccgagaccgaggagagcctggtgaagagactggccgccgcccaggccgacatggagagcgagatcaagaaggcccagagaaccggcgcctag

SEQ ID NO: 60264 - protein, 366 aa, Artificial Sequence
  derived and/or modified sequence
MLPRLLLLICAPLCEPAELFLIASPSHPTEGSPVTLTCKMPFLQSSDAQFQFCFFRDTRALGPGWSSSPKLQIAAMWKEDTGSYWCEAQTMASKVLRSRRSQINVHRVPVADVSLETQPPGGQVMEGDRLVLICSVAMGTGDITFLWYKGAVGLNLQSKTQRSLTAEYEIPSVRESDAEQYYCVAENGYGPSPSGLVSITVRIPVSRPILMLRAPRAQAAVEDVLELHCEALRGSPPILYWFYHEDITLGSRSAPSGGGASFNLSLTEEHSGNYSCEANNGLGAQRSEAVTLNFTGRRSARDPLRSLPSPLPQEFTYLNSPTPGQLQPIYENEPREQSVAVHGRQQHSSEQKAQKPWGHIWRTRFP

SEQ ID NO: 60265 - DNA, 2778 bp, Artificial Sequence
  derived and/or modified sequence
attctttttttgatgagaggcatctctaggtaccatccctgacctggtcctcatgctgccgaggctgttgctgttgatctgtgctccactctgtgaacctgccgagctgtttttgatagccagcccctcccatcccacagaggggagcccagtgaccctgacgtgtaagatgccctttctacagagttcagatgcccagttccagttctgctttttcagagacacccgggccttgggcccaggctggagcagctcccccaagctccagatcgctgccatgtggaaagaagacacagggtcatactggtgcgaggcacagacaatggcgtccaaagtcttgaggagcaggagatcccagataaatgtgcacagggtccctgtcgctgatgtgagcttggagactcagcccccaggaggacaggtgatggagggagacaggctggtcctcatctgctcagttgctatgggcacaggagacatcaccttcctttggtacaaaggggctgtaggtttaaaccttcagtcaaagacccagcgttcactgacagcagagtatgagattccttcagtgagggagagtgatgctgagcaatattactgtgtagctgaaaatggctatggtcccagccccagtgggctggtgagcatcactgtcagaatcccggtgtctcgcccaatcctcatgctcagggctcccagggcccaggctgcagtggaggatgtgctggagcttcactgtgaggccctgagaggctctcctccgatcctgtactggttttatcacgaggatatcaccctggggagcaggtcggccccctctggaggaggagcctccttcaacctttccctgactgaagaacattctggaaactactcctgtgaggccaacaatggcctgggggcccagcgcagtgaggcggtgacactcaacttcacaggaagacgttcagccagggatccactcaggagccttcccagccctctaccccaagagttcacctacctcaactcacctaccccagggcagctacagcctatatatgaaaatgaaccaagagaacaatcagtggctgtgcatggcagacaacagcattcctcagagcagaaggctcagaaaccctggggacacatatggaggacaaggtttccttagacatctattccaggctgaggaaagcaaacattacagatgtggactatgaagatgctatgtaaggttatggaagattctgctctttgaaaaccatccatgaccccaagcctcaggcctgatatgttcttcagagatcctggggcattagctttccagtatacctcttctggatgccattctccatggcactattccttcatctactgtgaagtgaagttggcgcagccctgaagaaactacctaggagaactaatagacacaggagtgacagggactttgttatcagaaccagattcctgccggctcctttgaaaacaggtcatattgtgctcttctgtttacaagaggaaacaagatggaataaaagaaattgggatcttgggttggagggacagtgaagcttagagcacatgaactcaaggttagtgactctgcaggacttcacagagagagctgtgcccatcattcagtccaagtgctttctctgcccagacagcacagaactccagccccgctacttacatggatcatcgagtttccacctaaaatatgattctatttattttgagtcactgttaccaaattagaactaaaacaaagttacataaaaagttattgtgactccacttaattttagtgacgtatttttgtatatataggccaacctataccacatccaaaattatgtatctattacagcccctagaagctttataaatacagtgtgtcttcttttattcacaaaatttttgaaatcgtggtaatatggtttgaaacctgtatcttaattattttttttttaaattgagacagggtctcactctgtcactcaatctggaatgcagtggcacaatcttgcctcactgcaacgcctgcctctcaggctcaagcaaacctctcacctcagcctgctgagtagctgggactacaggcacatgccaccaaacttggccattttttgtcttacgtagagacaagatttcaccgttttgcccaggctggtctcaaactcctgggctcaagcaatgtattgaattttaaaataaccaggcactcactcttatgaattaataaacatttggaggtatataaagtaaaaagttaaagtctttcctgtaagttaacacaaatgttaactattgttaaaaactttacaggtagctctctagatatttttctatttttgtatgtatacttatgcatacatgtaagtatataaacatttagaagtgtacctatctaacaaactattatgaaatactttcaaatctgtaaatagatctattatactattttaaaagtctctatagtagtgtgttatatagataaatcataacttttttctttttttattgtagtaaatatgcacaacataaaattgatcattttaaccatttttaagtgtacaattcagtggcattaagtactatcataatatattttaatccttctcatcactggtggacattaaggagactctcaaaaaattcatattataaaaacaaagttcaaacaaatgtctttgtactagcatattatggcactcctgctggattatctgaaggataaatttgtaaatctagtattgctagattatgcatattaaatattcttgttaaatagtc

SEQ ID NO: 60266 - DNA, 1101 bp, Artificial Sequence
  derived and/or modified sequence
atgctgccacggctactgctccttatctgtgcaccactgtgcgagcccgccgagctgtttttaatagcatccccttcacatcccacagaagggtctccagtcaccctgacatgcaaaatgcccttcttgcagagctccgacgcccagttccagttctgtttttttcgcgacactcgggccctaggtcctggatggtcttcttctcctaaactacagatcgcagccatgtggaaggaagataccggaagctattggtgcgaggcccagacgatggcgtctaaagtgttacgcagccggcggagtcaaattaacgtccacagggtgcctgtggcagacgtctcactggaaacacagccaccgggcggtcaggtcatggagggcgacagattggtgctaatctgtagcgtagccatgggcacaggcgatatcaccttcttatggtacaaaggtgctgtgggactgaacttacagtcgaagacacagcgcagtcttaccgccgagtacgaaattccctcagtcagggagtcagatgctgagcagtactactgtgtcgccgaaaatgggtatggccccagtccctcaggcctcgtaagcataactgtgcgaatccccgtctcacgccccatcctcatgctgcgggcacctagagcgcaagcagctgtggaggacgtcctagagctgcactgcgaagccctgagagggtccccccctatactatattggttttaccatgaggacattacactgggaagtcggtcagccccatccggaggcggggcgagttttaatctctccctcaccgaggaacatagcggcaactacagctgtgaggctaacaatggccttggagcccagcgatctgaggcggtgacactcaattttaccgggcgtaggtctgctcgcgacccactgcggagcctcccatcaccacttcctcaggaattcacttatctgaactcccccacacctggacagctgcaaccaatctacgagaatgagcccagagagcagtctgttgctgttcatggcaggcagcagcactcttctgagcagaaagctcagaaaccctggggccatatttggagaaccaggttcccttag

SEQ ID NO: 60267 - DNA, 1101 bp, Artificial Sequence
  derived and/or modified sequence
atgctgccccggctgctgctgctgatctgtgcccccctgtgtgagcctgctgagctgttcctgattgccagccccagccaccccacagagggcagccctgtgaccctgacctgcaagatgcccttcctgcagagcagtgatgcccagttccagttctgcttcttccgggacacccgggccctgggccctggctggagcagcagccccaagctgcagattgctgccatgtggaaggaggacaccggcagctactggtgtgaggcccagaccatggccagcaaggtgctgcggagcagaagaagccagatcaacgtgcaccgggtgcctgtggctgatgtgtccctggagacccagcccccaggcggccaggtgatggagggggaccggctggtgctgatctgcagcgtggccatgggcaccggggacatcaccttcctgtggtacaagggagctgtgggcctgaacctgcagagcaagacccagaggagcctgacagcagaatatgagatccccagcgtgcgggagagtgatgctgagcagtactactgtgtggccgagaatggctacggccccagccccagcggcctggtgtccatcaccgtgcgcatccctgtgtcccggcccatcctgatgctgcgggccccccgggcccaggccgctgtggaggatgtgctggagctgcactgtgaggccctgcggggcagcccccccatcctgtactggttctaccacgaggacatcaccctgggcagccgcagcgcccccagcggcggcggggccagcttcaacctgagcctgacagaggagcacagcggcaactacagctgtgaggccaacaacggcctgggcgcccagaggtctgaggccgtgaccctgaacttcaccggcagaagaagtgcccgggaccccctgcggagcctgcccagccccctgccccaggagttcacctacctgaacagccccaccccaggccagctgcagcccatctatgaaaatgagccccgggagcagagcgtggccgtgcacggccggcagcagcacagcagcgagcagaaggcccagaagccctggggccacatctggaggacccgcttcccctag

SEQ ID NO: 60268 - DNA, 1101 bp, Artificial Sequence
  derived and/or modified sequence
atgctgccccggctgctgctgctgatctgcgcccccctgtgcgagcctgccgagctgtttctgatagcctctccctcacaccccactgaaggcagccctgtcaccctcacctgtaagatgccttttctccagtcgtcggacgcgcaattccaattttgcttttttcgagacactcgcgctcttggccctggctggtccagttctccgaagctgcagatcgcggctatgtggaaagaagacacaggttcgtattggtgcgaggctcagaccatggcttcaaaggtgctgcggtcacgccggtcgcagattaatgttcaccgcgttccagtcgctgatgtatcactcgaaacgcaacctcctggtggccaggtcatggagggtgaccgtctggtcttgatttgttcagtcgccatgggcactggagacatcacatttctgtggtataagggtgctgttggcttgaacctacaatccaaaacccagagaagcctaaccgccgaatacgagattccaagcgtccgtgagtctgacgctgaacagtattactgcgtggccgaaaatggatatgggcccagtccctcaggtctggtctccatcacagtccgtattcctgtaagcaggcccatcctgatgttgagggcgccccgagcgcaagccgcagtcgaggacgtcctcgagctgcactgtgaggccctacgagggagcccacccatactctactggttttatcacgaagatatcaccctcggctcccggtcagccccttccggcggaggtgccagttttaatctttctcttacagaggaacactcagggaattactcatgtgaagcaaataacgggttgggcgcacagagatccgaggccgttacccttaactttacgggcaggagatccgcccgggacccccttagaagtcttccctcgcccctgccacaggagtttacatatctgaactccccaacccctggtcagctacaaccgatctatgagaatgagccccgcgagcagagcgtagctgtacatgggcgacaacagcactccagcgagcaaaaggctcagaagccatggggacacatatggcgaacccgtttcccttag

SEQ ID NO: 60269 - DNA, 1101 bp, Artificial Sequence
  derived and/or modified sequence
atgctgccgcgactgctgctgctcatttgtgctccattgtgcgaaccagcagaactattcttaatcgctagccctagccaccctaccgaagggtccccagttactctcacatgcaagatgccctttctccagagctcagacgcccaattccagttctgctttttccgcgatacacgtgctttgggcccagggtggtccagctctccaaagttacaaatagcagccatgtggaaagaagatacaggctcatattggtgtgaggcccagaccatggcatccaaagtcctgcgcagcagacgaagtcaaattaacgtccaccgggtgcctgttgcggacgtgtccctggagacacagccacccggagggcaggtcatggaaggagatcgcctggtgcttatctgtagcgtcgcgatgggcacaggagatataactttcctctggtacaagggcgctgtaggactgaaccttcagagtaagacgcagcggtcccttaccgctgaatacgaaattcccagcgtgcgtgaaagtgacgctgaacaatactactgtgtcgctgagaacggctatgggccaagtcccagcggactggtgagcatcaccgtgaggatcccggtgagtcggcctatcctgatgttgagagccccacgagcacaggctgccgtggaggacgtccttgagctccactgcgaggcattgagaggctcgcccccaattttatattggttttaccacgaggacattacactgggatcaagaagcgcgcctagcggtggcggagcatcgttcaacttatcccttaccgaagagcactccggcaactattcctgtgaggccaacaacggattaggagcccagaggtcagaagcagtcacactgaatttcactggtaggagaagcgcacgcgatcccctcaggagtttacccagtccactccctcaagagtttacctatctaaacagccctacccctggacaattgcagccaatctacgaaaacgagccgcgagagcagagcgtcgccgtgcacggcaggcaacagcacagttccgaacaaaaggctcagaagccatggggccacatctggaggactaggttcccgtag

SEQ ID NO: 60270 - DNA, 1101 bp, Artificial Sequence
  derived and/or modified sequence
atgctgcccagactgctgctgctgatctgcgcccccctgtgcgagcccgccgagctgttcctgatcgccagccccagccaccccaccgagggcagccccgtgaccctgacctgcaagatgcccttcctgcagagcagcgacgcccagttccagttctgcttcttcagagacaccagagccctgggccccggctggagcagcagccccaagctgcagatcgccgccatgtggaaggaggacaccggcagctactggtgcgaggcccagaccatggccagcaaggtgctgagaagcagaagaagccagatcaacgtgcacagagtgcccgtggccgacgtgagcctggagacccagccccccggcggccaggtgatggagggcgacagactggtgctgatctgcagcgtggccatgggcaccggcgacatcaccttcctgtggtacaagggcgccgtgggcctgaacctgcagagcaagacccagagaagcctgaccgccgagtacgagatccccagcgtgagagagagcgacgccgagcagtactactgcgtggccgagaacggctacggccccagccccagcggcctggtgagcatcaccgtgagaatccccgtgagcagacccatcctgatgctgagagcccccagagcccaggccgccgtggaggacgtgctggagctgcactgcgaggccctgagaggcagcccccccatcctgtactggttctaccacgaggacatcaccctgggcagcagaagcgcccccagcggcggcggcgccagcttcaacctgagcctgaccgaggagcacagcggcaactacagctgcgaggccaacaacggcctgggcgcccagagaagcgaggccgtgaccctgaacttcaccggcagaagaagcgccagagaccccctgagaagcctgcccagccccctgccccaggagttcacctacctgaacagccccacccccggccagctgcagcccatctacgagaacgagcccagagagcagagcgtggccgtgcacggcagacagcagcacagcagcgagcagaaggcccagaagccctggggccacatctggagaaccagattcccctag

SEQ ID NO: 60271 - protein, 428 aa, Artificial Sequence
  derived and/or modified sequence
MLPRLLLLICAPLCEPAELFLIASPSHPTEGSPVTLTCKMPFLQSSDAQFQFCFFRDTRALGPGWSSSPKLQIAAMWKEDTGSYWCEAQTMASKVLRSRRSQINVHRVPVADVSLETQPPGGQVMEGDRLVLICSVAMGTGDITFLWYKGAVGLNLQSKTQRSLTAEYEIPSVRESDAEQYYCVAENGYGPSPSGLVSITVRIPVSRPILMLRAPRAQAAVEDVLELHCEALRGSPPILYWFYHEDITLGSRSAPSGGGASFNLSLTEEHSGNYSCEANNGLGAQRSEAVTLNFTVPTGARSNHLTSGVIEGLLSTLGPATVALLFCYGLKRKIGRRSARDPLRSLPSPLPQEFTYLNSPTPGQLQPIYENVNVVSGDEVYSLAYYNQPEQESVAETLGTHMEDKVSLDIYSRLRKANITDVDYEDAM

SEQ ID NO: 60272 - DNA, 1554 bp, Artificial Sequence
  derived and/or modified sequence
gtaccatccctgacctggtcctcatgctgccgaggctgttgctgttgatctgtgctccactctgtgaacctgccgagctgtttttgatagccagcccctcccatcccacagaggggagcccagtgaccctgacgtgtaagatgccctttctacagagttcagatgcccagttccagttctgctttttcagagacacccgggccttgggcccaggctggagcagctcccccaagctccagatcgctgccatgtggaaagaagacacagggtcatactggtgcgaggcacagacaatggcgtccaaagtcttgaggagcaggagatcccagataaatgtgcacagggtccctgtcgctgatgtgagcttggagactcagcccccaggaggacaggtgatggagggagacaggctggtcctcatctgctcagttgctatgggcacaggagacatcaccttcctttggtacaaaggggctgtaggtttaaaccttcagtcaaagacccagcgttcactgacagcagagtatgagattccttcagtgagggagagtgatgctgagcaatattactgtgtagctgaaaatggctatggtcccagccccagtgggctggtgagcatcactgtcagaatcccggtgtctcgcccaatcctcatgctcagggctcccagggcccaggctgcagtggaggatgtgctggagcttcactgtgaggccctgagaggctctcctccgatcctgtactggttttatcacgaggatatcaccctggggagcaggtcggccccctctggaggaggagcctccttcaacctttccctgactgaagaacattctggaaactactcctgtgaggccaacaatggcctgggggcccagcgcagtgaggcggtgacactcaacttcacagtgcctactggggccagaagcaatcatcttacctcaggagtcattgaggggctgctcagcacccttggtccagccaccgtggccttattattttgctacggcctcaaaagaaaaataggaagacgttcagccagggatccactcaggagccttcccagccctctaccccaagagttcacctacctcaactcacctaccccagggcagctacagcctatatatgaaaatgtgaatgttgtaagtggggatgaggtttattcactggcgtactataaccagccggagcaggaatcagtagcagaaaccctggggacacatatggaggacaaggtttccttagacatctattccaggctgaggaaagcaaacattacagatgtggactatgaagatgctatgtaaggttatggaagattctgctctttgaaaaccatccatgaccccaagcctcaggcctgatatgttcttcagagatcctggggcattagctttccagtatacctcttctggatgccattctccatggcactattccttcatctactgtgaagtgaagttggcgcagccctgaagaaactacctaggagaactaatagacacaggagtgacagggactttgttatcagaaccagattcctgccggctc

SEQ ID NO: 60273 - DNA, 1287 bp, Artificial Sequence
  derived and/or modified sequence
atgctgcccagactcctcctgctgatctgcgcacccctgtgtgagcccgcagagttattcttgattgccagcccctcgcatccaaccgaaggctcccctgtgactctgacgtgtaaaatgccctttctgcagtcatccgacgcacagttccagttctgtttcttccgtgatactagggctctgggacctggctggagcagctccccgaaactgcaaatcgccgcgatgtggaaggaggataccggaagctattggtgtgaggcccagacaatggcttccaaagtactcaggtccaggcgctcacagattaacgtacatagagtccctgtggccgatgtgtctctcgagactcagcctcccgggggccaagtgatggagggcgaccggctcgttctcatatgtagtgtcgcgatgggaactggagacattacatttctgtggtacaaaggcgccgtgggtctaaatcttcagtcaaagacccagagatcattgactgccgaatatgaaatacctagcgtaagagaatcagatgcagagcagtattattgcgtggctgagaatggctatgggccttccccatcaggtctggtctccataactgtgcggattcccgttagtcgccctatcctgatgcttcgggcgcccagagctcaggcagcggtggaggacgtgctggagctccactgtgaggcactgaggggctcgcctccaattctatactggttttatcatgaggatattacactgggcagtaggtccgccccttcaggcggcggagccagcttcaacctgtcacttaccgaggagcactctggtaactactcctgtgaagccaataacgggttgggagcccaacgttccgaagccgtgacactgaacttcacagtgcccaccggtgcaagatctaaccatctgactagcggcgttatagagggtctgctgtctacgctcggacccgccaccgtggctcttctattttgttacggcctcaagcgcaaaattgggaggcgaagcgccagggaccctctgcgttcccttccgagccccttgcctcaggagttcacctacctgaactccccaactcccggacagctacagccaatttacgagaatgtgaacgtggtgagcggagacgaggtgtacagcctggcttactataatcagcccgaacaggagagcgtggcagagacactcggaacccatatggaagataaggttagcctggacatttatagcaggctgcgaaaagcaaacataactgatgtggattacgaagacgccatgtag

SEQ ID NO: 60274 - DNA, 1287 bp, Artificial Sequence
  derived and/or modified sequence
atgctgccccggctgctgctgctgatctgtgcccccctgtgtgagcctgctgagctgttcctgattgccagccccagccaccccacagagggcagccctgtgaccctgacctgcaagatgcccttcctgcagagcagtgatgcccagttccagttctgcttcttccgggacacccgggccctgggccctggctggagcagcagccccaagctgcagattgctgccatgtggaaggaggacaccggcagctactggtgtgaggcccagaccatggccagcaaggtgctgcggagcagaagaagccagatcaacgtgcaccgggtgcctgtggctgatgtgtccctggagacccagcccccaggcggccaggtgatggagggggaccggctggtgctgatctgcagcgtggccatgggcaccggggacatcaccttcctgtggtacaagggagctgtgggcctgaacctgcagagcaagacccagaggagcctgacagcagaatatgagatccccagcgtgcgggagagtgatgctgagcagtactactgtgtggccgagaatggctacggccccagccccagcggcctggtgtccatcaccgtgcgcatccctgtgtcccggcccatcctgatgctgcgggccccccgggcccaggccgctgtggaggatgtgctggagctgcactgtgaggccctgcggggcagcccccccatcctgtactggttctaccacgaggacatcaccctgggcagccgcagcgcccccagcggcggcggggccagcttcaacctgagcctgacagaggagcacagcggcaactacagctgtgaggccaacaacggcctgggcgcccagaggtctgaggccgtgaccctgaacttcaccgtgcccaccggggcccggagcaaccacctgaccagcggggtcatcgagggcctgctgagcaccctgggccctgccaccgtggccctgctcttctgctacggcctgaagaggaagattggccgccgcagcgcccgggaccccctgcggagcctgcccagccccctgccccaggagttcacctacctgaacagccccaccccaggccagctgcagcccatctatgaaaatgtgaatgtggtgtctggagatgaggtgtacagcctggcctactacaaccagcctgagcaggagagcgtggccgagaccctgggcacccacatggaggacaaggtgtccctggacatctacagccggctgaggaaggccaacatcacagatgtggactatgaagatgccatgtag

SEQ ID NO: 60275 - DNA, 1287 bp, Artificial Sequence
  derived and/or modified sequence
atgctgccccggctgctgctgctgatctgcgcccccctgtgcgagcccgctgagctcttcctcattgcctctccttcccacccaaccgaaggcagccctgtgacactgacgtgcaaaatgccgttcttgcagtcatccgacgcccaatttcaattctgcttcttcagagacactagagcactcgggcctggttggtcttcatcccctaaactgcagattgctgcaatgtggaaggaagacactggaagttactggtgcgaagctcagaccatggcatccaaagtgctacgttccaggcgctcccagattaacgtgcatcgcgtgcccgtcgccgacgtctccttagagactcagcccccagggggacaagttatggaaggcgacaggcttgtcctgatctgctcggttgccatgggaactggcgacataacatttctgtggtacaaaggcgcagtgggcctaaaccttcagtcaaaaactcagaggtccttgactgccgagtatgagatcccatctgtccgagaaagtgatgccgaacaatactactgtgttgctgagaacggctacggaccctccccaagtggtttggtgtctatcacggttcggatcccggtaagtaggccaattcttatgttacgtgcacccagagcccaggcagccgtcgaagacgtgttggagctccactgtgaagctctgaggggaagtccgcccattctgtactggttctaccatgaggacatcaccttaggctctaggagcgcacccagtggtggcggggctagcttcaacctgtcgttgacagaagaacatagcggtaattattcctgtgaagctaataacggcttgggggctcagcggagtgaggcggtgactctcaacttcactgtcccaactggagccaggagtaaccacctgacctctggcgtcattgagggcctgctcagtaccctcggacctgcgacagttgctcttctcttttgctacggcctaaagcgcaagatagggagaaggagcgcgagagaccctttacgatcattgccaagtcccctcccgcaggaattcacctacctgaactctcccacaccaggccaactgcaacccatctatgagaacgtgaatgtcgtctccggtgacgaagtgtattctctggcctactacaaccagcccgagcaagaatcagtggccgaaaccttaggcactcatatggaagacaaagtatctctggatatctattcccgactgcgaaaagccaacatcacagatgttgattacgaagacgccatgtag

SEQ ID NO: 60276 - DNA, 1287 bp, Artificial Sequence
  derived and/or modified sequence
atgctacctcgtctcctccttctgatatgtgcccctctgtgcgagccggcagaactgtttttgatcgcctcacccagccatcccacagaaggctcccctgttacacttacttgcaaaatgcccttcctgcagtcctctgatgcccagttccagttctgttttttccgagatactcgagcgctgggccctggatggagcagctctcccaagctgcagattgctgctatgtggaaggaagacaccgggtcctattggtgcgaggcacaaacaatggcctctaaagtgctgcgttcgcggcgatcccagatcaatgtgcacagagtccccgtggcggacgtgagtctggagacgcagccccctggcggacaggtaatggaaggcgatcggctggtcctgatttgctctgtggctatgggcaccggcgacatcacttttctgtggtacaagggggcagtgggcttgaatctccagagtaagacccaacggtccctcactgctgagtatgagatcccctcagtgagggagagtgacgcagagcagtattactgcgtggctgaaaacggctacggtccgagccccagtggcctggtgtcgattactgtcaggattcctgtcagtagacccattctgatgctgagagctccgagagcccaagcagccgtggaggacgtattggaactgcactgtgaggcactccggggtagccctccaatcctctactggttctatcacgaggacattacacttgggtcaaggtctgcacctagtggcggaggggcaagtttcaacctcagtcttaccgaagaacactctggtaattacagctgcgaagctaataacggcctgggcgcacagaggagcgaggccgttaccttgaattttacagtccccacaggagcgagatctaatcacctgacttctggggtgatagaaggtctcttgtctacgctggggcctgctaccgttgccctgctcttctgctatggcctcaagcgcaagatcgggaggcggtccgcccgtgatcctctgagaagcttgccaagcccgctgccccaggaatttacctatctcaacagtcctacaccagggcaactgcaaccaatctacgaaaatgtcaacgtggtttcaggggatgaggtctactctttagcttactacaatcaaccggagcaggaatccgtagctgaaacattgggaactcatatggaagacaaggtgtctttagatatttatagccggttacgaaaggctaatatcactgatgttgactatgaggacgccatgtag

SEQ ID NO: 60277 - DNA, 1287 bp, Artificial Sequence
  derived and/or modified sequence
atgctgcccagactgctgctgctgatctgcgcccccctgtgcgagcccgccgagctgttcctgatcgccagccccagccaccccaccgagggcagccccgtgaccctgacctgcaagatgcccttcctgcagagcagcgacgcccagttccagttctgcttcttcagagacaccagagccctgggccccggctggagcagcagccccaagctgcagatcgccgccatgtggaaggaggacaccggcagctactggtgcgaggcccagaccatggccagcaaggtgctgagaagcagaagaagccagatcaacgtgcacagagtgcccgtggccgacgtgagcctggagacccagccccccggcggccaggtgatggagggcgacagactggtgctgatctgcagcgtggccatgggcaccggcgacatcaccttcctgtggtacaagggcgccgtgggcctgaacctgcagagcaagacccagagaagcctgaccgccgagtacgagatccccagcgtgagagagagcgacgccgagcagtactactgcgtggccgagaacggctacggccccagccccagcggcctggtgagcatcaccgtgagaatccccgtgagcagacccatcctgatgctgagagcccccagagcccaggccgccgtggaggacgtgctggagctgcactgcgaggccctgagaggcagcccccccatcctgtactggttctaccacgaggacatcaccctgggcagcagaagcgcccccagcggcggcggcgccagcttcaacctgagcctgaccgaggagcacagcggcaactacagctgcgaggccaacaacggcctgggcgcccagagaagcgaggccgtgaccctgaacttcaccgtgcccaccggcgccagaagcaaccacctgaccagcggcgtgatcgagggcctgctgagcaccctgggccccgccaccgtggccctgctgttctgctacggcctgaagagaaagatcggcagaagaagcgccagagaccccctgagaagcctgcccagccccctgccccaggagttcacctacctgaacagccccacccccggccagctgcagcccatctacgagaacgtgaacgtggtgagcggcgacgaggtgtacagcctggcctactacaaccagcccgagcaggagagcgtggccgagaccctgggcacccacatggaggacaaggtgagcctggacatctacagcagactgagaaaggccaacatcaccgacgtggactacgaggacgccatgtag

SEQ ID NO: 60278 - protein, 444 aa, Artificial Sequence
  derived and/or modified sequence
MLLWSLLVIFDAVTEQADSLTLVAPSSVFEGDSIVLKCQGEQNWKIQKMAYHKDNKELSVFKKFSDFLIQSAVLSDSGNYFCSTKGQLFLWDKTSNIVKIKVQELFQRPVLTASSFQPIEGGPVSLKCETRLSPQRLDVQLQFCFFRENQVLGSGWSSSPELQISAVWSEDTGSYWCKAETVTHRIRKQSLQSQIHVQRIPISNVSLEIRAPGGQVTEGQKLILLCSVAGGTGNVTFSWYREATGTSMGKKTQRSLSAELEIPAVKESDAGKYYCRADNGHVPIQSKVVNIPVRIPVSRPVLTLRSPGAQAAVGDLLELHCEALRGSPPILYQFYHEDVTLGNSSAPSGGGASFNLSLTAEHSGNYSCEANNGLGAQCSEAVPVSISGPDGYRRDLMTAGVLWGLFGVLGFTGVALLLYALFHKISGESSATNEPRTPKSSTLL

SEQ ID NO: 60279 - DNA, 1335 bp, Artificial Sequence
  derived and/or modified sequence
atgctgctgtggagcctgctggtgatcttcgacgccgtgaccgagcaggccgacagcctgaccctggtggcccccagcagcgtgttcgagggcgacagcatcgtgctgaagtgccagggcgagcagaactggaagatccagaagatggcctaccacaaggacaacaaggagctgagcgtgttcaagaagttcagcgacttcctgatccagagcgccgtgctgagcgacagcggcaactacttctgcagcaccaagggccagctgttcctgtgggacaagaccagcaacatcgtgaagatcaaggtgcaggagctgttccagagacccgtgctgaccgccagcagcttccagcccatcgagggcggccccgtgagcctgaagtgcgagaccagactgagcccccagagactggacgtgcagctgcagttctgcttcttcagagagaaccaggtgctgggcagcggctggagcagcagccccgagctgcagatcagcgccgtgtggagcgaggacaccggcagctactggtgcaaggccgagaccgtgacccacagaatcagaaagcagagcctgcagagccagatccacgtgcagagaatccccatcagcaacgtgagcctggagatcagagcccccggcggccaggtgaccgagggccagaagctgatcctgctgtgcagcgtggccggcggcaccggcaacgtgaccttcagctggtacagagaggccaccggcaccagcatgggcaagaagacccagagaagcctgagcgccgagctggagatccccgccgtgaaggagagcgacgccggcaagtactactgcagagccgacaacggccacgtgcccatccagagcaaggtggtgaacatccccgtgagaatccccgtgagcagacccgtgctgaccctgagaagccccggcgcccaggccgccgtgggcgacctgctggagctgcactgcgaggccctgagaggcagcccccccatcctgtaccagttctaccacgaggacgtgaccctgggcaacagcagcgcccccagcggcggcggcgccagcttcaacctgagcctgaccgccgagcacagcggcaactacagctgcgaggccaacaacggcctgggcgcccagtgcagcgaggccgtgcccgtgagcatcagcggccccgacggctacagaagagacctgatgaccgccggcgtgctgtggggcctgttcggcgtgctgggcttcaccggcgtggccctgctgctgtacgccctgttccacaagatcagcggcgagagcagcgccaccaacgagcccagaacccccaagagcagcaccctgctgtag

SEQ ID NO: 60280 - DNA, 1407 bp, Artificial Sequence
  derived and/or modified sequence
ggtgaccaagagtacatctcttttcaaatagctggattaggtcctcatgctgctgtggtcattgctggtcatctttgatgcagtcactgaacaggcagattcgctgacccttgtggcgccctcttctgtcttcgaaggagacagcatcgttctgaaatgccagggagaacagaactggaaaattcagaagatggcttaccataaggataacaaagagttatctgttttcaaaaaattctcagatttccttatccaaagtgcagttttaagtgacagtggtaactatttctgtagtaccaaaggacaactctttctctgggataaaacttcaaatatagtaaagataaaagtccaagagctctttcaacgtcctgtgctgactgccagctccttccagcccatcgaagggggtccagtgagcctgaaatgtgagacccggctctctccacagaggttggatgttcaactccagttctgcttcttcagagaaaaccaggtcctggggtcaggctggagcagctctccggagctccagatttctgccgtgtggagtgaagacacagggtcttactggtgcaaggcagaaacggtgactcacaggatcagaaaacagagcctccaatcccagattcacgtgcagagaatccccatctctaatgtaagcttggagatccgggcccccgggggacaggtgactgaaggacaaaaactgatcctgctctgctcagtggctgggggtacaggaaatgtcacattctcctggtacagagaggccacaggaaccagtatgggaaagaaaacccagcgttccctgtcagcagagctggagatcccagctgtgaaagagagtgatgccggcaaatattactgtagagctgacaacggccatgtgcctatccagagcaaggtggtgaatatccctgtgagaattccagtgtctcgccctgtcctcaccctcaggtctcctggggcccaggctgcagtgggggacctgctggagcttcactgtgaggccctgagaggctctcccccaatcttgtaccaattttatcatgaggatgtcacccttgggaacagctcggccccctctggaggaggggcctccttcaacctctctttgactgcagaacattctggaaactactcctgtgaggccaacaacggcctgggggcccagtgcagtgaggcagtgccagtctccatctcaggacctgatggctatagaagagacctcatgacagctggagttctctggggactgtttggtgtccttggtttcactggtgttgctttgctgttgtatgccttgttccacaagatatcaggagaaagttctgccactaatgaacccaggactcccaagtcatctactcttctgtgaagaaatcataacacttggaggaatca

SEQ ID NO: 60281 - DNA, 1335 bp, Artificial Sequence
  derived and/or modified sequence
atgctcctgtggagcctgctagtgatctttgatgctgttacagagcaggccgactctctgaccttggttgcaccgtcaagcgtgttcgaaggtgatagcatcgtgttgaaatgccagggtgaacagaactggaagatccagaagatggcctaccataaagacaacaaagagctgtctgtgttcaaaaagttcagcgatttccttatccagtcagccgtgctgagtgatagcgggaactatttctgttctacgaaaggtcagctctttctgtgggataagacatcaaatatcgtcaagatcaaagtgcaagaattattccaacggccagtgctgacagctagctcatttcagccgattgaaggaggtcctgttagtctgaagtgcgagacacgcctttctccccaacgcttggacgtgcagctgcagttctgcttttttcgggagaaccaagtcctaggcagcgggtggtcaagctctccggagctgcaaatctccgccgtgtggtcggaggatacaggctcctactggtgtaaagctgagaccgtgactcatcggatccggaaacagtcactgcagtcgcagatacacgtgcagaggatccccattagcaatgtttcgttagagatcagggcgccagggggccaggtgacagagggacagaagctgatactcctgtgctccgtcgccggcgggacaggcaacgtcacgtttagttggtatcgcgaggcaactggaacgtccatggggaaaaagacccagagaagcctgtccgctgagctggagattcccgctgtcaaggagtccgacgccggtaagtattactgccgcgcggacaatggtcacgtacccattcagagcaaagttgtcaatattcctgtgcgaataccagtctcaagacctgtgctgacgctgcggtcccccggggcacaggccgctgtaggcgatctgctagagctgcattgtgaagcgctgcgtgggtcgcctcccattctgtatcagttctatcacgaggatgtgactctggggaattctagtgccccgtccgggggtggagctagtttcaacctttccctgaccgccgagcactcaggaaactatagttgcgaagcaaacaacgggctgggtgcccaatgcagtgaggcggttcctgtgagcataagtggccccgatggataccgacgggatctgatgactgccggcgtgctgtggggcctctttggggtgctgggattcacgggcgtggccctgctgctctatgccctttttcataaaattagcggcgaaagtagcgctaccaacgagcccaggacaccgaaaagcagcacccttctatag

SEQ ID NO: 60282 - DNA, 1335 bp, Artificial Sequence
  derived and/or modified sequence
atgctgctgtggagcctgctggtgatctttgatgctgtgacagagcaggccgacagcctgaccctggtggcccccagctctgtgtttgaaggagacagcatcgtgctgaagtgccagggcgagcagaactggaagatccagaagatggcctaccacaaggacaacaaggagctgtctgtgttcaagaagttcagtgacttcctgatccagagcgctgtgctgagtgacagcggcaactacttctgcagcaccaagggccagctgttcctgtgggacaagaccagcaacatcgtgaagatcaaggtgcaggagctgttccagaggcctgtgctgacagccagcagcttccagcccattgaaggaggccctgtgtccctgaagtgtgagacccggctgagcccccagaggctggatgtgcagctgcagttctgcttcttccgggagaaccaggtgctgggcagcggctggagcagcagccctgagctgcagatctctgctgtgtggagcgaggacaccggcagctactggtgcaaggccgagaccgtgacccaccgcatcaggaagcagagcctgcagagccagatccacgtgcagaggatccccatcagcaatgtgtccctggagatccgggcccctgggggccaggtgacagagggccagaagctgatcctgctgtgcagcgtggccggcggcactggaaatgtgaccttctcctggtaccgggaggccaccggcacctccatgggcaagaagacccagaggagcctgtctgctgagctggagatcccagctgtgaaggagagtgatgctgggaagtactactgcagagctgacaatggacatgtgcccatccagagcaaggtggtgaacatccctgtgcgcatccctgtgtccaggcctgtgctgaccctgcggagccctggggcccaggccgctgtgggggacctgctggagctgcactgtgaggccctgcggggcagcccccccatcctgtaccagttctaccatgaagatgtgaccctgggcaacagcagcgcccccagcggcggcggggccagcttcaacctgagcctgacagctgagcacagcggcaactacagctgtgaggccaacaacggcctgggcgcccagtgcagcgaggccgtgcctgtgtccatcagcggcccagatggctacagaagagacctgatgacagctggggtgctgtggggcctgtttggagtgctgggcttcaccggggtggccctgctgctgtatgccctcttccacaagatcagcggggagagcagcgccaccaatgagcccaggacccccaagagcagcaccctgctgtag

SEQ ID NO: 60283 - DNA, 1335 bp, Artificial Sequence
  derived and/or modified sequence
atgctgctgtggagcctgctggtgatcttcgacgccgtgaccgagcaagcggattccctgactcttgtggccccgtcctcggtgttcgaaggggactcgattgtgctgaagtgtcagggcgagcagaattggaaaattcaaaaaatggcctatcacaaggacaataaagagctatctgtatttaaaaagttttccgattttctgatacaatctgcggtactgtccgattcagggaattatttttgttccactaaggggcagttattcctttgggataaaacctccaatatagttaagattaaagtccaagaattgttccagagacccgttctgacggcttcatcatttcagcctattgaagggggtcctgttagcctcaaatgtgagacacgcctgtccccccagagactggacgtgcagctgcagttttgttttttcagagagaaccaagtgcttggttctggatggtcttccagcccagaattacaaatcagtgcggtttggagcgaggacaccggcagttattggtgcaaagccgagaccgtcacccataggattaggaagcagtcactacaaagccaaattcacgtccagcgtatcccgatctcaaatgtcagtttagaaataagggccccaggaggccaggtgactgaagggcagaaactgattttgttatgtagcgtggcgggcggtacaggcaacgtgactttctcttggtacagggaagcgaccggcaccagcatggggaagaagacccagcgaagccttagcgctgagctggaaatccctgccgtaaaagagtccgacgctggcaaatattattgcagggctgataacggacacgtccccattcagtccaaagtggtcaatatccctgttaggattcctgtttctaggcccgtactcactcttcgctctcctggcgctcaggccgctgtgggcgatcttctggagctccattgcgaggctctgcgcggctctcccccgattctctaccaattctaccatgaggatgtgaccctgggaaactccagcgcgcccagtgggggcggagcctccttcaacctgtctctgacagcggagcactcaggtaactacagctgtgaggctaataacggactgggcgcccagtgctccgaggctgttccagtctctatctccggccccgacggataccgccgcgacctcatgacggctggggtgctatgggggcttttcggggtcctcggctttaccggcgtggccctacttctctatgctctctttcacaagatatcaggggaaagctccgctactaacgagccacggacccctaagtccagtacactactgtag

SEQ ID NO: 60284 - DNA, 1335 bp, Artificial Sequence
  derived and/or modified sequence
atgctgctgtggtcactgctggtaatctttgacgcggttaccgaacaggctgattctttgacactggtagctccatcctccgtctttgaaggggattcaattgtgctgaagtgccagggtgaacaaaactggaagatccagaagatggcttaccataaagacaacaaagaactctccgtctttaaaaagttttctgattttttgatccagtccgccgtgctaagcgactcaggaaattacttctgcagcaccaagggacagctgtttctctgggacaagacctctaatattgtgaagataaaggtgcaggagctttttcagagaccggtgctaaccgcctcatcttttcagcctattgagggcggaccagtcagcttaaagtgcgagaccagactgtctcctcaacgattagacgtgcagctgcaattctgtttttttcgggagaatcaggtgctaggttcagggtggagcagctctccagagctacagatctccgccgtctggagcgaggacactggcagttactggtgcaaggccgaaaccgtgacccacagaattcgaaagcagtcactacagtcacagatccacgtgcagagaataccaatatcaaacgttagccttgagatccgtgcaccagggggtcaggtgaccgagggtcaaaagctgattctgctttgcagcgtcgctggaggaaccggtaatgtcaccttcagctggtatcgggaggctaccgggacttccatgggaaagaagacacagagatcactgtctgccgaacttgaaattcctgccgtcaaggagagcgacgctggtaaatactactgcagagccgacaacgggcacgtccctatccagtcaaaggttgtcaatattcctgtccggattcctgtttcgagaccagtgctgacgctgcggtcccccggtgcacaggccgctgtgggggatctcctcgagttgcattgcgaagctcttagaggtagcccgccaattctctaccagttttaccacgaagacgtaacccttgggaactcatccgctccttccggaggcggagcctctttcaatttgagtctaacagctgagcattccggcaattatagctgcgaagccaacaatgggctaggtgctcagtgctctgaggccgtccctgtgtccatttcaggcccagacggttacaggagggacctgatgacagccggtgtgctatggggtctattcggggttctggggttcaccggggtagctctcctgctgtatgccctctttcataaaatttccggagagtcaagtgcaactaatgagcctagaaccccgaaatctagcaccttattgtag

SEQ ID NO: 60285 - protein, 98 aa, Artificial Sequence
  derived and/or modified sequence
MDHKPLLQERPPAYNLEAGQGDYACGPHGYGAIPAAPPPPPYPYLVTGIPTHHPRVYNIHSRTVTRYPANSIVVVGGCPVCRHQRSSWLYTYPLRVCT

SEQ ID NO: 60286 - DNA, 297 bp, Artificial Sequence
  derived and/or modified sequence
atggatcataaacccctcttacaggagcgacctccagcatataatcttgaggctggccagggtgactacgcttgtggtccccatggatacggtgcgatacctgccgcaccacctcccccaccgtacccctacttagtcaccggtattcccactcaccaccctagggtgtacaatattcacagcagaacggtgacccggtatcccgcaaattccatcgtggtggttggaggctgtcctgtgtgccgccaccagagaagcagttggctatacacatacccactgagagtctgtacctag

SEQ ID NO: 60287 - DNA, 297 bp, Artificial Sequence
  derived and/or modified sequence
atggaccacaagcccctgctgcaggagcggcccccagcctacaacctggaggccggccagggcgactatgcctgtggcccccacggctacggggccatcccagctgcccctcctcctccaccctacccctacctggtgacaggcatccccacccaccacccccgggtgtacaacatccacagcaggacagtgacccgctacccagccaacagcatcgtggtggtgggcggctgccctgtgtgccgccaccagaggagctcctggctgtacacctaccccctgcgggtgtgcacctag

SEQ ID NO: 60288 - DNA, 297 bp, Artificial Sequence
  derived and/or modified sequence
atggaccacaagcccctgctgcaggagcggccccccgcctacaacctggaggcgggccagggagactatgcctgcggccctcacgggtacggggccatccctgccgcgccgcctcctccgccatacccgtacctcgtgaccggcattccaacacaccacccaagggtttataatatccactctaggactgtgacacggtatcctgctaatagcatcgtggtggtgggaggttgcccggtctgcagacaccagagatcctcctggctgtacacttatcccctgcgcgtttgtacctag

SEQ ID NO: 60289 - DNA, 297 bp, Artificial Sequence
  derived and/or modified sequence
atggaccacaaaccactcctgcaggaaagacctcccgcttataatttggaggctggtcagggtgattacgcatgtggccctcacggttatggtgccattcccgcagcaccccctccacctccatacccttatctggtgaccggaattccgacccaccatcccagggtctacaatatccactccaggaccgtgacacggtaccctgctaattccatagtcgtggtgggcggttgccccgtatgtcggcatcagcggagcagttggctatacacctacccactcagggtctgtacgtag

SEQ ID NO: 60290 - DNA, 699 bp, Artificial Sequence
  derived and/or modified sequence
cccgccccgcgtctgcctcagaggggcccgagccacccggtccgccgcgtccccgccgccgccgccgcgtcccccgccggggccgaccgagccgagccgggccggagcggcgggcgcggccgggccgccatggaccacaagccgctgctgcaggagcggccgcccgcctacaacctggaggccggccagggcgactacgcgtgcggcccgcacggctacggcgccatccccgccgcgcccccgccgccgccctacccctacctcgtcacagggatacccacccaccatcccagggtctacaacatccacagccggaccgtcacccgctatcctgccaactctatcgtggtcgtaggaggctgtcctgtctgcaggcaccagaggtcatcctggctttacacgtatcctttgagagtctgtacctgattcaaacacggagaaaccaggaccccgagcagtttgagtgtactggtaatggatgcagctttggccaactagctgagtgagaacacaaggagccgtgactccgacgcccaggcctgtgtcctggatgggccgtgtgcagcgaatccgttggcgactcctaactaccaagaaaaggagctctcggaggagatttcgtcgagtgctacgtgtggctgtgataagggcaggcaaagcgtcttagcactctacagctctggcgtggttggagggagg

SEQ ID NO: 60291 - DNA, 297 bp, Artificial Sequence
  derived and/or modified sequence
atggaccacaagcccctgctgcaggagagaccccccgcctacaacctggaggccggccagggcgactacgcctgcggcccccacggctacggcgccatccccgccgccccccccccccccccctacccctacctggtgaccggcatccccacccaccaccccagagtgtacaacatccacagcagaaccgtgaccagataccccgccaacagcatcgtggtggtgggcggctgccccgtgtgcagacaccagagaagcagctggctgtacacctaccccctgagagtgtgcacctag

SEQ ID NO: 60292 - protein, 396 aa, Artificial Sequence
  derived and/or modified sequence
MAEMATATRLLGWRVASWRLRPPLAGFVSQRAHSLLPVDDAINGLSEEQRQEFWKQLGNLGVLGITAPVQYGGSGLGYLEHVLVMEEISRASGAVGLSYGAHSNLCINQLVRNGNEAQKEKYLPKLISGEYIGALAMSEPNAGSDVVSMKLKAEKKGNHYILNGNKFWITNGPDADVLIVYAKTDLAAVPASRGITAFIVEKGMPGFSTSKKLDKLGMRGSNTCELIFEDCKIPAANILGHENKGVYVLMSGLDLERLVLAGGPLGLMQAVLDHTIPYLHVREAFGQKIGHFQLMQGKMADMYTRLMACRQYVYNVAKACDEGHCTAKDCAGVILYSAECATQVALDGIQCFGGNGYINDFPMGRFLRDAKLYEIGAGTSEVRRLVIGRAFNADFH

SEQ ID NO: 60293 - DNA, 1191 bp, Artificial Sequence
  derived and/or modified sequence
atggccgaaatggctacagctactagactattgggatggagagtggcatcatggcgacttcgcccccctctagccggatttgtctctcaacgggctcatagtctgctcccagtggatgacgcaataaatggactgagcgaagagcagagacaggaattctggaagcagctggggaacttgggggttctgggtataaccgcccctgtgcagtacggcgggtctggtttgggctacctggaacacgtgcttgtgatggaggaaattagccgtgcttctggcgccgtgggccttagctacggagcacattccaatttatgcatcaaccagctggtgcggaacggtaacgaagcccaaaaagagaagtacttgcctaagctgatcagcggcgaatatataggcgcattggcaatgtcagagccgaacgctggcagtgacgtggtatctatgaagcttaaagcggaaaagaagggaaaccattacatcttgaacggcaacaaattttggattactaatgggcctgacgccgacgtcttgatcgtgtacgctaagacagatctggccgcagtccctgcttcgcgggggatcaccgccttcatcgtggaaaagggaatgcccggattctcaacttccaagaagctggacaaattggggatgaggggaagcaacacatgtgagctgatttttgaagattgcaaaatacctgcggctaatattctgggtcacgaaaataaaggggtttatgttctgatgagcgggctcgacctcgagcggcttgtactggctggtggacctctgggtctcatgcaggcggtgctggaccataccataccatatttgcacgtgagggaagcattcggacaaaagatcgggcacttccaattgatgcagggcaaaatggcagacatgtacacccggctgatggcctgccgtcaatatgtgtacaacgtggcgaaggcctgcgacgagggccactgcactgctaaggactgtgccggcgtcatcctgtacagcgcggagtgcgcaacacaagtggcgcttgacggaattcaatgtttcggagggaatggctacattaacgacttccccatgggacgcttcttgcgcgatgccaagctttacgaaattggagcaggcacaagtgaggtgcgcagactcgtaataggacgcgccttcaatgcagactttcactag

SEQ ID NO: 60294 - DNA, 4251 bp, Artificial Sequence
  derived and/or modified sequence
agtttcagcgctggctcttcgtgcatggcagagatggcgactgcgactcggctgctggggtggcgtgtggcgagctggaggctgcggccgccgcttgccggcttcgtttcccagcgggcccactcgcttttgcccgtggacgatgcaatcaatgggctaagcgaggagcagaggcaggaattttggaagcagctggggaacctgggcgtattgggcatcacagcccctgttcagtatggcggctccggcctgggctacctggagcatgtgctggtgatggaggagatatcccgagcttccggagcagtggggctcagttacggtgcccactccaacctctgcatcaaccagcttgtacgcaatgggaatgaggcccagaaagagaagtatctcccgaagctgatcagtggtgagtacatcggagccctggccatgagtgagcccaatgcaggctctgatgttgtctctatgaagctcaaagcggaaaagaaaggaaatcactacatcctgaatggcaacaagttctggatcactaatggccctgatgctgacgtcctgattgtctatgccaagacagatctggctgctgtgccagcttctcggggcatcacagccttcattgtggagaagggtatgcctggctttagcacctctaagaagctggacaagctggggatgaggggctctaacacctgtgagctaatctttgaagactgcaagattcctgctgccaacatcctgggccatgagaataagggtgtctacgtgctgatgagtgggctggacctggagcggctggtgctggccggggggcctcttgggctcatgcaagcggtcctggaccacaccattccctacctgcacgtgagggaagcctttggccagaagatcggccacttccagttgatgcaggggaagatggctgacatgtacacccgcctcatggcgtgtcggcagtatgtctacaatgtcgccaaggcctgcgatgagggccattgcactgctaaggactgtgcaggtgtgattctttactcagctgagtgtgccacacaggtagccctggacggcattcagtgttttggtggcaatggctacatcaatgactttcccatgggccgctttcttcgagatgccaagctgtatgagataggggctgggaccagcgaggtgaggcggctggtcatcggcagagccttcaatgcagactttcactagtcctgagacccttcgcccccttttcctgcacctagtggcctttcttgggaagtagagatgtggcggctttcccaccctgcccacagcaggccctcctgcccagctgctcttgtcagccctctggcctctggatgaggttgagttctccacaacagctcccaagcatcatgggcctcgcagccgggcctgtgccacggctagtgttgtgtgatttaaaatggactcagcaggaagcatattgtctggggattgttgggacaggttttggtgactctgtgcccttgctctctaacttctgagcccacctcccagggtaggcacctgggggcatgcaggtgcccacctcccagggtaggcacctgggggcatgcaggtacccacctctttctcttgggtgaggctctggcaaggagatctctctgctcaagcacagcagaatcatggcccctctccatgaattggaacttggtacaggttaagtatccctaatcctgaaatctgaaacacttgtggttccaagcattttggataaggcaaattcaactttcagtctcttttctgggggaaaaaaataataaacctagcctagccaggcgtggtggctcatgcttgtaatcccagcacttcaggaggctgagatgggtggatcacctgaggtcaggagttcaagaccagcctggccaacatgtggaaacctcgcctcaactaaaaatagaaaaaaattagttgggcatggtggtgggcacctgtaatcccagctacttcaggaggctgaggcaggagaattacttgaacccaggaggcggacgttgcagtgagccgagcttgtgccattgcactccagcctgggcgacaagagcaaaactcttcaaaaaacaaaacaaaacaaaaaaaccctggcccttgtttcttccagtttctagaggtatcagctcctagcagcttatgaacacatatgcttgcttggccaggcaaggtggtgtgtgcctgtaatcccagcactttgggaggccaaggcaggtggatcacttgcagtcaggagttcaagaccagcctgtccaacgtggtgaaaccccatctctactaaaaatacaaaaattagccaggggtggtggtgcacgtctgtaatcccagctactcaggaggctgaggcaggagaatcacttgaacccgggaggtggaggttgcaatgagccaatatgacaccgctgcagtccagcctgggccatagagtgagactctgtctcaaaaaaggaaagaaaaataggctgggcacagtgactcatgcctgtaatcccaacactttgggaggccgaggcaggtggatcacgaggtcaggagttcaagaccagcctggccaagatggtaaaacctcgtctctactaaaaatacaaaaattagccaggtgtggtggcaggctcctgtaatcccagctactcaggaggctgaggcagagaattgcttgaacccgggaggcagagtttgcagtgagccaagatcacaccactgcactccagcttggacgacagagcgagactctgtctcaaaaaataataggccaggcatggtggctcaacgtctgtaatcccagcactttgggaggccgaggcgggcagatcacaaggtcaggagttcgagaccagcctgacgaccaacatggtgaaacctcgtctctactaaaaatacaaaaattagccaggcctggtggcacgcgcctgtaatcccagttacacagaagactgaggcaggagaatcgcttgaacgcaggaggcagaggttgcaggagctgagatcgcgccattgcactccagcctgggcaacagagtgagactctgtctcaaaaaataataataaaataaatgaacacacatgctgctgagtccgcagggggggcagagcagaggacagcgtgcttttgtgtactgttggaagactggctcctcctgtacagcacctctgagcccttgtgcaccgccctgccacgggcaccatccagtcctggccgtgtgaccacccacagctgactgggcagcaggcacaggccctacccgagcaggccggagttggctcgcatgactccagctgaggctgcctgtgtacatttctccagataccctatggctaattttgttataactgcacagtggctgctgccattttgtattaaatatattgtgaaacaaacctatctggggagaagcaatctacttgccgctgcttcctgtctggatccagcttgtgtccttggagagtggctggcccaggtcctattcctgtcctccagcccgttctttcatgagggacaggaaggtaaaatcagcccttaggagagaggtctcagcctccctttcccagatctcccagtgagttttaaaggaagcagggagcccagagtgctaagttcttacagccagaaggaagcttatagatttctgaaaaccgcccctttgtttttaaaaagatcaacacaatttgactttctcaaggtcaaaacgaactagaatccagatctgctcatggcaaaaatgggggtgttctgagaattccagctttgggccgcactgtacagcagtctggatagagtgtgatctgagaagggaatgggtctgggttgttccaccccttccgagttccaaaaagagggaactggttttcttggttctcagcccagcagcacctatcctggctcttggtcctggcctgcagccaagtgctgttcctagcctgaggcttgagacaggtggggttggctcctcaccaaccccagttccgtcccatcctgagggcaagatcctgggctcataggcagtccctttcacttccttgtcttgctccctgctatgttggagatgaatgtgactaaaagggccatcttgctggcttaatgtgtggctggagagaccagcctggagacaatgtggcaaaatggggcgcttcatccagtctgtctaagccctgtcgacttggggaggtgatttctttcctggttctatatgtgaagcaaaataaatgttttaaaattaaaagcaaaaaaaa

SEQ ID NO: 60295 - DNA, 1191 bp, Artificial Sequence
  derived and/or modified sequence
atggccgagatggccacagccacccggctgctgggctggagggtggcctcctggaggctgcggccccccctggccggctttgtgtcccagagggcccacagcctgctgcctgtggatgatgccatcaatggcctgtctgaggagcagaggcaggagttctggaagcagctgggcaacctgggcgtgctgggcatcacagcccctgtgcagtatggaggcagcggcctgggctacctggagcacgtgctggtgatggaggagatcagccgggccagcggggctgtgggcctgtcctatggagcccacagcaacctgtgcatcaaccagctggtgagaaatggaaatgaggcccagaaggagaagtacctgcccaagctgatcagcggggagtacatcggggccctggccatgtctgagcccaatgccggcagtgatgtggtgtccatgaagctgaaggccgagaagaagggcaaccactacatcctgaatggaaacaagttctggatcaccaatggaccagatgctgatgtgctgattgtgtatgccaagacagacctggccgctgtgcctgccagccggggcatcacagccttcatcgtggagaagggcatgcctggcttcagcaccagcaagaagctggacaagctgggcatgaggggcagcaacacctgtgagctgatctttgaggactgcaagatcccagctgccaacatcctgggccacgagaacaagggcgtgtatgtgctgatgagcggcctggacctggagcggctggtgctggccggcggccccctgggcctgatgcaggccgtgctggaccacaccatcccctacctgcacgtgcgggaggccttcggccagaagattggccacttccagctgatgcagggcaagatggctgacatgtacacccggctgatggcctgccggcagtatgtgtacaacgtggccaaggcctgtgatgagggccactgcacagccaaggactgtgccggggtcatcctgtacagcgcagaatgtgccacccaggtggccctggatggcatccagtgcttcggcggcaatggctacatcaatgacttccccatgggccgcttcctgagagatgccaagctgtatgaaattggagctggcaccagcgaggtgcggcggctggtgattggccgggccttcaatgctgacttccactag

SEQ ID NO: 60296 - DNA, 1191 bp, Artificial Sequence
  derived and/or modified sequence
atggccgagatggccaccgccacccggctgctgggctggcgggtggcctcctggagattgcgccctcctctcgccggtttcgtgagtcagcgagcacactctctgcttcccgtcgatgacgctatcaatggcctatccgaggagcagcgacaggaattctggaaacagttagggaatctgggtgtgttgggtataaccgcgcccgttcagtacggtggctcagggctggggtatctggaacatgttcttgtgatggaggaaatttccagggcctctggcgccgtcggtctgtcatacggcgcccactccaatttatgtataaaccagctggttagaaacggaaacgaggcacaaaaggaaaagtatctgccaaagctcatcagcggcgagtacataggtgcccttgccatgtcagaacccaatgccggcagcgacgtagtttccatgaaattgaaagctgagaagaaagggaatcactatatcctgaacggtaacaaattctggatcactaacggccccgacgcagacgttctgatcgtctacgctaaaactgatctggcagccgtccccgcttcccgaggaatcactgcctttattgtcgagaagggcatgcccggtttctcaacttctaagaagctggataagctgggcatgcgcggtagcaacacctgcgagctaatattcgaggactgtaagatcccagcagctaacatcctgggtcatgaaaacaagggcgtttatgtgctcatgagcggcctcgatctcgagcgcctggtgcttgctgggggtcccctgggactgatgcaggccgtcctggaccataccatcccatacctgcatgtgagagaggcctttggtcagaaaatcgggcactttcagcttatgcaaggtaagatggctgacatgtacacacgactgatggcctgtaggcagtacgtttataacgtggccaaggcgtgtgatgaagggcactgtacagctaaggattgcgccggcgtgatactgtacagtgcagaatgcgctacccaagttgcccttgatggaattcagtgttttggtggtaacgggtacatcaatgatttccccatgggaaggttcctgcgcgacgcaaaactgtatgaaattggtgcgggcaccagcgaggtccggcggttagtgatcggccgggccttcaacgctgatttccattag

SEQ ID NO: 60297 - DNA, 1191 bp, Artificial Sequence
  derived and/or modified sequence
atggctgagatggctaccgctaccaggctgctgggatggcgggttgcttcgtggcgccttcgtccaccactcgccggatttgtgagccagcgggctcactctctgctgccggtagatgacgccattaacggtctgagcgaggagcagcgacaggagttctggaagcagctgggcaaccttggtgttctgggaatcactgcacccgtgcagtatggaggtagcggcctgggctatcttgagcacgtcctggtgatggaagagatcagcagagcctcgggtgccgtgggcctgtcatacggcgctcacagtaatctgtgtattaatcagctggtgcgaaatgggaacgaggctcagaaagaaaagtatctgccaaaactcatctccggggagtatattggcgctctggccatgtccgaacccaacgcaggcagcgatgtggtttctatgaaactgaaagccgagaagaagggcaatcattatatcctgaatggtaataagttttggataacaaacgggccagacgccgacgttctgatcgtgtatgctaagacggacctggcagccgtaccagcctcccgtggcatcactgcatttatagtggagaagggtatgccgggattctccacaagcaagaaactcgataagcttggcatgaggggctcaaatacgtgcgagttgatctttgaggactgcaagatcccagccgctaatatcctaggacatgagaataaaggcgtgtacgtcttaatgtcaggtctggatttggaacgacttgttctggccggagggccactgggtctgatgcaggcagtcctggatcatacgataccttatttgcacgtgagagaagcattcggtcagaagatcggacatttccaactaatgcaaggaaagatggccgatatgtatactaggctcatggcctgtcgtcagtacgtatataatgtggcgaaggcttgcgacgaaggtcattgcactgctaaggactgtgccggtgttatcctatatagcgccgaatgtgctactcaggtggccctagacggaatacagtgttttggaggcaacggatacattaatgattttcccatggggaggtttctgagagatgctaagctctatgagatcggggctggtacctctgaggtgcggcgactggtgattggacgcgctttcaacgctgattttcattag

SEQ ID NO: 60298 - DNA, 1191 bp, Artificial Sequence
  derived and/or modified sequence
atggccgagatggccaccgccaccagactgctgggctggagagtggccagctggagactgagaccccccctggccggcttcgtgagccagagagcccacagcctgctgcccgtggacgacgccatcaacggcctgagcgaggagcagagacaggagttctggaagcagctgggcaacctgggcgtgctgggcatcaccgcccccgtgcagtacggcggcagcggcctgggctacctggagcacgtgctggtgatggaggagatcagcagagccagcggcgccgtgggcctgagctacggcgcccacagcaacctgtgcatcaaccagctggtgagaaacggcaacgaggcccagaaggagaagtacctgcccaagctgatcagcggcgagtacatcggcgccctggccatgagcgagcccaacgccggcagcgacgtggtgagcatgaagctgaaggccgagaagaagggcaaccactacatcctgaacggcaacaagttctggatcaccaacggccccgacgccgacgtgctgatcgtgtacgccaagaccgacctggccgccgtgcccgccagcagaggcatcaccgccttcatcgtggagaagggcatgcccggcttcagcaccagcaagaagctggacaagctgggcatgagaggcagcaacacctgcgagctgatcttcgaggactgcaagatccccgccgccaacatcctgggccacgagaacaagggcgtgtacgtgctgatgagcggcctggacctggagagactggtgctggccggcggccccctgggcctgatgcaggccgtgctggaccacaccatcccctacctgcacgtgagagaggccttcggccagaagatcggccacttccagctgatgcagggcaagatggccgacatgtacaccagactgatggcctgcagacagtacgtgtacaacgtggccaaggcctgcgacgagggccactgcaccgccaaggactgcgccggcgtgatcctgtacagcgccgagtgcgccacccaggtggccctggacggcatccagtgcttcggcggcaacggctacatcaacgacttccccatgggcagattcctgagagacgccaagctgtacgagatcggcgccggcaccagcgaggtgagaagactggtgatcggcagagccttcaacgccgacttccactag

SEQ ID NO: 60299 - DNA, 1782 bp, Artificial Sequence
  derived and/or modified sequence
atggagaagctgagcgccctgcaggagcagaagggcgagctgagaaagagactgagctacaccacccacaagctggagaagctggagaccgagttcgacagcaccagacactacctggagatcgagctgagaagagcccaggaggagctggagaaggtgaccgagaagctgagaagaatccagagcaactacatggccctgcagagaatcaaccaggagctggaggacaagctgtacagaatgggccagcactacgaggaggagaagagagccctgagccacgagatcgtggccctgaacagccacctgctggaggccaaggtgaccatcgacaagctgagcgaggacaacgagctgtacagaaaggactgcaacctggccgcccagctgctgcagtgcagccagacctacggcagagtgcacaaggtgagcgagctgcccagcgacttccaggagagagtgagcctgcacatggagaagcacggctgcagcctgcccagccccctgtgccaccccgcctacgccgacagcgtgcccacctgcgtgatcgccaaggtgctggagaagcccgaccccgccagcctgagcagcagactgagcgacgccagcgccagagacctggccttctgcgacggcgtggagaagcccggccccagacccccctacaagggcgacatctactgcagcgacaccgccctgtactgccccgaggagagaagaagagacagaagacccagcgtggacgcccccgtgaccgacgtgggcttcctgagagcccagaacagcaccgacagcgccgccgaggaggaggaggaggccgaggccgccgccttccccgccggcttccagcacgaggccttccccagctacgccggcagcctgcccaccagcagcagctacagcagcttcagcgccaccagcgaggagaaggagcacgcccaggccagcaccctgaccgccagccagcaggccatctacctgaacagcagagacgagctgttcgacagaaagccccccgccaccacctacgagggcagccccagattcgccaaggccaccgccgccgtggccgcccccctggaggccgaggtggcccccggcttcggcagaaccatgagcccctaccccgccgagaccttcagattccccgccagccccggcccccagcaggccctgatgccccccaacctgtggagcctgagagccaagcccggcaccgccagactgcccggcgaggacatgagaggccagtggagacccctgagcgtggaggacatcggcgcctacagctaccccgtgagcgccgccggcagagccagcccctgcagcttcagcgagagatactacggcggcgccggcggcagccccggcaagaaggccgacggcagagccagccccctgtacgccagctacaaggccgacagcttcagcgagggcgacgacctgagccagggccacctggccgagccctgcttcctgagagccggcggcgacctgagcctgagccccggcagaagcgccgaccccctgcccggctacgcccccagcgagggcggcgacggcgacagactgggcgtgcagctgtgcggcaccgccagcagccccgagcccgagcagggcagcagagacagcctggagcccagcagcatggaggccagccccgagatgcaccccgccgccagactgagcccccagcaggccttccccagaaccggcggcagcggcctgagcagaaaggacagcctgaccaaggcccagctgtacggcaccctgctgaactag

SEQ ID NO: 60300 - DNA, 867 bp, Artificial Sequence
  derived and/or modified sequence
atggagaagctgagcgccctgcaggagcagaagggcgagctgagaaagagactgagctacaccacccacaagctggagaagctggagaccgagttcgacagcaccagacactacctggagatcgagctgagaagagcccaggaggagctggagaaggtgaccgagaagctgagaagaatccagagcaactacatggccctgcagagaatcaaccaggagctggaggacaagctgtacagaatgggccagcactacgaggaggagaagagagccctgagccacgagatcgtggccctgaacagccacctgctggaggccaaggtgaccatcgacaagctgagcgaggacaacgagctgtacagaaaggactgcaacctggccgcccagctgctgcagtgcagccagacctacggcagagtgcacaaggtgagcgagctgcccagcgacttccaggagagagtgagcctgcacatggagaagcacggctgcagcctgcccagccccctgtgccaccccgcctacgccgacagcgtgcccacctgcgtgatcgccaaggtgctggagaagcccgaccccgccagcctgagcagcagactgagcgacgccagcgccagagacctggccttctgcgacggcgtggagaagcccggccccagacccccctacaagggcgacatctactgcagcgacaccgccctgtactgccccgaggagagaagaagagacagaagacccagcgtggacgcccccgtgaccgacgtgggcttcctgagagcccagaacagcaccgacagcgccgccgaggaggaggaggaggccgaggccgccgccttccccgccggcttccagcacgaggccttcccctag

SEQ ID NO: 60301 - DNA, 507 bp, Artificial Sequence
  derived and/or modified sequence
atggagaagctgagcgccctgcaggagcagaagggcgagctgagaaagagactgagctacaccacccacaagctggagaagctggagaccgagttcgacagcaccagacactacctggagatcgagctgagaagagcccaggaggagctggagaaggtgaccgagaagctgagaagaatccagagcaactacatggccctgcagagaatcaaccaggagctggaggacaagctgtacagaatgggccagcactacgaggaggagaagagagccctgagccacgagatcgtggccctgaacagccacctgctggaggccaaggtgaccatcgacaagctgagcgaggacaacgagctgtacagaaaggactgcaacctggccgcccagctgctgcagtgcagccagacctacggcagagtgcacaaggtgagcgagctgcccagcgacttccaggagagagtgagcctgcacatggagaagcacggctgcagcctgcccagcccctag

SEQ ID NO: 60302 - DNA, 1782 bp, Artificial Sequence
  derived and/or modified sequence
atggagaaactgtcagccttacaggagcagaaaggggagcttcggaagcgcctgagttatacaacacacaagttggagaaactagagacagagtttgactccactcgccactatttagaaattgagctgcggcgcgcgcaggaggagctcgagaaagttacagaaaagcttcgccgaattcagagcaattacatggcactgcaacggatcaatcaggagctggaagataaactgtatagaatgggtcagcactatgaagaggagaagagggccctgtcgcatgagattgttgctctaaatagtcatctgcttgaagccaaagtaaccatcgacaagctgtcggaagataatgaactttacagaaaggactgcaatctagccgcccaactgctccagtgttctcagacctacggaagagtacacaaagtctctgagctgccatctgactttcaagagagagtgagcttacatatggagaaacacggatgctctttgccatcccctctatgtcaccccgcttatgcggacagtgtgcccacctgcgtgattgccaaggtgctcgagaagcccgatcccgctagccttagcagccgcctgtctgatgcatctgcccgtgatctggccttttgcgatggagtcgaaaagccaggccccaggcctccatacaagggcgacatctactgctcagataccgcgctgtactgtcctgaggaacgccggcgtgacagaagacccagcgtggacgcccctgtaaccgacgtgggattccttcgtgcgcaaaatagtacggattcagccgctgaagaggaggaggaggccgaggcggcagcttttccggccggttttcagcatgaagctttcccctcatacgctggatcactccccacctcctcctcatatagttcgttctccgcgacaagcgaggagaaagaacacgcacaggcatccacgctgacagcctctcaacaggccatatatctgaacagcagggacgagctgtttgatcgcaagccccctgcaacaacgtacgagggtagcccgcggtttgctaaagccaccgctgctgttgccgccccgttggaagcagaagtcgctcccggcttcggacgtaccatgtctccatatccggccgaaacatttcgcttcccagcctcccccggcccacagcaggcattgatgcctccaaacttgtggtctctacgcgccaaaccagggaccgccaggctaccaggtgaagacatgcgcgggcagtggagaccccttagcgtcgaagacattggcgcttactcctaccccgtgtccgctgctggcagagcttccccctgcagcttcagtgaacgttactatggtggggctgggggtagtcctgggaaaaaagccgacggcagagcaagcccactttacgcttcttataaggctgacagctttagcgagggggatgacctgtcacaggggcatcttgccgagccttgctttctgcgcgcaggaggggacctgagcctttctcctggtaggtctgcagatccgctgccgggctacgcccccagcgagggtggtgatggcgaccgcctcggagtccagctatgcggcacggcctcaagccccgaacccgagcagggatctagagactctctcgaaccgagcagtatggaggctagtcctgagatgcatcctgcagccaggctgtccccccagcaggctttcccacggaccggcggcagcggtttgtctaggaaggacagcttaacaaaggctcagctttatgggactcttctgaactag

SEQ ID NO: 60303 - DNA, 1782 bp, Artificial Sequence
  derived and/or modified sequence
atggaaaagctcagtgccctccaggagcaaaagggcgagctcagaaaaaggctgtcttacactacacataagctcgaaaagctggagacagagtttgacagcacgagacattacctggaaatcgagctgcggcgggctcaggaagagttagagaaagtgaccgaaaagctgagacgaattcagtcgaattatatggcactgcaaaggatcaatcaggagctggaggacaaactgtaccggatgggccagcactacgaagaggagaagagggcgctgagtcacgagatagtagccctgaacagtcatctcctcgaggccaaagtaaccattgataagttgtccgaggacaacgagctgtatcgaaaagactgcaatctggccgcgcagctcttgcagtgtagccaaacatatggccgggttcacaaggtgtctgagttgccatcagacttccaggagagagtgtcgcttcacatggaaaagcacggttgttccttgcctagccctttatgccatcccgcctacgcagactctgtgcccacttgcgtgattgccaaagtcttggagaaacccgatcccgcgtcactttcttcgcgattgtctgatgcatcagccagagatctggccttctgtgacggggtggaaaaacctggtcctcgccccccctacaaaggcgacatttactgttcggataccgcactgtactgccctgaggaaagaaggcgcgaccgaaggccctccgtggacgctccagtgacagacgtcggattcttacgtgctcagaatagtacagactcggccgctgaagaagaggaggaggctgaggctgcagcctttcccgcaggcttccagcatgaagcgtttcccagttacgccggaagtctaccaacttcctcctcctactcctcatttagcgccacaagtgaggagaaggaacacgcacaggccagcacattaacggccagtcaacaggccatctatctcaactcgagagacgagctttttgatagaaagccacctgccaccacttatgagggatctccacggttcgcaaaggcgaccgctgccgtggccgccccactagaagccgaagtcgcaccaggtttcggcaggactatgagcccttatccagcggaaactttccgattcccagcctcacccggtccacagcaagcactgatgcctccaaacctttggtccttgagagctaaaccaggaactgcccggttgcctggcgaagacatgcgagggcagtggcggcctctgtcagtggaggatattggggcttattcttatccagtgtctgccgcgggaagagcttccccatgctcattctcagagcgctactacggcggagccggcggctcgcccggaaaaaaggccgatggtcgtgctagccctctgtatgcatcatataaagccgactccttctcggaaggagacgatctgtcccagggacacctcgcagagccgtgcttcctgcgcgccggaggcgatctgtctctgtcaccagggagatctgctgatccccttccaggctatgcaccctccgagggcggagacggggaccggctgggggtgcaactgtgcggcacagcctcttcacccgaacccgaacaaggctcccgggacagtctggaaccctcgtccatggaggctagtccagagatgcatcctgccgctcgcctgagtccgcagcaggccttcccaagaaccggcggaagcggactgagccgaaaggattcactcacaaaggctcagctctatggcaccctgctgaattag

SEQ ID NO: 60304 - DNA, 867 bp, Artificial Sequence
  derived and/or modified sequence
atggagaaactctctgccctgcaggaacagaaaggggagctgcggaagcggctaagctacactacccataagttggagaagctggagaccgagttcgacagcacccgtcattacctggagatcgagctccggagagcacaagaagagttggagaaggtgacagaaaagctgaggagaatccagagcaactatatggccttacagcgcattaatcaggaacttgaagacaaactctatcgaatgggacagcattacgaggaagagaagagagctctgtctcatgagatcgtcgccctgaatagtcatctcctggaagcaaaggtgacaattgataaactctccgaggacaacgagctctaccgcaaagactgtaatctggccgcccaacttctccaatgttcccagacctatggacgggtacacaaggtgtcggagctgccgagcgactttcaggagcgggtcagcctccacatggaaaaacacggatgttccctgccttctccactctgccatcccgcctatgcagatagcgtgccaacgtgcgttatcgctaaagtgctggaaaaaccagaccccgctagcttgagctccagactgtcagacgcctctgcgagggacttagctttctgcgacggcgtggaaaaaccaggaccaaggcccccttacaaaggagatatctactgttcagacacagctctgtactgtcccgaggaacgccgtagggacagaaggccttcagtcgacgcgcctgtcactgatgtgggcttcctgcgcgcacagaactctaccgattccgctgccgaggaagaagaagaagctgaggctgccgcttttcctgctgggtttcagcatgaggctttcccatag

SEQ ID NO: 60305 - DNA, 507 bp, Artificial Sequence
  derived and/or modified sequence
atggaaaagttgtctgcgctccaagaacaaaagggagagcttcgtaagaggttgagttacactactcataagctggagaaactggaaaccgaattcgatagcacaagacattatctggagatcgagctgcgtagggcacaagaagagcttgagaaggtcacagagaagctgcgccggatccagtcgaattacatggccctccaacgtattaaccaggaactcgaagacaagttgtacaggatgggacagcactacgaggaggaaaaacgcgccctctcccacgaaatcgttgccttgaattcccacctgcttgaagccaaggtaaccatcgacaagttgtcagaagacaatgagctgtataggaaggactgcaacctagccgcgcagctgttgcagtgttctcaaacctatggccgagttcacaaggtttcagaactgccgagcgacttccaagaaagggtgtcactgcacatggagaagcacggttgttctctccccagcccctag

SEQ ID NO: 60306 - DNA, 1782 bp, Artificial Sequence
  derived and/or modified sequence
atggagaagctgagcgccctgcaggagcagaagggggagctgaggaagaggctgagctacaccacccacaagctggagaagctggagacagaatttgacagcaccaggcactacctggagattgagctgcggcgggcccaggaggagctggagaaggtgacagagaagctgcggcgcatccagagcaactacatggccctgcagaggatcaaccaggagctggaggacaagctgtacaggatgggccagcactatgaggaggagaagagggccctgagccatgagatcgtggccctgaacagccacctgctggaggccaaggtgaccatcgacaagctgtctgaagataatgagctgtacaggaaggactgcaacctggccgcccagctgctgcagtgcagccagacctacggccgggtgcacaaggtgtctgagctgcccagcgacttccaggagcgggtgtccctgcacatggagaagcacggctgcagcctgcccagccccctgtgccacccagcctatgctgacagcgtgcccacctgtgtgattgccaaggtgctggagaagccagaccctgccagcctgagcagccggctgagtgatgccagcgcccgggacctggccttctgtgatggagtggagaagccaggcccccggcccccctacaagggggacatctactgcagcgacacagccctgtactgcccagaggagcggcggcgggacagaagacccagcgtggatgcccctgtgacagatgtgggcttcctgcgggcccagaacagcacagattctgctgctgaggaggaggaggaggccgaggccgccgccttccctgctggcttccagcacgaggccttccccagctatgccggcagcctgcccaccagcagcagctacagcagcttcagcgccaccagcgaggagaaggagcacgcccaggccagcaccctgacagccagccagcaggccatctacctgaacagcagagatgagctgtttgacaggaagcccccagccaccacctatgagggcagccccaggtttgccaaggccacagctgctgtggccgcccccctggaggccgaggtggcccctggcttcggccgcaccatgagcccctacccagctgagaccttccgcttccctgccagccctggcccccagcaggccctgatgccacccaacctgtggagcctgcgggccaagccaggcacagcccggctgcccggggaggacatgaggggccagtggaggcccctgtctgtggaggacatcggggcctacagctaccctgtgtctgctgctggccgggccagcccctgcagcttcagcgagcgctactatggaggagctgggggcagccctgggaagaaggcagatggccgggccagccccctgtatgccagctacaaggctgacagcttctctgaaggagatgacctgagccagggccacctggccgagccctgcttcctgcgggccggcggggacctgagcctgagccctggccgctctgctgaccccctgcccggctacgcccccagcgagggcggagatggagaccggctgggcgtgcagctgtgtggcacagccagcagccctgagcctgagcagggcagccgggacagcctggagcccagctccatggaggccagccctgagatgcaccctgctgcccggctgagcccccagcaggccttccccaggactggaggcagcggcctgagcaggaaggacagcctgaccaaggcccagctgtatggcaccctgctgaactag

SEQ ID NO: 60307 - DNA, 867 bp, Artificial Sequence
  derived and/or modified sequence
atggagaagctgagcgccctgcaggagcagaagggggagctgaggaagaggctgagctacaccacccacaagctggagaagctggagacagaatttgacagcaccaggcactacctggagattgagctgcggcgggcccaggaggagctggagaaggtgacagagaagctgcggcgcatccagagcaactacatggccctgcagaggatcaaccaggagctggaggacaagctgtacaggatgggccagcactatgaggaggagaagagggccctgagccatgagatcgtggccctgaacagccacctgctggaggccaaggtgaccatcgacaagctgtctgaagataatgagctgtacaggaaggactgcaacctggccgcccagctgctgcagtgcagccagacctacggccgggtgcacaaggtgtctgagctgcccagcgacttccaggagcgggtgtccctgcacatggagaagcacggctgcagcctgcccagccccctgtgccacccagcctatgctgacagcgtgcccacctgtgtgattgccaaggtgctggagaagccagaccctgccagcctgagcagccggctgagtgatgccagcgcccgggacctggccttctgtgatggagtggagaagccaggcccccggcccccctacaagggggacatctactgcagcgacacagccctgtactgcccagaggagcggcggcgggacagaagacccagcgtggatgcccctgtgacagatgtgggcttcctgcgggcccagaacagcacagattctgctgctgaggaggaggaggaggccgaggccgccgccttccctgctggcttccagcacgaggccttcccctag

SEQ ID NO: 60308 - DNA, 507 bp, Artificial Sequence
  derived and/or modified sequence
atggagaagctgagcgccctgcaggagcagaagggggagctgaggaagaggctgagctacaccacccacaagctggagaagctggagacagaatttgacagcaccaggcactacctggagattgagctgcggcgggcccaggaggagctggagaaggtgacagagaagctgcggcgcatccagagcaactacatggccctgcagaggatcaaccaggagctggaggacaagctgtacaggatgggccagcactatgaggaggagaagagggccctgagccatgagatcgtggccctgaacagccacctgctggaggccaaggtgaccatcgacaagctgtctgaagataatgagctgtacaggaaggactgcaacctggccgcccagctgctgcagtgcagccagacctacggccgggtgcacaaggtgtctgagctgcccagcgacttccaggagcgggtgtccctgcacatggagaagcacggctgcagcctgcccagcccctag

SEQ ID NO: 60309 - DNA, 1782 bp, Artificial Sequence
  derived and/or modified sequence
atggagaagctgagcgccctgcaggagcagaagggcgagctgcggaaacggctgtcctataccacccataagctagaaaagctggagactgaattcgacagcaccaggcactatctggagattgagcttcggcgggctcaggaagagctcgaaaaggtgacggagaagttacgacggatccagtcaaactacatggcccttcaaaggattaaccaggaacttgaggataaactgtacaggatgggacaacactacgaagaagagaaacgggcactgagccacgaaattgtagcccttaactcccacctcctggaggcaaaagtgacaatcgacaaactgtctgaggataatgagctgtaccgaaaagattgcaacttagctgctcagctcctgcaatgtagtcagacgtacggtagagtgcataaggtgtccgagctacctagcgactttcaggaacgggtttctctgcacatggaaaagcacgggtgttctctccccagccctctctgtcatcccgcctatgctgattccgtgccaacatgcgtgatcgccaaggtgttggaaaagccggaccccgcttctctgtcctcaagactctctgatgcctcagccagggacctggccttttgtgacggcgtcgagaagcctggacctcgacccccctacaaaggggatatctactgtagcgataccgccttatactgtcccgaggagcgcagacgggatcgtagaccatccgtcgatgctccagtcacagacgtggggtttctccgcgctcagaattctacagacagtgcggctgaggaagaagaggaggcagaggcagccgcattccccgccggtttccagcacgaagccttcccttcttatgccgggtctctaccaacaagctcttcctactcatccttttccgcaacttctgaggagaaggaacatgcccaggctagcacattgacagcttcacagcaagccatttatctgaacagccgcgacgagctgtttgaccgcaaacccccggccacaacgtacgaggggtcaccaagatttgccaaagccaccgccgcagtcgcggcccctctcgaggcggaagtggcgcccggctttggcaggaccatgtccccctatccagccgaaactttccgcttccccgctagccccggaccacagcaggcacttatgcctccaaacctatggtctctgcgagccaagccgggcactgcacggcttccaggagaggatatgcgggggcagtggagacccctgtctgtggaggacattggggcctatagctaccctgtcagtgccgctggcagagcaagcccatgttccttcagcgagagatattatggcggcgcgggcgggtcaccaggtaagaaggctgacgggagagctagccccctttatgcaagctacaaggcggacagtttctctgaaggggatgatctgtcccaaggtcaccttgccgaaccgtgctttctccgagccggcggagatctgtcactctctcccgggaggagcgcagatcccttacccggctatgctcccagtgaaggcggtgatggtgatagattgggcgtccagttatgcggcaccgccagttctcccgaacccgaacagggcagccgcgacagtttagagccatccagtatggaagcctctcccgaaatgcacccagcagcccgactctccccccagcaagcctttccacggaccgggggaagcgggctgtccagaaaggatagtcttaccaaagcccagctctatggcaccctgctcaactag

SEQ ID NO: 60310 - DNA, 1782 bp, Artificial Sequence
  derived and/or modified sequence
atggagaagctgagcgccctgcaggagcagaagggcgagctgcggaagcgcctcagttatactacacacaaactggaaaaactcgagactgagtttgatagtacgagacattaccttgaaattgagcttcgacgggcccaggaagagctcgagaaagtcacggaaaagctccggcgtatacagtctaattacatggcactgcagcggatcaatcaggagctggaggacaaactgtacagaatgggccagcattacgaagaggagaagcgcgcccttagtcacgagatagtcgcattgaactcacacctgctggaagctaaggtcaccatcgataagctgagtgaggacaacgagctgtataggaaagattgtaacctagccgcccagttactgcagtgttcgcagacttacggccgagtccataaggtgtccgaattaccgtctgacttccaagagcgggtctccttgcacatggagaaacatggttgctctctgcccagtcccttgtgccaccctgcgtatgccgacagtgttccaacctgtgtgatcgcaaaggtcctagaaaaacccgatcctgctagcctgtcatctaggctcagcgatgcttccgcaagagacttggctttctgcgatggcgttgagaaaccaggacctaggccgccttacaagggcgatatctactgcagcgatactgccttgtattgtcctgaggagcgtcggcgcgacagaagacctagcgtggatgccccagtcacggatgtgggcttcctccgcgcgcagaattctaccgattctgcagctgaggaagaagaggaggctgaggcagctgccttccccgcggggtttcagcacgaggcttttccttcttatgctggaagcctccctacctcgtcttcctactccagcttttccgctacctctgaggaaaaagagcatgcccaggcaagcacactgacggcctcacagcaagccatctatcttaactcaagggatgaacttttcgatcggaagccaccagcaacgacgtacgagggttcaccccgatttgcaaaggctactgcagctgtggctgctcccctagaagcggaagtagcgcctgggtttggccggaccatgagtccttatccagccgaaacctttcggttccctgcgtctcctgggcctcaacaggcactcatgcctcctaatctttggtccctccgggctaaacctggaacggctcggcttcccggggaggacatgagaggccagtggcgacccctgtctgttgaagacatcggcgcgtactcttaccctgtgtccgccgccggtcgagcatctccatgcagtttcagcgagagatactatggaggagccgggggatctcctggtaagaaggccgacggccgggccagtccgctgtatgcgtcctataaagctgacagtttttcggaaggtgatgacctcagtcaggggcacctcgccgagccttgttttctgagagccggtggggatttgtctctatctcccggcagaagtgccgaccccttgcctggatacgccccatccgaaggaggcgacggtgatcggctcggcgtgcaattgtgtggcactgctagttcgcccgaacccgagcaaggcagccgagactccctggaacctagctctatggaggcctcaccagaaatgcatcccgctgccagactttccccccagcaagccttcccccgaaccggcggttctgggctcagccggaaagactccctgactaaagctcagctgtatggcactcttttaaactag

SEQ ID NO: 60311 - DNA, 867 bp, Artificial Sequence
  derived and/or modified sequence
atggagaagctgagcgccctgcaggagcagaagggcgagctgcggaaaagactttcctatacaacccacaaactagaaaaactagagaccgagttcgactctactcgtcactacctcgaaatagaattaagaagagcccaagaagagcttgaaaaggttacagagaagctgaggagaattcagtctaattacatggccctacagcgtattaaccaagagttggaggataaattgtatcgtatgggtcagcactatgaggaggagaagcgggctttaagccacgagatcgtcgccttgaattcacacttgctggaagcgaaggtaacaatcgacaagctatcagaggataatgaactatatcggaaggattgcaatctggccgctcaactgctgcaatgtagtcaaacttatggcagagttcacaaggtctcagagttaccatccgattttcaggagcgggtgtccctgcacatggaaaagcacggatgctccctgccttccccactgtgtcacccggcctacgctgacagtgtgccaacctgtgtaatcgccaaagtgctggaaaaaccagaccccgcttctctcagttcccgtctctcagacgcatcagctcgggacctggccttttgtgatggcgtggaaaagcccggcccccgccctccttacaaaggtgacatttactgtagcgacaccgccctttactgtcccgaagaacggcggcgagatcgtcgtccttccgtggacgcaccggtaaccgacgttgggttcttacgagcacagaacagtacagatagcgcggccgaggaagaggaagaagcagaggcagcagcctttcctgctggctttcagcacgaagcgttcccttag

SEQ ID NO: 60312 - DNA, 507 bp, Artificial Sequence
  derived and/or modified sequence
atggagaagctgagcgccctgcaggagcagaagggcgagctgcggaaacgcctaagttatacaacgcacaaattggaaaagctagaaaccgagttcgactctacacgccattacctggaaatcgagctcagacgggcgcaggaagagctggagaaagtgactgagaagttaagacgtatccaatcaaattacatggcactacaacgaataaatcaggagctagaggataaactgtatcgaatgggccaacattatgaagaagaaaagcgcgccctgtcccatgagattgtagctctcaactcacacctgctcgaagctaaggttactatagacaagctgtcagaggataacgagctgtatcgtaaagattgcaacttggccgcgcagctgctgcagtgtagccagacatatggaagagtacacaaggttagtgaattaccctccgatttccaggagagggtcagcctgcatatggagaaacacggctgctccttgcccagcccctag

SEQ ID NO: 60313 - DNA, 1782 bp, Artificial Sequence
  derived and/or modified sequence
atggaaaaactgagcgccctccaggagcagaaaggggaattaaggaagcgtctgtcctacacaactcacaaactggagaagttggaaactgagtttgactccactcggcactatctggagattgagttgagaagggcgcaggaggaactcgagaaggtaacagaaaaattgcggaggatccaaagtaattacatggctcttcagaggattaaccaggaactagaagataagctgtacagaatgggacaacattatgaagaggagaaaagggccctgtctcacgagattgtggcacttaactctcaccttctggaagctaaagtgactatcgacaagttgagcgaggataatgaattgtatcgaaaagattgcaacctggctgctcagctgctgcaatgctcccagacctacggaagagttcacaaggtatcggagctgccaagcgattttcaagaacgggtgtcactacacatggagaagcatgggtgcagcttgccatctcctctttgtcatccagcctacgcagacagtgtccctacctgtgttatcgcaaaggtgctcgagaaaccagatccagcttcccttagttccaggctgagtgacgcttctgctcgtgatctggcattctgcgacggtgtcgagaagcccggacccagacccccatataaaggcgacatctactgcagcgacactgccctgtactgcccagaggagcggaggagagatcgcaggccgagcgtcgacgctcctgtgaccgatgtcggcttcctgcgtgctcagaattctactgatagtgcagctgaggaggaggaggaagcagaggctgctgcttttcccgcaggtttccagcacgaagcattcccctcatacgctggttccctccctacaagtagctcctattcgagtttctccgcaacttctgaagagaaagagcacgcacaagctagcaccttaactgcctcacagcaggccatctatctaaactcacgcgacgagctgttcgacagaaaaccacccgcaacgacctatgaaggctctcccagattcgccaaggccactgcagccgtggccgcacccttggaagcggaagttgctcccggatttggacgaactatgtccccctatcctgcggagactttcagatttcctgccagtccagggccacagcaagctctgatgcccccaaatctgtggagtctgagggccaaacctggaacagcaagactcccgggtgaagatatgaggggccagtggcgcccattgagcgtggaagacatcggcgcttactcatatccagtttcggcggctggtcgtgcctccccgtgttcatttagcgaaagatattacggcggagcaggcggtagccccggaaagaaggccgatggaagggcttcgcctctatatgctagctataaggcggacagcttcagtgagggggatgacctgagtcaggggcacttggcggaaccctgttttctgcgggctggcggagatttatccctctctccaggacggtcggccgaccccctgccaggctacgcgccttctgaaggcggagacggggatcgactcggtgtgcagctctgcggcaccgcttccagccctgagccggagcagggatcccgtgattcccttgagccctcgtccatggaggcaagtccagagatgcaccccgctgccaggttaagccctcagcaagctttcccaaggactgggggtagcggtctgtccagaaaggactctctgacaaaagcacagttgtacggaacattactgaactag

SEQ ID NO: 60314 - DNA, 1782 bp, Artificial Sequence
  derived and/or modified sequence
atggagaagctgtccgcccttcaggagcagaagggggagttacggaaaagactctcatacactacgcacaagttggagaaactggaaaccgagtttgattctacaaggcattatctcgagatagaactgaggagagcccaggaggaactcgagaaggtgaccgagaagctgcgcaggattcagtccaattatatggctctacaaagaattaaccaagaattggaagacaagctgtaccgcatgggacagcactacgaagaggaaaagcgagcgctgtcccacgaaatagttgctttgaactcacacttacttgaagcaaaggtgactatcgacaagctgtctgaagataacgaactgtataggaaagactgcaacctggcggctcagctgcttcaatgctcccagacctacggcagggtccacaaggtgagcgaacttccatctgattttcaagagcgggtgtctttgcacatggagaagcacggatgttctctgccttctcccttgtgccaccctgcttatgccgattctgttccaacctgcgttattgccaaggtgctggaaaaaccagaccccgcatccctttcaagcaggctaagtgacgcatctgcaagggatctggccttttgtgatggcgtggagaagcccggaccaagacctccctataagggagatatctactgctcagatacagccctttattgtccagaggagcgccgaagggacaggcgcccaagcgttgatgctcctgttactgacgtcggatttcttcgagcccagaactcaaccgacagcgctgctgaagaggaggaagaggccgaggcagccgcttttcccgctggcttccagcatgaggcttttccctcatatgcgggttccctgccaacatcttcgagctactcatcatttagtgccaccagcgaggagaaagagcatgctcaggcatctaccttgacggcttcccaacaggctatttatttgaactcccgggacgaactgtttgaccgaaaacccccagccaccacatatgagggatctcctaggttcgcaaaggccactgcggctgtggccgcacccctcgaggccgaagttgcaccaggattcggcagaactatgtcaccctacccggctgagaccttcaggttccccgcttcccccggacctcaacaagccttgatgcctccaaacctgtggagcttacgggctaagccaggcacagccaggctccccggagaggacatgaggggtcaatggcgccctctttcagtggaagacatcggagcttactcgtatccagtgagtgcagcagggcgagcgagtccctgctccttcagtgaacgctattatggcggagctggtggatctcctggcaagaaagccgacggccgtgcttctcccctttatgccagttacaaagctgactctttcagtgaaggtgacgatctgtctcaaggacatctggccgagccttgtttcttgagagccggtggagacctcagcctctccccaggcagatcagcagaccccctgcccggttatgccccttcagaaggcggtgacggggacaggctgggcgtccagttgtgcggtacggctagctccccagagcccgagcagggaagtcgcgattccctcgagccaagttcaatggaagccagtccagaaatgcatcccgctgctagactctcccctcagcaggcgttccccagaacaggtggatccgggctcagccgcaaggacagcctgacaaaggcacagctttatggcactttgcttaactag

SEQ ID NO: 60315 - DNA, 867 bp, Artificial Sequence
  derived and/or modified sequence
atggagaagttgtcggccttacaggaacagaaaggggagctgcgaaagcgcttgtcatatactacacacaagctagagaagttagagacggagtttgattcaacccgtcattacctcgaaattgaactgagaagggcccaggaagaactcgagaaagttaccgaaaaattgcggcgtattcagtctaactacatggctctccagcgcatcaatcaagaacttgaggataaactgtataggatgggacagcattacgaggaggaaaagcgggctttgtcccatgaaatagtggcccttaactctcacctgttggaggctaaggtgacaatcgacaagctgagtgaggataatgaactttaccgcaaggactgtaacttagctgctcaactgctacagtgtagtcagacttatgggagagtccataaagtgtccgagctcccaagcgacttccaggagagagtgagtcttcatatggaaaaacacggctgctccttgcccagcccactgtgtcaccccgcttacgccgactctgtccctacttgtgtcattgccaaagtcctagagaaacctgatccggcttccttatcaagcagattaagcgatgcatccgccagagacttggccttttgtgatggtgtggagaagccaggcccacggccaccgtacaaaggggacatctattgttctgatactgcactctattgcccagaggaacgacgaagagacagaaggccctctgtcgatgcccctgtgacagatgtcggttttctgcgggcacagaactctacagacagcgccgcagaagaggaagaagaagccgaggccgcagcctttccagccggattccaacatgaggctttcccctag

SEQ ID NO: 60316 - DNA, 507 bp, Artificial Sequence
  derived and/or modified sequence
atggagaagctgtccgctctgcaggaacagaagggcgaactgaggaagcgtcttagctatacaacccacaagcttgagaagcttgaaaccgagtttgatagtactcgccactacctagagattgagttgcgcagggcacaagaggaactcgagaaagttactgagaagcttcgcaggattcagtcaaattacatggcactgcagaggattaatcaggagttggaggataagctctaccgcatgggccagcactacgaggaggagaagcgcgctctgtcacatgaaatcgtggcactgaactcccatctcctggaggccaaagtgacaattgataagctctcagaggataacgagctgtaccggaaggattgtaacctggctgcccagctgctccagtgcagccagacatatggcagggttcataaggtgagcgaactgccaagcgatttccaggagcgggtgagtctccacatggaaaagcatggctgcagcctaccatccccctag

SEQ ID NO: 60317 - protein, 359 aa, Artificial Sequence
  derived and/or modified sequence
MAGHLASDFAFSPPPGGGGDGPWGAEPGWVDPLTWLSFQGPPGGPGIGPGVGPGSEVWGIPPCPPPYELCGGMAYCGPQVGVGLVPQGGLETSQPESEAGVGVESNSNGASPEPCTVPPGAVKLEKEKLEQNPEKSQDIKALQKELEQFAKLLKQKRITLGYTQADVGLILGVLFGKVFSQKTICRFEALQLSFKNMCKLRPLLQKWVEEADNNENLQEICKAETLMQARKRKRTSIENRVRGNLENLFLQCPKPTLQISHIAQQLGLEKDVVRVWFCNRRQKGKRSSSDYAQREDFEAAGSPFSGGPVSFPPAPGPHFGTPGYGSPHFTALYSSVPFPEGEVFPPVSVITLGSPMHSN

SEQ ID NO: 60318 - DNA, 1080 bp, Artificial Sequence
  derived and/or modified sequence
atggccggccacctggccagcgacttcgccttcagccccccccccggcggcggcggcgacggcccctggggcgccgagcccggctgggtggaccccctgacctggctgagcttccagggcccccccggcggccccggcatcggccccggcgtgggccccggcagcgaggtgtggggcatccccccctgcccccccccctacgagctgtgcggcggcatggcctactgcggcccccaggtgggcgtgggcctggtgccccagggcggcctggagaccagccagcccgagagcgaggccggcgtgggcgtggagagcaacagcaacggcgccagccccgagccctgcaccgtgccccccggcgccgtgaagctggagaaggagaagctggagcagaaccccgagaagagccaggacatcaaggccctgcagaaggagctggagcagttcgccaagctgctgaagcagaagagaatcaccctgggctacacccaggccgacgtgggcctgatcctgggcgtgctgttcggcaaggtgttcagccagaagaccatctgcagattcgaggccctgcagctgagcttcaagaacatgtgcaagctgagacccctgctgcagaagtgggtggaggaggccgacaacaacgagaacctgcaggagatctgcaaggccgagaccctgatgcaggccagaaagagaaagagaaccagcatcgagaacagagtgagaggcaacctggagaacctgttcctgcagtgccccaagcccaccctgcagatcagccacatcgcccagcagctgggcctggagaaggacgtggtgagagtgtggttctgcaacagaagacagaagggcaagagaagcagcagcgactacgcccagagagaggacttcgaggccgccggcagccccttcagcggcggccccgtgagcttcccccccgcccccggcccccacttcggcacccccggctacggcagcccccacttcaccgccctgtacagcagcgtgcccttccccgagggcgaggtgttcccccccgtgagcgtgatcaccctgggcagccccatgcacagcaactag

SEQ ID NO: 60319 - DNA, 1080 bp, Artificial Sequence
  derived and/or modified sequence
atggctggccatcttgccagcgatttcgcattcagtccgccccccggcgggggaggagacggaccctggggagcagaaccaggatgggtagacccacttacatggttaagcttccaaggcccaccaggtggacccggaatcggcccaggagtcggcccaggctccgaagtgtggggaatacctccttgtccccctccgtatgagctgtgtggaggaatggcatattgtggcccccaagtgggtgtgggtctcgtcccccaaggcggcttggaaacctcacaacctgagtccgaggccggcgttggtgtggagtctaactctaatggagcttcccccgagccctgcaccgtgccccctggagccgtgaaattggagaaggagaagctggaacagaaccctgaaaagtctcaggatataaaagctctgcaaaaggagcttgaacaattcgcaaagctgttaaaacaaaagagaattacactggggtatacccaggcggatgttggacttatcttgggcgtcttgtttggcaaggtttttagccagaaaactatatgccgcttcgaggcattgcagctcagtttcaaaaatatgtgtaagctgcggccccttctgcagaagtgggtggaggaggcggacaataatgaaaacctgcaggagatctgtaaggctgaaactctgatgcaggccaggaaaagaaagcgcacaagcattgaaaatcgggtacgaggaaacttggaaaatcttttcctgcaatgccctaagccgactcttcagataagccatattgcccagcaacttggtctggaaaaggatgtggtccgggtctggttttgcaacaggaggcagaagggaaagcggagctccagtgattacgcacagagagaggacttcgaggctgcaggatcacctttttctggggggccagtgtccttccctcccgcgccaggcccgcattttgggacacccggctatggctccccccacttcactgcactgtatagctccgttccattccccgaaggggaggtgtttccgcctgtatctgttataacactcggctcacccatgcattcgaattag

SEQ ID NO: 60320 - DNA, 1080 bp, Artificial Sequence
  derived and/or modified sequence
atggcgggccacttagccagcgactttgcttttagccctccacccggcggaggtggtgatgggccttggggcgctgaacctggttgggtcgatccattaacctggttaagttttcagggaccacccggcggacctggaatcggccccggggtcggtcccggatctgaagtgtggggaatcccaccttgtcctcctccgtatgagctatgtggaggcatggcctactgtggccctcaggttggtgtgggcttagtacctcaaggcggtctggagacttcccaacctgagagcgaggccggagttggggtagaaagtaatagcaacggcgccagcccagagccttgtactgttcctcccggtgctgtcaagttggagaaagagaaactggagcagaatccagagaagtcccaagacatcaaagcgcttcagaaggagctagagcagtttgccaagctactgaagcaaaagagaatcactcttggttacacacaagctgatgtggggttgattttgggcgtgctatttgggaaagtgttttctcagaagaccatttgccgatttgaggccctgcagctgtctttcaaaaatatgtgcaagctgcggccactgcttcagaaatgggtcgaggaggcagataacaatgagaacctgcaagagatttgtaaagcagaaaccctgatgcaggccagaaaacggaagaggacttctattgagaacagggtacgcggaaatctcgaaaacctgttcttgcagtgtcccaagcctaccctgcagatatcacatatagcgcagcagctcggcctagagaaggatgttgtgcgagtctggttttgcaaccgcaggcagaaagggaagcggagctcttcagattacgcacagcgcgaagactttgaggccgctgggagcccgttttcgggcggacccgtgagcttcccccccgccccgggccctcatttcgggactcctgggtacggctccccacacttcaccgccttgtactcctctgtgccatttccagagggggaagtcttcccccccgtatccgtgataactctcggtagccccatgcactctaattag

SEQ ID NO: 60321 - DNA, 1080 bp, Artificial Sequence
  derived and/or modified sequence
atggccggccacctggccagtgactttgccttcagccccccacctgggggcggcggagatggcccctggggcgctgagcccggctgggtggaccccctgacctggctgtccttccagggccccccaggcggccctggcatcggccctggggtgggccctggcagcgaggtgtggggcatccccccctgccccccaccctatgagctgtgtggcggcatggcctactgcggcccccaggtgggcgtgggcctggtgccccagggcggcctggagaccagccagcctgagagcgaggccggcgtgggcgtggagagcaacagcaatggagccagccctgagccctgcaccgtgcccccaggagctgtgaagctggagaaggagaagctggagcagaaccctgagaagagccaggacatcaaggccctgcagaaggagctggagcagtttgccaagctgctgaagcagaagaggatcaccctgggctacacccaggctgatgtgggcctcatcctgggcgtgctgtttgggaaggtgttcagccagaagaccatctgccgctttgaggccctgcagctgtccttcaagaacatgtgcaagctgcggcccctgctgcagaagtgggtggaggaggccgacaacaatgaaaacctgcaggagatctgcaaggccgagaccctgatgcaggccaggaagaggaagaggaccagcattgagaacagagtgcggggcaacctggagaacctcttcctgcagtgccccaagcccaccctgcagatcagccacatcgcccagcagctgggcctggagaaggatgtggtgcgggtgtggttctgcaacagacggcagaagggcaagaggagcagcagtgactatgcccagagagaagattttgaagctgctggcagccccttcagcggcggccctgtgtccttccccccagcccctggcccccacttcggcaccccaggctacggcagcccccacttcaccgccctgtacagctctgtgcccttccctgagggggaggtgtttcctcctgtgtctgtcatcaccctgggcagccccatgcacagcaactag

SEQ ID NO: 60322 - DNA, 234 bp, Artificial Sequence
  derived and/or modified sequence
atggtgcgggagctgtggatgtggaacgtggaggaggaggagcacgaggtaggtatcagtacatggggcgggcagcactgtgggtgcccagccaaatccttacctggtccccaccctggaggagtatccgcgcctcaatctgcctcacaactcatggtgaaactcttggtatggcagaaatctgtgcacaaactgcggaagaacagaaatgcgtacagttgtggaccgctgtag

SEQ ID NO: 60323 - DNA, 1080 bp, Artificial Sequence
  derived and/or modified sequence
atggccggccacctggccagcgacttcgccttcagccccccccccggaggcggcggggacgggccgtggggggccgaacctggatgggtggacccattaacttggcttagcttccagggccccccaggtggccctggcatcggacctggcgttggaccaggctctgaagtgtggggtatcccaccgtgtccacccccgtatgagctgtgcggtggcatggcatactgcggtccgcaggtgggggttggcctggtgcctcaaggcgggctcgagacaagccagccggaaagcgaagccggagtcggcgttgaatccaattcaaacggggcatctcctgagccctgcactgtgccccccggcgcggtgaagttggaaaaggaaaagctcgagcagaatcccgaaaagagccaggacataaaagctcttcagaaggagctggaacagttcgcaaagttactgaaacagaagagaattactctgggctacacccaggctgatgtaggtttgatcctgggcgtgctcttcggcaaagtatttagtcagaagacaatttgcagattcgaggctctgcagctgtcatttaagaacatgtgtaagctgagaccgttgctacaaaagtgggttgaagaagcggacaacaacgagaatctccaggagatatgcaaagctgaaaccttgatgcaagcccgcaaacggaagagaacttcgatcgagaaccgggtgcggggaaacctagaaaaccttttcttgcagtgtccaaagcctaccctgcagatatcccacattgcgcagcagctgggcctggagaaagatgtagttagagtgtggttttgtaatagaaggcagaagggtaagcggagttctagtgactatgctcaaagggaggattttgaagccgctggctcaccattttccggcggacccgtgtcgttcccccccgctcctggcccccattttggtacgccaggctacggtagccctcatttcacagctctgtattcctctgtgcccttccccgagggcgaggtctttccaccagtgagtgtgatcacccttggtagtccaatgcactcgaattag

SEQ ID NO: 60324 - DNA, 1080 bp, Artificial Sequence
  derived and/or modified sequence
atggccggccacctggccagcgacttcgccttcagccccccccccgggggagggggagacggcccctggggggctgagcctgggtgggtggacccactcacgtggctgtcgtttcaggggccacccggaggccctggcataggacccggtgtgggacctggttctgaagtttgggggatccctccttgcccaccgccctatgagctttgcggcggtatggcctactgtgggcctcaggtgggggtgggccttgtacctcaagggggcctggagacaagccagccagaatccgaagccggagtgggtgtggaatctaacagtaacggcgcttctcccgagccatgcactgtcccccccggcgccgtgaagcttgagaaagagaagctggagcagaatccggagaaatcgcaggacatcaaggctctgcagaaggaactggaacaattcgcaaagttactgaaacaaaaaaggattactctcgggtacacccaggcagacgtgggcttgattctcggggttctgttcggaaaggtgttctcacagaaaaccatctgtaggtttgaggctctccagttgtccttcaaaaatatgtgcaagctgcggccactgttgcaaaagtgggttgaggaggccgacaataatgaaaatctgcaggagatttgtaaggctgaaactctgatgcaggcgcgtaagcgcaaacggacctccattgagaatcgtgtgcggggtaaccttgaaaatctgttcctacaatgccccaagcccaccttgcagattagccacattgcacagcagctggggctagaaaaagacgtggtccgcgtgtggttttgcaacaggcgccagaaaggaaagcggtcctcttcagactatgcccagagggaggatttcgaggccgctggcagccccttctctggggggccagtgagttttcctcccgcaccaggtccccactttggcacccccgggtacggatcaccgcattttaccgctctgtactccagtgtacctttccctgagggcgaagtgttcccacctgtatccgttattacgctggggagtcccatgcactcaaattag

SEQ ID NO: 60325 - DNA, 1080 bp, Artificial Sequence
  derived and/or modified sequence
atggccggtcatcttgctagtgattttgcctttagcccgcctcccggaggcggtggcgacgggccttggggtgccgagccaggttgggtcgaccccctgacatggctgagcttccagggacctccaggcggtcctgggatcgggccaggggtgggacccggttccgaagtgtggggaatccctccgtgtccccctccttatgagttatgcggcggtatggcttattgcggccctcaggttggcgttggactagttccacaggggggactcgaaacctcacaacccgagtctgaagcaggagtgggggtcgaaagcaacagcaatggcgcttctcctgagccatgcactgttccccctggggctgttaagctagagaaggagaagcttgaacaaaacccagaaaagagccaagatattaaagctctgcagaaagagttagaacagttcgccaaactgctcaagcagaaacgtatcactttgggctacacacaagccgatgttggactgattctgggggtacttttcggaaaagtcttttctcagaagacaatttgtaggtttgaagctttacaattgagctttaaaaatatgtgtaaactgcgcccacttctgcagaaatgggtcgaagaggccgataacaacgagaacttgcaagaaatttgcaaagctgaaaccctgatgcaggccagaaaacgcaagcgcacaagtatagaaaatagggtgcggggtaacctggaaaatctgtttctgcaatgtcccaaaccgactcttcagatctcacatatcgcacagcagctcgggttagaaaaggacgtggtccgagtttggttctgcaaccggaggcagaaaggcaaacgttcctccagcgactatgctcagcgcgaggacttcgaagcagcgggttcccccttttccggcggacctgtctcttttcctcctgctcccggtccacatttcggtacccccggatatggatccccccattttaccgcactttactcaagtgtacccttcccagagggtgaagtgtttccaccagtgagtgtgatcacattggggtcccctatgcatagcaactag

SEQ ID NO: 60326 - DNA, 1080 bp, Artificial Sequence
  derived and/or modified sequence
atggcagggcacctggcaagtgatttcgctttttcacccccaccgggagggggaggtgacggcccttggggcgctgagcccggatgggtcgacccacttacctggcttagcttccagggacctccgggaggaccgggtatcggacctggggttggccctggtagcgaggtgtgggggataccaccctgccccccaccgtatgagctctgtggcggaatggcatattgtgggccacaggtgggcgtcggcctagtcccccaaggcggattggaaacgagccaacctgagagcgaagcaggcgtcggtgtggagtcaaattccaacggggcaagccctgagccttgtaccgttcccccaggggcagttaagttagagaaggaaaagctagagcaaaatccagagaagtcacaagacatcaaagcgcttcagaaggagctagaacagttcgcgaaattgctgaaacaaaaacgaatcacgctcggctatacacaagccgacgtgggcctgatcctgggcgtgctgttcgggaaggttttcagtcagaaaaccatctgtaggttcgaagctttgcagttgagtttcaaaaacatgtgcaaattaagaccattattgcagaaatgggtggaagaagccgataataatgaaaaccttcaggagatttgcaaggctgagacattgatgcaggcgaggaagaggaaacgaaccagcattgagaacagagtgcgtgggaatctcgagaacctgttcctgcagtgcccaaaacctactctgcagatatcacacatagcacagcagctgggactggaaaaagatgtagtgagggtttggttttgtaacagaaggcaaaaaggtaagcggagttctagcgattatgcgcaaagggaagattttgaagccgcaggtagccccttcagcggaggtccagtgtccttccccccagcgcctggacctcacttcgggacacccggttacggcagcccccactttactgccctgtattcatctgtgcccttcccagaaggcgaagtctttccacctgtcagcgtgattacactcggctcgcccatgcacagcaactag

SEQ ID NO: 60327 - DNA, 1583 bp, Artificial Sequence
  derived and/or modified sequence
aacatttccaaatcttggcattcttatccacaaagtgaagataataattgtcaattcacaggtgattatgatttaaagagattacttttgaagagttcctaacacattcagtcaacatttaatgatgcttcaggcactgtgttcattgctagtgagcgtatgacacacacagccatacggtcacagagctttcaatgaaaagtaacataattgctcatttcaccaggcccccggcttggggcgccttccttccccatggcgggacacctggcttcggatttcgccttctcgccccctccaggcggtgggggtgatgggccatggggggcggagccgggctgggttgatcctctgacctggctaagcttccaaggccctcctggagggccaggaatcgggccgggggttgggccaggctctgaggtgtgggggattcccccttgccccccgccgtatgagttatgtggggggatggcgtactgtgggcctcaggttggagtggggctagtgccccaaggcggcttggagacctctcagcctgagagcgaagcaggagtcggggtggagagcaactccaatggggcctccccggaaccctgcaccgtcccccctggtgccgtgaagctggagaaggagaagctagagcaaaacccggagaagtcccaggacatcaaagctctgcagaaagaactcgagcaatttgccaagctcctgaagcagaagaggatcaccctgggatatacacaggccgatgtggggctcatcctgggggttctatttgggaaggtgttcagccaaaagaccatctgccgctttgaggctctgcagcttagcttcaagaacatgtgtaagctgcggcccttgctgcagaagtgggtggaggaagctgacaacaatgaaaatcttcaggagatatgcaaagcagaaaccctcatgcaggcccgaaagagaaagcgaaccagtatcgagaaccgagtgagaggcaacctggagaatttgttcctgcagtgcccgaaacccacactgcagatcagccacatcgcccagcagcttgggctcgagaaggatgtggtccgagtgtggttctgtaaccggcgccagaagggcaagcgatcaagcagcgactatgcacaacgagaggattttgaggctgctgggtctcctttctcagggggaccagtgtcctttcctccggccccagggccccattttggtaccccaggctatgggagccctcacttcactgcactgtactcctcagtccctttccctgagggggaagtctttcccccagtctccgtcatcactctgggctctcccatgcattcaaactgaggtgcctgcccttctaggaatggggaacaggggaggggaggagctagggaaagagaacctggagtttgtggcagggcttttgggattaagttcttcattcactaaggaaggaattgggaacactaagggtgggggcaggggagtttggggcaactggttggagggaaggtgaagttcaatgatgctcttgattttaatcccacatcatgtatcacttttttcttaaataaagaagcctgggacacagt

SEQ ID NO: 60328 - DNA, 5357 bp, Artificial Sequence
  derived and/or modified sequence
aactggcagcatggcatgatggaaatggaatagaatcaggaattgttttgtacctgtgtgtgtgtgactttggtgttctgactcagacacatatttgagaggtagagaggggagaagagggttgccacattatgtaacagaaaggagcccactgcttaaacacttaccttgtgccagacattgcactaggactttattacctgcaacccatcctgcaaaactgtgaagatttgatatgatcattctcattttatggttgagaaacaagggttaaggacattaaaaatttactcaatgtttaaacatttgcctgtcttattctaaagccccttctcttttcacaatccctttaagaaatggacatccaatatttgagtggcagaggcaaaaacatggcctaccagaaccattatgatagctttacaatatgcccaccaattatttgatagtcctcctgccaaatggtgaaggctaattaccctcctacagaatgtgactcacttctaatgaataaaatatggcacaagtaaaagtgtgcgatttcagagactaggtcataaagaacgcagtggcttcttccctgctctctctttcttaggtcattctctctgggtgaatccagctgacatgttgtgaggacactcaagcagctttatggaaaagcccacatggtgagcaactgaggcctcctaccaacagccaacaagaaaccggggcctttgccaacagccaagaaataagaatcagaaagaaggacacaccattccatagcacagaacacaagtagatggctcccatgaagaatctagcatcatggtatggcagaagcagaatggactcaggaatcatggtgcctacactggaatttcagatcggccactgacacaatggacacattattcaacatttccaaatcttggcattcttatccacaaagtgaagataataattgtcaattcacaggtgattatgatttaaagagattacttttgaagagttcctaacacattcagtcaacatttaatgatgcttcaggcactgtgttcattgctagtgagcgtatgacacacacagccatacggtcacagagctttcaatgaaaagtaacataattgctcatttcaccaggcccccggcttggggcgccttccttccccatggcgggacacctggcttcggatttcgccttctcgccccctccaggcggtgggggtgatgggccatggggggcggagccgggctgggttgatcctctgacctggctaagcttccaaggccctcctggagggccaggaatcgggccgggggttgggccaggctctgaggtgtgggggattcccccttgccccccgccgtatgagttatgtggggggatggcgtactgtgggcctcaggttggagtggggctagtgccccaaggcggcttggagacctctcagcctgagagcgaagcaggagtcggggtggagagcaactccaatggggcctccccggaaccctgcaccgtcccccctggtgccgtgaagctggagaaggagaagctagagcaaaacccggagaagtcccaggacatcaaagctctgcagaaagaactcgagcaatttgccaagctcctgaagcagaagaggatcaccctgggatatacacaggccgatgtggggctcatcctgggggttctatttgggaaggtgttcagccaaaagaccatctgccgctttgaggctctgcagcttagcttcaagaacatgtgtaagctgcggcccttgctgcagaagtgggtggaggaagctgacaacaatgaaaatcttcaggagatatgcaaagcagaaaccctcatgcaggcccgaaagagaaagcgaaccagtatcgagaaccgagtgagaggcaacctggagaatttgttcctgcagtgcccgaaacccacactgcagatcagccacatcgcccagcagcttgggctcgagaaggatgtggtccgagtgtggttctgtaaccggcgccagaagggcaagcgatcaagcagcgactatgcacaacgagaggattttgaggctgctgggtctcctttctcagggggaccagtgtcctttcctccggccccagggccccattttggtaccccaggctatgggagccctcacttcactgcactgtactcctcagtccctttccctgagggggaagtctttcccccagtctccgtcatcactctgggctctcccatgcattcaaactgaggtgcctgcccttctaggaatggggaacaggggaggggaggagctagggaaagagaacctggagtttgtggcagggcttttgggattaagttcttcattcactaaggaaggaattgggaacactaagggtgggggcaggggagtttggggcaactggttggagggaaggtgaagttcaatgatgctcttgattttaatcccacatcatgtatcacttttttcttaaataaagaagcctgggacacagtaaaaaaaaaaaaaaaagaaagaaaagaaaagtaacataattgagtaataattttttaagtgtggtaaaatgtgtggcacgtagtaggtattcaataaatacttgcttttttcctcctttttaccttttcctagagtgctacttgatggtagctgtagtttttcttcaagacatcctatttgtcctgatacaaaacctcttttgaccgctaacggcatagttcggccctcaccattccctcacatattccacaaaaatgtgagcattaaccattccccatgatacagataattcattttttaatttaattttttaaaattttatttatttacttatttattttgagaccaggttatgagactggctaatttttgtatttttggtggagatggggttttgccatattgtctaggctggtctcaaactcctgagctcaagggatcctcctgcctgggcctcccaaagtactgggattacaggcatgagccattgcacctggcccggataattttttttctttttttgaggtagtgccttcctttatagctcaggctggagtgcagtggtgtgatctcggctcactgcaacctctgcctcccaggttcaagtaattctcctgcctcaacctcctgagtagctgggattacaggcgcccactaccacgcccggctaatttttgtatttttagtagagatggggtttcaccatgttggccaggctggtctcgaactcttgacctcaggtgatctgcctgccttggcctcccaaagtattgggattgtaggcgtgaaccaccacgcccggccctgaaaattcatttttaaaagaacatcatatctaccttaaatgcattaagatttcacattagactcattattcatagtgaacattaggaacttaagtccactcagtaataatgcacctattcatgactcttgattcaaagatgtgcacctatttaccctggaccagctccttggaaggacatgaaatagagggtaataatcacatctttccaaatttgctatgaaactgcatcgccaaaaactgagactcattttccgattgatgaatcaaatgacaacaaaatctccagggcattctgaaacccaacagggattaatgattaggcataccagtggtagttaggagacttgcccaaatttccagttttctgcagatggcatctaagttagaagactgtcataaatttattcatggcttggctttctgctatttgctcattggtgacacttttatatacaatggtgtttctatggctaggaaatcccagtggagatcaagaaacctgggttctacaaactaatggggtgacctttgattagtcctaactcccttcctaagcctcagtttctttagacatgaaatgaaagcaatggattacattgccttagactttttcctagatcgaaaatgtgataattgtgcctttccaacaataattgataccactagtgaacattctttcttaagcacatctattaaggacttcatttatattatttttctaatctttaagcaaactctgagataagtgactatgatgtttattccataggtgcaaaagatttgtcaagtaactctccaaagtaaaagagagggctggagtttagactcatgactgttctgctctaacccaagtgattctggatcccagactccccaaatgacaagttattccagaaatactcagaaaaaggagggtgccgtatgtcgcacatggaaaaatagaaaaagtaacagaatccagccaaaggattcccagaaattgaggctcttctgttcttggcatttgcatctttggatgtgtgttttttacattgctctatgcaaaaggtatgtttcaatgtgattttttttttctcctcccatcctaccactgaggaatcacagggaatagactcgacacctgtgaactcaatttaccctagaaaaatgtttcagtcacacttaaaataaaaagggcatcaattagaataagaaggacactttgttgcctaggaggactgaacttttttggacctggggcaccttatcagcttcatttttagctctagtataatcaaaaggtcaggatctccactggaccttagaaattttttatttttcgataagattttctgaatgcctgccatgtgtgaagggaaatgcctggacttctatgcatatgtatttcattgtctccccacatctacccaggaagacaggcacagtgagccttgcatgttgtagataaggaagctaagtctcaaagacagagaaggaatttctcaaggtcacactgtaagtaaaaggcaaaggagggattagaaccctggatcctctttattacaccaagcctgcctcacaaggatgccaatctctcatcacttactgggaaagacccactcctcccattcatgataaggtaatgctatccaataaaaaccccaaagcaggcataaaatatgaagtagcgaaactcaggcaggcagaaagcagagtggtttagacatggctgctgtctgcagcagggagaagttcctggcaacatgaccctgaaaataacaatgagtgactgaagctaagaaggaagaatcttccaaggactctgaaactagatattttctcaagccccacctatggacaaacacaaatcatggagaaataaagatgccagtctccaggaagcaccagagttaaattcattctggaatttaactcctggcattaacagttagctgggagattaaaacaaaccaacacacaaacacaaaaaaataatcagtggaaaaaagttaaaaaaaatcaatggacagtggtttcatagcagatggcaaagaggaatattaaaagctgtattttatttggaa

SEQ ID NO: 60329 - protein, 437 aa, Artificial Sequence
  derived and/or modified sequence
MQPAEEGPSVPKIYKQRSPYSVLKTFPSKRPALAKRYERPTLVELPHVRAPPPPPPPFAPHAAVSISSSEPPPQQFQAQSSYPPGPGRAAAAASSSSPSCTPATSQGHLRTPAQPPPASPAASSSSSFAAVVRYGPGAAAAAGTGGTGSDSASLELSAESRMILDAFAQQCSRVLSLLNCGGKLLDSNHSQSMISCVKQEGSSYNERQEHCHIGKGVHSQTSDNVDIEMQYMQRKQQTSAFLRVFTDSLQNYLLSGSFPTPNPSSASEYGHLADVDPLSTSPVHTLGGWTSPATSESHGHPSSSTLPEEEEEEDEEGYCPRCQELEQEVISLQQENEELRRKLESIPVPCQTVLDYLKMVLQHHNQLLIPQPADQPTEGSKQLLNNYPVYITSKQWDEAVNSSKKDGRRLLRYLIRFVFTTDELKYSCGLGKRKRIH

SEQ ID NO: 60330 - DNA, 1314 bp, Artificial Sequence
  derived and/or modified sequence
atgcagcccgccgaggagggccccagcgtgcccaagatctacaagcagagaagcccctacagcgtgctgaagaccttccccagcaagagacccgccctggccaagagatacgagagacccaccctggtggagctgccccacgtgagagcccccccccccccccccccccccttcgccccccacgccgccgtgagcatcagcagcagcgagccccccccccagcagttccaggcccagagcagctacccccccggccccggcagagccgccgccgccgccagcagcagcagccccagctgcacccccgccaccagccagggccacctgagaacccccgcccagcccccccccgccagccccgccgccagcagcagcagcagcttcgccgccgtggtgagatacggccccggcgccgccgccgccgccggcaccggcggcaccggcagcgacagcgccagcctggagctgagcgccgagagcagaatgatcctggacgccttcgcccagcagtgcagcagagtgctgagcctgctgaactgcggcggcaagctgctggacagcaaccacagccagagcatgatcagctgcgtgaagcaggagggcagcagctacaacgagagacaggagcactgccacatcggcaagggcgtgcacagccagaccagcgacaacgtggacatcgagatgcagtacatgcagagaaagcagcagaccagcgccttcctgagagtgttcaccgacagcctgcagaactacctgctgagcggcagcttccccacccccaaccccagcagcgccagcgagtacggccacctggccgacgtggaccccctgagcaccagccccgtgcacaccctgggcggctggaccagccccgccaccagcgagagccacggccaccccagcagcagcaccctgcccgaggaggaggaggaggaggacgaggagggctactgccccagatgccaggagctggagcaggaggtgatcagcctgcagcaggagaacgaggagctgagaagaaagctggagagcatccccgtgccctgccagaccgtgctggactacctgaagatggtgctgcagcaccacaaccagctgctgatcccccagcccgccgaccagcccaccgagggcagcaagcagctgctgaacaactaccccgtgtacatcaccagcaagcagtgggacgaggccgtgaacagcagcaagaaggacggcagaagactgctgagatacctgatcagattcgtgttcaccaccgacgagctgaagtacagctgcggcctgggcaagagaaagagaatccactag

SEQ ID NO: 60331 - DNA, 1314 bp, Artificial Sequence
  derived and/or modified sequence
atgcagccagcggaagagggacccagtgtgccgaagatctacaagcaacgatcaccgtactccgtactgaagacattcccatcgaagcggcccgcgctggcgaagcggtatgaacggcctactctggttgagctgcctcatgtgagggcaccaccaccacctccacctcctttcgcacctcacgccgcagtctctatctcatcctccgagccacctccacaacaatttcaagcccagtctagctacccacccgggcctggaagagccgcggctgccgcatcctctagtagcccatcttgtaccccagcaacttcccagggccatctgagaacacccgcccaaccaccacctgctagccccgctgcctcgtcgagctcgtcgttcgcagccgtggtgcgttacgggccaggcgccgctgcggccgctggaacaggaggcacgggttctgatagtgcaagcctagagttgtccgccgagtcgaggatgatactggacgcttttgctcaacagtgttccagagttctctccctgctcaactgtggaggaaaacttctggacagtaaccactcacagagtatgatttcatgcgtcaagcaggagggctcttcctataatgagaggcaggaacattgccacatcggcaagggcgtccatagtcagacaagtgataatgtcgacatcgagatgcaatacatgcagagaaaacagcagacctccgccttcctgcgggttttcactgactccctgcagaattatctcctttcaggaagcttccctacacctaatccctcatccgcctcggagtatggacacctggccgacgtggacccactgagcacgtcccccgtacataccctgggtggctggacgagtccagcgacatctgaatcccatggacacccgtcctcgagcacactccctgaggaagaagaggaggaagatgaggaaggatactgccccagatgtcaggagttagagcaggaagtcatctcgctgcagcaggagaacgaagaactgcgccggaaactagaatccatcccagtgccgtgtcagacagttctggactacctgaaaatggtcctgcagcaccataaccaattactgatcccacaacctgcagaccaaccaacagaaggcagtaagcaattgctcaataattacccagtctacattacatctaagcagtgggacgaggccgtgaactcttcaaagaaagatggcagaagacttctgcgttacttgattcgctttgtattcaccacagacgaactaaagtacagttgtggcctcgggaagcgtaaacgaatccattag

SEQ ID NO: 60332 - DNA, 1314 bp, Artificial Sequence
  derived and/or modified sequence
atgcagcctgctgaggagggccccagcgtgcccaagatctacaagcagaggagcccctacagcgtgctgaagaccttccccagcaagaggcctgccctggccaagagatatgagcggcccaccctggtggagctgccccacgtgcgggcccctcctcctcctcctcctccatttgcccctcatgctgctgtgtccatcagcagcagcgagcccccaccccagcagttccaggcccagagcagctacccacctggccctggccgggctgctgctgctgccagcagcagcagccccagctgcaccccagccaccagccagggccacctgcggaccccagcccagcccccaccagccagccctgctgccagcagcagcagcagctttgctgctgtggtgcgctatggccctggagctgctgctgctgctggcaccggcggcactggaagtgacagcgccagcctggagctgtctgctgagagcaggatgatcctggatgcctttgcccagcagtgcagccgggtgctgagcctgctgaactgtggcggcaagctgctggacagcaaccacagccagagcatgatcagctgtgtgaagcaggagggcagcagctacaatgaaaggcaggagcactgccacatcggcaaaggagtgcacagccagaccagtgacaacgtggacatcgagatgcagtacatgcagaggaagcagcagaccagcgccttcctgcgggtcttcacagacagcctgcagaactacctgctgagcggcagcttccccacccccaaccccagcagcgcctctgaatatggccacctggctgatgtggaccccctgagcaccagccctgtgcacaccctgggcggctggaccagccctgccaccagcgagagccacggccaccccagcagcagcaccctgcctgaggaggaggaggaggaggatgaggagggctactgcccccgctgccaggagctggagcaggaggtgatcagcctgcagcaggagaatgaggagctgcggaggaagctggagagcatccctgtgccctgccagacagtgctggactacctgaagatggtgctgcagcaccacaaccagctgctgatcccccagcctgctgaccagcccacagagggcagcaagcagctgctgaacaactaccctgtgtacatcaccagcaagcagtgggatgaagctgtgaacagcagcaagaaggatggccggcggctgctgcgctacctgatccgctttgtgttcaccacagatgagctgaagtacagctgtggcctgggcaagaggaagaggatccactag

SEQ ID NO: 60333 - DNA, 1314 bp, Artificial Sequence
  derived and/or modified sequence
atgcagcccgccgaggagggccccagcgtgcccaagatctacaagcagcggtccccttacagcgtgctgaagaccttcccttccaagaggcccgccctggcaaaaagatatgaacgccccacccttgtggaactgccacacgttagagccccaccccctcctcctccaccattcgcccctcatgcggctgttagcatcagcagcagcgaaccaccccctcagcagtttcaggcccagtcctcttatccaccaggcccaggacgggcagccgcagctgccagctcctcttcaccttcttgtactccagccaccagccaggggcacctccgcacgcccgcccaacccccacctgcttctcccgctgcatcctctagcagtagcttcgccgccgtagtcagatatgggcctggggccgccgctgcggcagggaccgggggcacagggagtgactctgcttctctcgaactgtccgccgagagtaggatgatcctggacgcctttgcccaacagtgcagtcgagttctgtccctacttaactgtggcggtaagctcctcgacagtaatcacagccagagtatgatttcttgtgtaaaacaggaaggaagtagctataatgagcgccaggagcattgtcacatcggcaagggcgtccatagccagacgagtgataacgtcgacatcgaaatgcagtatatgcagcgcaagcagcagacatcagcatttttacgcgtcttcactgatagcctgcagaattatttactttccggctcttttccgacccccaacccttcttctgcaagtgaatacggccacctggcagacgtcgatccgctctcaacatcccctgtccacactctggggggctggacttcccctgcgaccagcgagagccacgggcatccatcctcctccacgttacccgaggaagaggaggaggaggatgaagagggttattgtccccgctgccaggaactagaacaagaggttatctcactacagcaggaaaatgaggaactaaggaggaagctagagtctattcctgttccatgccaaaccgtcctggactacctcaaaatggtgctacaacatcataaccagttattgatcccccaacccgcagatcaaccaaccgagggctcgaagcagttactgaataactacccagtctacatcaccagcaagcagtgggacgaagcagttaactcatcgaagaaggatgggcgtcgactgctcagataccttatccggttcgtgttcactactgacgagttaaaatactcttgcggtcttgggaagcgtaaaaggattcactag

SEQ ID NO: 60334 - DNA, 1314 bp, Artificial Sequence
  derived and/or modified sequence
atgcagccggctgaagagggcccatccgtgccaaaaatatataagcagcgctcgccgtactcagtgctgaagaccttccccagcaagagacccgctctcgctaagcggtatgagaggccgaccctggtcgagctcccccacgtgagagcccctccccctccaccaccaccgttcgccccacacgctgctgtcagcatttctagcagtgagccccctccccaacagtttcaagcgcagtctagttatccacctggccctggcagggcagcggcagctgcatcctcttcatcaccttcctgcaccccggcaacttcacaagggcatcttcgtacacctgcacagccaccacctgcatccccagcagcttcttcttcgtctagtttcgcagctgtggttaggtacgggccaggcgcagcagctgcagccggtaccggtggaactggcagcgattcagcctctctagaacttagcgcagagtcaagaatgatcttggacgcctttgcacagcagtgctccagagttctgtccctgctgaattgcggaggcaagcttctggattcaaaccactcacagtcaatgatctcttgcgtgaagcaggaaggtagttcgtacaatgagaggcaagaacactgccatatcggaaagggggtgcactctcagacctcggataatgtggatatcgaaatgcagtacatgcagagaaagcagcagacctctgcatttctccgcgtgtttacggactcccttcagaattacctcctgtctggttcatttcctactccgaacccttcttccgcgtccgagtacgggcacctggccgatgtggatcccctgagtaccagcccggtacacactttgggaggctggacctcccccgcaacttccgaatcccacggccatcccagctcttcaactctccctgaggaagaagaggaggaagatgaggagggctactgccctagatgtcaggagctggagcaggaggtgatttctctgcaacaggaaaatgaggagctccggaggaaactggaatccattcctgtgccctgtcagacggtgctagattacctgaagatggttctccagcaccataaccagttgcttatcccccagcccgcagaccagcctactgaaggctctaaacagcttctcaataactatcccgtctacattactagtaagcagtgggacgaggccgtcaattcatccaagaaggatgggcgtcgactgctgcgttacctcattagatttgtctttaccacagatgagctgaaatactcttgtggcctcggcaagaggaaaagaattcattag

SEQ ID NO: 60335 - protein, 415 aa, Artificial Sequence
  derived and/or modified sequence
MCPQLAGAGSMGSPGATTGWGLLDYKTEKWALLAKKGYQERDLEPQFSIITKLKGVSVTQIKELGNRLWDVADFVKPPQGENVFFLVTNFLVTPAQVQGRCPEHPSVPLANCWVDEDCPEGEGGTHSHGVKTGQCVVFNGTHRTCEIWSWCPVESGVVPSRPLLAQAQNFTLFIKNTVTFSKFNFSKSNALETWDPTYFKHCRYEPQFSPYCPVFRIGDLVAKAGGTFEDLALLGGSVGIRVHWDCDLDTGDSGCWPHYSFQLQEKSYNFRTATHWWEQPGVEARTLLKLYGIRFDILVTGQAGKFGLIPTAVTLGTGAAWLGVVTFFCDLLLLYVDREAHFYWRTKYEEAKAPKATANSVWRELALASQARLAECLRRSSAPAPTATAAGSQTQTPGWPCPSSDTHLPTHSGSL

SEQ ID NO: 60336 - protein, 80 aa, Artificial Sequence
  derived and/or modified sequence
MCPQLAGAGSMGSPGATTGWGLLDYKTEKWALLAKKGYQERDLEPQFSIITKLKGVSVTQIKELGNRLWDVADFVKPPQV

SEQ ID NO: 60337 - DNA, 1248 bp, Artificial Sequence
  derived and/or modified sequence
atgtgcccccagctggccggcgccggcagcatgggcagccccggcgccaccaccggctggggcctgctggactacaagaccgagaagtgggccctgctggccaagaagggctaccaggagagagacctggagccccagttcagcatcatcaccaagctgaagggcgtgagcgtgacccagatcaaggagctgggcaacagactgtgggacgtggccgacttcgtgaagcccccccagggcgagaacgtgttcttcctggtgaccaacttcctggtgacccccgcccaggtgcagggcagatgccccgagcaccccagcgtgcccctggccaactgctgggtggacgaggactgccccgagggcgagggcggcacccacagccacggcgtgaagaccggccagtgcgtggtgttcaacggcacccacagaacctgcgagatctggagctggtgccccgtggagagcggcgtggtgcccagcagacccctgctggcccaggcccagaacttcaccctgttcatcaagaacaccgtgaccttcagcaagttcaacttcagcaagagcaacgccctggagacctgggaccccacctacttcaagcactgcagatacgagccccagttcagcccctactgccccgtgttcagaatcggcgacctggtggccaaggccggcggcaccttcgaggacctggccctgctgggcggcagcgtgggcatcagagtgcactgggactgcgacctggacaccggcgacagcggctgctggccccactacagcttccagctgcaggagaagagctacaacttcagaaccgccacccactggtgggagcagcccggcgtggaggccagaaccctgctgaagctgtacggcatcagattcgacatcctggtgaccggccaggccggcaagttcggcctgatccccaccgccgtgaccctgggcaccggcgccgcctggctgggcgtggtgaccttcttctgcgacctgctgctgctgtacgtggacagagaggcccacttctactggagaaccaagtacgaggaggccaaggcccccaaggccaccgccaacagcgtgtggagagagctggccctggccagccaggccagactggccgagtgcctgagaagaagcagcgcccccgcccccaccgccaccgccgccggcagccagacccagacccccggctggccctgccccagcagcgacacccacctgcccacccacagcggcagcctgtag

SEQ ID NO: 60338 - DNA, 213 bp, Artificial Sequence
  derived and/or modified sequence
atgggcagccccggcgccaccaccggctggggcctgctggactacaagaccgagaagtgggccctgctggccaagaagggctaccaggagagagacctggagccccagttcagcatcatcaccaagctgaagggcgtgagcgtgacccagatcaaggagctgggcaacagactgtgggacgtggccgacttcgtgaagcccccccaggtgtag

SEQ ID NO: 60339 - DNA, 243 bp, Artificial Sequence
  derived and/or modified sequence
atgtgcccccagctggccggcgccggcagcatgggcagccccggcgccaccaccggctggggcctgctggactacaagaccgagaagtgggccctgctggccaagaagggctaccaggagagagacctggagccccagttcagcatcatcaccaagctgaagggcgtgagcgtgacccagatcaaggagctgggcaacagactgtgggacgtggccgacttcgtgaagcccccccaggtgtag

SEQ ID NO: 60340 - DNA, 1167 bp, Artificial Sequence
  derived and/or modified sequence
atgtggtgggccctgctggccaagaagggctaccaggagagagacctggagccccagttcagcatcatcaccaagctgaagggcgtgagcgtgacccagatcaaggagctgggcaacagactgtgggacgtggccgacttcgtgaagcccccccagggcgagaacgtgttcttcctggtgaccaacttcctggtgacccccgcccaggtgcagggcagatgccccgagcaccccagcgtgcccctggccaactgctgggtggacgaggactgccccgagggcgagggcggcacccacagccacggcgtgaagaccggccagtgcgtggtgttcaacggcacccacagaacctgcgagatctggagctggtgccccgtggagagcggcgtggtgcccagcagacccctgctggcccaggcccagaacttcaccctgttcatcaagaacaccgtgaccttcagcaagttcaacttcagcaagagcaacgccctggagacctgggaccccacctacttcaagcactgcagatacgagccccagttcagcccctactgccccgtgttcagaatcggcgacctggtggccaaggccggcggcaccttcgaggacctggccctgctgggcggcagcgtgggcatcagagtgcactgggactgcgacctggacaccggcgacagcggctgctggccccactacagcttccagctgcaggagaagagctacaacttcagaaccgccacccactggtgggagcagcccggcgtggaggccagaaccctgctgaagctgtacggcatcagattcgacatcctggtgaccggccaggccggcaagttcggcctgatccccaccgccgtgaccctgggcaccggcgccgcctggctgggcgtggtgaccttcttctgcgacctgctgctgctgtacgtggacagagaggcccacttctactggagaaccaagtacgaggaggccaaggcccccaaggccaccgccaacagcgtgtggagagagctggccctggccagccaggccagactggccgagtgcctgagaagaagcagcgcccccgcccccaccgccaccgccgccggcagccagacccagacccccggctggccctgccccagcagcgacacccacctgcccacccacagcggcagcctgtag

SEQ ID NO: 60341 - DNA, 1248 bp, Artificial Sequence
  derived and/or modified sequence
atgtgtccgcagcttgctggcgcaggatccatgggatcaccaggggcaaccactggctgggggctactggactataaaaccgagaaatgggctttgctagcaaagaaggggtatcaggaacgggacctggagccacagtttagtatcatcacgaaactgaagggcgtgagtgtcactcagatcaaagaactcgggaaccgcctgtgggatgtcgccgatttcgtcaaaccaccccagggtgaaaacgtttttttcctggtcactaactttttagtgaccccagcccaggtgcagggtcggtgtccggagcacccttccgtgccacttgctaattgctgggtggatgaagattgtccggagggcgaggggggtacacactcacacggcgtgaagacagggcagtgtgttgtgtttaacggaacacatcgtacttgtgaaatctggagttggtgccctgttgagagcggcgtcgtgccttcaaggcctctgctggctcaggctcagaactttacactttttattaagaataccgtcactttttcgaaattcaatttctctaaaagcaatgcactggagacttgggatcctacatatttcaagcactgccggtatgaacctcaattctccccatattgcccagtgttcagaattggagacttagtggcaaaggccggggggacatttgaagacctcgctctgttaggtggttccgtgggcattagagtccattgggattgcgatctagatacgggcgattcagggtgctggccacactactcatttcagcttcaggagaaatcatacaacttccgaaccgccacacactggtgggaacaacctggagtcgaagcacgcaccctgctgaaattatacggtataaggtttgacatcctcgtcactggccaagctgggaaattcggcttaattcctaccgccgtgacccttgggaccggagcagcttggctcggagtcgttactttcttctgtgatctcctgctgctgtacgtggaccgagaagctcacttctactggagaactaagtatgaagaagctaaggccccgaaggcaacggcaaatagtgtttggcgggagctcgccctggcttctcaagcccggttggccgagtgtctgcgacgcagctctgcccctgctccgaccgccactgcagccgggtctcagacccagacccctggctggccctgccctagctcagacacccacctgcccactcacagcggatccttatag

SEQ ID NO: 60342 - DNA, 213 bp, Artificial Sequence
  derived and/or modified sequence
atgggctctccaggtgcaacaaccggttgggggctgcttgattataaaacagaaaagtgggctcttctcgccaagaagggctatcaggaaagggaccttgagcctcagttctctattatcacgaagcttaagggcgtgagcgtcacacagattaaggaattggggaataggctatgggacgtggccgatttcgtgaaaccaccccaggtgtag

SEQ ID NO: 60343 - DNA, 243 bp, Artificial Sequence
  derived and/or modified sequence
atgtgcccccaattagccggtgcaggctctatgggctcccctggggccaccaccggatggggtctgcttgattataaaacagagaagtgggccctgcttgctaagaagggctaccaggagcgggacctagaacctcagttcagtataatcactaagctcaagggcgtgagtgtcacacagatcaaggaactcgggaatcgactgtgggacgttgccgatttcgtgaagccaccccaagtgtag

SEQ ID NO: 60344 - DNA, 1167 bp, Artificial Sequence
  derived and/or modified sequence
atgtggtgggctctcctcgctaaaaagggttatcaagaaagggatcttgaacctcagttctcaatcattacaaagctcaaaggtgtttccgttactcagatcaaggaactaggaaatcgcctgtgggatgtagccgactttgtaaagccaccccagggtgagaatgtcttcttcctggtaaccaatttccttgtaactccagctcaggtgcagggccgttgccccgaacatccttctgttccactcgctaattgctgggtggacgaagattgcccagagggtgagggaggaactcactctcacggtgtgaaaacaggccagtgcgtagttttcaacgggacacataggacatgcgaaatatggtcatggtgcccagtcgagtcaggcgtggtaccgtcacgccccttactcgcccaagcgcagaacttcacactgttcatcaagaacaccgtcacattctcaaaatttaatttcagcaagtctaatgcgctcgaaacctgggacccgacatatttcaagcattgcagatatgagccacagttctcgccctactgccccgtgttcaggatcggcgacctggtggctaaggccggcgggacattcgaggacttggcactgctggggggaagcgtgggcatcagagtccactgggactgcgacctggacacaggcgatagcggctgttggccacactacagcttccagctgcaggagaaaagctataactttagaacagccacccactggtgggagcagcccggcgtcgaagctaggactttgctgaagctatacggtatcaggtttgacattctggtgacggggcaggctggcaaattcggactgattcctacagctgtgactctaggaacgggcgctgcctggttgggagtggtcacattcttttgcgaccttttactactgtatgtggatcgggaagcccacttttactggcgaactaaatatgaagaagcaaaagcccccaaggccaccgccaactctgtgtggagggagctggccctggctagccaggcccgccttgcagagtgtcttcgccggtccagcgctccggcaccaactgctaccgctgcaggcagtcagacccagacaccggggtggccatgccctagttctgacactcacctgcctactcactcaggaagcttatag

SEQ ID NO: 60345 - DNA, 1248 bp, Artificial Sequence
  derived and/or modified sequence
atgtgcccccagctggccggggccggctccatgggcagccctggggccaccaccggctggggcctgctggactacaagacagagaagtgggccctgctggccaagaagggctaccaggagcgggacctggagccccagttcagcatcatcaccaagctgaagggcgtgtctgtgacccagatcaaggagctgggcaaccggctgtgggatgtggccgactttgtgaagccaccccagggagaaaatgtgttcttcctggtgaccaacttcctggtgaccccagcccaggtgcagggccgctgcccagagcaccccagcgtgcccctggccaactgctgggtggatgaggactgcccagagggggagggcggcacccacagccacggcgtgaagacaggccagtgtgtggtgttcaacggcacccacaggacctgtgagatctggagctggtgccctgtggagagcggcgtggtgcccagccggcccctgctggcccaggcccagaacttcaccctcttcatcaagaacacagtgaccttcagcaagttcaacttcagcaagagcaatgccctggagacctgggaccccacctacttcaagcactgccgctatgagccccagttcagcccctactgccctgtgttcagaattggagacctggtggccaaggccggcggcacctttgaggacctggccctgctgggcggctctgtgggcatccgggtgcactgggactgtgacctggacaccggggacagcggctgctggccccactacagcttccagctgcaggagaagagctacaacttcagaacagccacccactggtgggagcagcccggggtggaggcccggaccctgctgaagctgtatggcatccgctttgacatcctggtgacaggccaggccggcaagtttggcctcatccccacagctgtgaccctgggcactggagctgcctggctgggcgtggtgaccttcttctgtgacctgctgctgctgtatgtggaccgggaggcccacttctactggaggaccaagtatgaggaggccaaggcccccaaggccacagccaacagcgtgtggagggagctggccctggccagccaggcccggctggctgaatgtctgcggcgcagcagcgccccagcccccacagccacagctgctggcagccagacccagaccccaggctggccctgccccagcagtgacacccacctgcccacccacagcggcagcctgtag

SEQ ID NO: 60346 - DNA, 213 bp, Artificial Sequence
  derived and/or modified sequence
atgggcagccctggggccaccaccggctggggcctgctggactacaagacagagaagtgggccctgctggccaagaagggctaccaggagcgggacctggagccccagttcagcatcatcaccaagctgaagggcgtgtctgtgacccagatcaaggagctgggcaaccggctgtgggatgtggccgactttgtgaagccaccccaggtgtag

SEQ ID NO: 60347 - DNA, 243 bp, Artificial Sequence
  derived and/or modified sequence
atgtgcccccagctggccggggccggctccatgggcagccctggggccaccaccggctggggcctgctggactacaagacagagaagtgggccctgctggccaagaagggctaccaggagcgggacctggagccccagttcagcatcatcaccaagctgaagggcgtgtctgtgacccagatcaaggagctgggcaaccggctgtgggatgtggccgactttgtgaagccaccccaggtgtag

SEQ ID NO: 60348 - DNA, 1167 bp, Artificial Sequence
  derived and/or modified sequence
atgtggtgggccctgctggccaagaagggctaccaggagcgggacctggagccccagttcagcatcatcaccaagctgaagggcgtgtctgtgacccagatcaaggagctgggcaaccggctgtgggatgtggccgactttgtgaagccaccccagggagaaaatgtgttcttcctggtgaccaacttcctggtgaccccagcccaggtgcagggccgctgcccagagcaccccagcgtgcccctggccaactgctgggtggatgaggactgcccagagggggagggcggcacccacagccatggagtgaagacaggccagtgtgtggtgttcaacggcacccacaggacctgtgagatctggagctggtgccctgtggagagcggcgtggtgcccagccggcccctgctggcccaggcccagaacttcaccctcttcatcaagaacacagtgaccttcagcaagttcaacttcagcaagagcaatgccctggagacctgggaccccacctacttcaagcactgccgctatgagccccagttcagcccctactgccctgtgttccgcatcggggacctggtggccaaggccggcggcacctttgaggacctggccctgctgggcggctctgtgggcatccgggtgcactgggactgtgacctggacacaggagacagcggctgctggccccactacagcttccagctgcaggagaagagctacaacttcagaacagccacccactggtgggagcagcccggggtggaggcccggaccctgctgaagctgtatggcatccgctttgacatcctggtgacaggccaggccggcaagtttggcctcatccccacagctgtgaccctgggcaccggggccgcctggctgggcgtggtgaccttcttctgtgacctgctgctgctgtatgtggaccgggaggcccacttctactggaggaccaagtatgaggaggccaaggcccccaaggccacagccaacagcgtgtggagggagctggccctggccagccaggcccggctggccgagtgcctgcggcgcagcagcgccccagcccccacagccacagctgctggcagccagacccagaccccaggctggccctgccccagcagtgacacccacctgcccacccacagcggcagcctgtag

SEQ ID NO: 60349 - DNA, 1248 bp, Artificial Sequence
  derived and/or modified sequence
atgtgcccccagctggccggcgccggcagcatgggcagccccggcgcaacaactggttgggggctcctggattacaaaactgaaaagtgggcgcttctggccaagaaaggctaccaagagcgggacctggaacctcagttctctatcatcaccaagctcaaaggggtctccgttactcaaatcaaggagcttggaaatcgactgtgggacgtcgctgatttcgtgaaacctccccagggagagaacgtgtttttcctggtgactaactttctagtgacacccgctcaggttcagggtagatgtccagagcaccctagcgtcccactagctaactgctgggttgatgaggactgccccgagggagaaggtggtacacacagccatggggtcaaaactggtcagtgcgtcgtttttaacgggacacaccgaacatgtgagatctggagttggtgtccagttgaaagcggggtggttccatctcggccgctgctcgcacaggcgcaaaacttcacgttgtttataaagaacaccgtcacattttcaaaattcaacttctccaaatccaacgccttggaaacgtgggatcctacttacttcaagcactgccgatacgaaccacagttcagtccatattgtcccgtctttcggataggagatctggtggctaaggctggaggcacctttgaagacctcgccctcctcggcggcagcgtgggtatccgggttcattgggattgtgatctggacactggggactccggctgctggccacactattcattccaactgcaggaaaaatcctataatttcagaacagctacccactggtgggaacagcccggagtcgaagccagaacacttcttaagctgtacggcatccgcttcgatatattggtaaccggccaagctgggaagtttggcctcattcccacagctgtaactctgggaactggagcagcctggctgggcgtggtcacctttttctgtgacctgctactcttatacgtcgacagggaagcacacttttactggcggactaaatatgaggaagccaaggcgccaaaagccacggccaatagcgtgtggagggagcttgccctcgcatcacaggccaggctggctgagtgtctccggagatctagcgcgccagcccccacagccactgcagctgggtcccagactcagactcctgggtggccttgcccttccagcgacacccatctgccaacacattccggaagtctttag

SEQ ID NO: 60350 - DNA, 213 bp, Artificial Sequence
  derived and/or modified sequence
atgggcagccccggcgccaccaccggctggggcctgctggactacaagacagagaagtgggctctgctggctaagaaaggatatcaggagagggatctcgagccacagttctccatcatcaccaagttaaagggcgtgtcagtcacccaaattaaagagctcgggaatcgcctctgggatgtggccgacttcgtcaagcccccacaggtttag

SEQ ID NO: 60351 - DNA, 243 bp, Artificial Sequence
  derived and/or modified sequence
atgtgcccccagctggccggcgccggcagcatgggcagccccggcgccactactggatggggtctgctggactacaaaactgagaagtgggccctactggcaaagaagggataccaagagcgagatctcgagcctcagtttagtattataaccaaacttaaaggcgtgagtgtgacgcaaattaaagagcttgggaatagactctgggacgtcgccgactttgtgaagccacctcaggtttag

SEQ ID NO: 60352 - DNA, 1167 bp, Artificial Sequence
  derived and/or modified sequence
atgtggtgggccctgctggccaagaagggctaccaggagcgggaccttgagcctcagtttagcatcatcaccaaattgaaaggggtgtctgtgacacagatcaaagagttagggaaccggttgtgggacgtggctgactttgtgaagccaccccagggcgagaacgtgttcttcttagtcacaaattttctggtaaccccagcacaggttcagggaaggtgtccggaacacccctctgtgcctctggcaaactgctgggtagacgaagattgtcctgaaggagaaggcggcacacacagccacggcgttaaaactggccaatgcgtcgtatttaatggaactcatcgtacatgtgaaatttggagttggtgtcccgtagaatcgggggtggtgcccagcagacccctactggcccaggcccagaactttacactgtttataaagaataccgtgacctttagtaagttcaatttctccaagagtaatgcccttgaaacctgggatcccacgtacttcaaacattgcagatatgagccacagttctccccctactgcccggtgtttagaatcggggacctggtggccaaagccgggggaacgtttgaggacctcgccctcttagggggttcggtgggcattagggtacactgggactgcgacttggacaccggcgactccggctgctggcctcattactcatttcagcttcaagaaaaatcttataatttcagaacagccacccattggtgggagcagccaggagtcgaggctagaacattgttgaagctctatggcatccgctttgacatattggtgacaggccaggccggcaaatttggcttgataccaaccgccgtgaccctggggaccggagctgcttggctgggtgtggtgactttcttttgcgacctcttactcttgtatgttgacagggaggcccatttctattggaggaccaaatatgaagaagcaaaggcgcccaaggcgacggcaaactcagtgtggcgagaactcgcgctggctagtcaggccaggctggctgaatgtctacgcagaagctcagcccctgcaccaacagctactgccgcagggtcccagacccaaacacctgggtggccctgcccaagctcggatactcacctgccaacacacagcggtagcctctag

SEQ ID NO: 60353 - DNA, 1834 bp, Artificial Sequence
  derived and/or modified sequence
gactcatgtgcccgcagctagcaggagctggcagcatgggctccccaggggctacgacaggctgggggcttctggattataagacggagaagtgggctctcctcgccaaaaaaggctaccaggagcgggacctggaaccccagttttccatcatcaccaaactcaaaggggtttccgtcactcagatcaaggagcttggaaaccggctgtgggatgtggccgacttcgtgaagccacctcagggagagaacgtgttcttcttggtgaccaacttccttgtgacgccagcccaagttcagggcagatgcccagagcacccgtccgtcccactggctaactgctgggtcgacgaggactgccccgaaggggagggaggcacacacagccacggtgtaaaaacaggccagtgtgtggtgttcaatgggacccacaggacctgtgagatctggagttggtgccccgtggagagtggcgttgtgccctcgaggcccctgctggcccaggcccagaacttcacactgttcatcaaaaacacagtcaccttcagcaagttcaacttctctaagtccaatgccttggagacctgggaccccacctattttaagcactgccgctatgaaccacaattcagcccctactgtcccgtgttccgcattggggacctcgtggccaaggctggagggaccttcgaggacctggcgttgctgggtggctctgtaggcatcagagttcactgggattgtgacctggacaccggggactctggctgctggcctcactactccttccagctgcaggagaagagctacaacttcaggacagccactcactggtgggagcaaccgggtgtggaggcccgcaccctgctcaagctctatggaatccgcttcgacatcctcgtcaccgggcaggcagggaagttcgggctcatccccacggccgtcacactgggcaccggggcagcttggctgggcgtggtcacctttttctgtgacctgctactgctgtatgtggatagagaagcccatttctactggaggacaaagtatgaggaggccaaggccccgaaagcaaccgccaactctgtgtggagggagctggcccttgcatcccaagcccgactggccgagtgcctcagacggagctcagcacctgcacccacggccactgctgctgggagtcagacacagacaccaggatggccctgtccaagttctgacacccacttgccaacccattccgggagcctgtagccgttccctgctggttgagagttgggggctgggaagggcggggccctgcctggggatctcaaggatgaggccccagcatggaggattgggggtagaattccacccttgaaccccagcagacagtccctcccctgactcccaccttggtagggtgctgcctcagggagccatagaagtcggctgtgttttgagacggcgacagaacctgacccgtggagactgggagagcccagcaggcacctgtattgcagggctccgactgcatgtggcaggggctcctgctgcgtctgggcctggaggtctctctcccagtgctctgtccccagtgttcctagcagaggtatgcttaccagctgtcagcacagaccctcctgctgcctgggtcctggccctcctcccccatctgcacccccatcataggtagagaccccaccctcccatcggtcctacatggggctgtgcagctggagccaaaaaggcaaggtagaaagaggagtgatgggggagggggattgtttcagcttctctggtgctgtgatgccccaggagagtcctaatctagggaatggggtggagtaggc

SEQ ID NO: 60354 - DNA, 1248 bp, Artificial Sequence
  derived and/or modified sequence
atgtgtccccaattggccggtgctggttccatgggtagcccaggagccacaactggctggggcctcttggactacaagacagagaaatgggctctgctggctaaaaaaggatatcaggagcgggacttagaacctcagtttagcatcattactaagttaaagggcgtgagcgttactcaaattaaagagctaggtaatagactgtgggacgtggccgacttcgtcaagcctccacaaggggaaaatgtattctttctggttaccaattttctggtaacaccggcacaggttcaagggcgatgccccgagcatcccagcgtgccgttagctaactgctgggtggatgaagattgtccagaaggggaaggaggcacacacagtcatggcgttaagacagggcagtgcgtggtctttaatgggacacatagaacgtgcgagatttggagctggtgccctgtggagagcggggtggtcccctccagaccactcctcgctcaagctcagaattttaccttatttattaaaaacactgtcactttttcaaagtttaattttagcaagtcaaacgctttggagacttgggaccctacatactttaagcactgtcgctatgaaccacagtttagcccgtattgcccagtgttcagaattggagacctcgtggcaaaagccggagggaccttcgaagacttggctctgctgggtgggtctgtaggtatcagagtccactgggattgcgatctggatacgggggacagcggctgttggccacattattcctttcagctgcaggaaaaatcttacaacttccggacagcaacccattggtgggaacagccaggtgtggaagcaaggaccctgttaaagctatatggcatcagatttgatattctagtgactgggcaagcaggaaaatttggattgattccgacagcagttacgcttgggaccggagccgcttggctcggggtcgtgactttcttttgtgatttgttgctgttgtatgtggaccgggaagcgcacttctactggcggactaaatatgaagaagctaaagcacccaaggccaccgcaaatagcgtgtggcgtgaactggcattagctagtcaggcgcgactagcagagtgcctgcgcaggtcctccgcacccgctcccactgccacagctgcgggatctcaaacgcagacccctggatggccatgccccagcagcgatactcaccttcccactcactctggcagcctgtag

SEQ ID NO: 60355 - DNA, 213 bp, Artificial Sequence
  derived and/or modified sequence
atgggatcccccggtgcaactacaggctgggggctcctggactataagaccgaaaagtgggctttgctggcgaagaaaggttatcaggagagggacctggagccacaattcagcattataacaaagctcaagggggtcagcgttactcagatcaaagaactgggtaacaggctatgggacgttgctgactttgtgaagccccctcaagtctag

SEQ ID NO: 60356 - DNA, 243 bp, Artificial Sequence
  derived and/or modified sequence
atgtgcccgcaactagccggagccggatccatggggtccccaggagccaccactgggtggggcctactggattataaaacagagaaatgggccctcctagcaaagaaaggttaccaggaaagggacctcgaaccccagtttagtatcattaccaagctgaagggagtatctgtgacccagatcaaggagctgggcaatcgtctgtgggatgttgccgacttcgtgaagccccctcaagtgtag

SEQ ID NO: 60357 - DNA, 1167 bp, Artificial Sequence
  derived and/or modified sequence
atgtggtgggccctgctggcgaaaaaagggtaccaggagcgggacctcgaaccgcagttcagcatcattacaaagctgaagggggtttccgtgacacaaatcaaggaactgggaaaccggctttgggacgtggctgatttcgtcaaaccccctcagggcgagaacgtcttcttcttggttacaaactttttagtgacgcccgctcaggtacagggccgatgcccagagcatccctccgttccacttgccaattgctgggtcgacgaggattgccctgagggcgaagggggaacacacagtcacggtgtgaagactggtcagtgtgttgtcttcaatgggactcaccggacatgcgaaatctggagctggtgtccagtcgagagcggagttgtacctagtaggcccctgctcgctcaggcccagaattttaccctcttcatcaaaaataccgtgactttttccaaatttaacttcagtaaaagtaacgcgctggaaacctgggatccaacttacttcaaacattgtagatatgagccccaattttctccttactgccctgtgtttaggattggtgatctcgtggcaaaggccggaggtactttcgaggatttggccctgctaggtggttccgttggaatccgcgtgcactgggactgcgatctagatactggcgatagcgggtgttggcctcactactctttccaactgcaggagaagtcttacaacttccggaccgcgacacactggtgggagcagcctggtgtggaggcccgaaccttgctgaaactgtatggaatcagatttgacattctagtgacgggccaggctgggaagttcggcctcatacccacagccgtgactctggggaccggggctgcctggctaggagtcgtcactttcttctgcgacctgctgctactgtacgttgacagagaggctcacttctactggcgaaccaagtatgaggaagccaaggcccctaaagctactgccaacagtgtatggcgagaactcgccctggccagtcaggcacgtctggccgaatgtttaagacggagcagtgcccctgctcctacagcaaccgccgcagggagccagacacagacgcccggatggccatgcccatcatcagatactcacttaccaacccatagtggctccctgtag

SEQ ID NO: 60358 - DNA, 2512 bp, Artificial Sequence
  derived and/or modified sequence
gctgcagctgccatgctgactcatgtgcccgcagctagcaggagctggcagcatgggctccccaggggctacgacaggctgggggcttctggattataagacggagaagtgggctctcctcgccaaaaaaggctaccaggagcgggacctggaaccccagttttccatcatcaccaaactcaaaggggtttccgtcactcagatcaaggagcttggaaaccggctgtgggatgtggccgacttcgtgaagccacctcaggtgtaaaaacaggccagtgtgtggtgttcaatgggacccacaggacctgtgagatctggagttggtgccccgtggagagtggcgttgtgccctcgaggcccctgctggcccaggcccagaacttcacactgttcatcaaaaacacagtcaccttcagcaagttcaacttctctaagtccaatgccttggagacctgggaccccacctattttaagcactgccgctatgaaccacaattcagcccctactgtcccgtgttccgcattggggacctcgtggccaaggctggagggaccttcgaggacctggcgttgctgggtggctctgtaggcatcagagttcactgggattgtgacctggacaccggggactctggctgctggcctcactactccttccagctgcaggagaagagctacaacttcaggacagccactcactggtgggagcaaccgggtgtggaggcccgcaccctgctcaagctctatggaatccgcttcgacatcctcgtcaccgggcaggcagggaagttcgggctcatccccacggccgtcacactgggcaccggggcagcttggctgggcgtggtcacctttttctgtgacctgctactgctgtatgtggatagagaagcccatttctactggaggacaaagtatgaggaggccaaggccccgaaagcaaccgccaactctgtgtggagggagctggcccttgcatcccaagcccgactggccgagtgcctcagacggagctcagcacctgcacccacggccactgctgctgggagtcagacacagacaccaggatggccctgtccaagttctgacacccacttgccaacccattccgggagcctgtagccgttccctgctggttgagagttgggggctgggaagggcggggccctgcctggggatctcaaggatgaggccccagcatggaggattgggggtagaattccacccttgaaccccagcagacagtccctcccctgactcccaccttggtagggtgctgcctcagggagccatagaagtcggctgtgttttgagacggcgacagaacctgacccgtggagactgggagagcccagcaggcacctgtattgcagggctccgactgcatgtggcaggggctcctgctgcgtctgggcctggaggtctctctcccagtgctctgtccccagtgttcctagcagaggtatgcttaccagctgtcagcacagaccctcctgctgcctgggtcctggccctcctcccccatctgcacccccatcataggtagagaccccaccctcccatcggtcctacatggggctgtgcagctggagccaaaaaggcaaggtagaaagaggagtgatgggggagggggattgtttcagcttctctggtgctgtgatgccccaggagagtcctaatctagggaatggggtggagtaggcagataatccacctccctatcccccaggcaagggcggagcatgtgtcttgggcccacacctgcttagtttatgaggaccggctgctttccagtggtagcccttttgccatggaggtctgggagagagagcagagggcggcagggctaagttggtgatcattgggttcttcaggaccttctatatccctcctcggtaaccccccagcccaaccccttggaatctttcctccaggcttcctgagagccctgggggtgggaggctgtgggaggctgtacatctgaaattcacttcagtccaagtcatacctaggaagctgtctgggcagctgctcgagggaggccctggctctgatcccaggctggatggagtggctggaaggaatggttccaaacaacaccaccgagatctccctcaggctggccaggttttgcagctggaattctcctcttggtcccagggcggggcagggaattctaagtgtccaccccagggaggcaaggggctgctttccactgtgggtacctggtgatcagggcaagctgtggagggccaggggtggggctgagactgggctgacatctagaatcacctgccacctggagcctcagtaaaatgcctggggtccctgctgcctctcaatctccagagccatgtccatggggaggtgggctctgaagggcgaaggtgggagagcagggcccctgaggcctgggtatccaaggaggggcacgtgcacctgattctccttggggcccagaggaagctgatgtcatggctggacaaagtcacggagtaaagccagcaaagcc

SEQ ID NO: 60359 - DNA, 2513 bp, Artificial Sequence
  derived and/or modified sequence
gctgcagctgccatgctgactcatgtgcccgcagctagcaggagctggcagcatgggctccccaggggctacgacaggctgggggcttctggattataagacggagaagtgggctctcctcgccaaaaaaggctaccaggagcgggacctggaaccccagttttccatcatcaccaaactcaaaggggtttccgtcactcagatcaaggagcttggaaaccggctgtgggatgtggccgacttcgtgaagccacctcaggtgtaaaaacaggccagtgtgtggtgttcaatgggacccacaggacctgtgagatctggagttggtgccccgtggagagtggcgttgtgccctcgaggcccctgctggcccaggcccagaacttcacactgttcatcaaaaacacagtcaccttcagcaagttcaacttctctaagtccaatgccttggagacctgggaccccacctattttaagcactgccgctatgaaccacaattcagcccctactgtcccgtgttccgcattggggacctcgtggccaaggctggagggaccttcgaggacctggcgttgctgggtggctctgtaggcatcagagttcactgggattgtgacctggacaccggggactctggctgctggcctcactactccttccagctgcaggagaagagctacaacttcaggacagccactcactggtgggagcaaccgggtgtggaggcccgcaccctgctcaagctctatggaatccgcttcgacatcctcgtcaccgggcaggcagggaagttcgggctcatccccacggccgtcacactgggcaccggggcagcttggctgggcgtggtcacctttttctgtgacctgctactgctgtatgtggatagagaagcccatttctactggaggacaaagtatgaggaggccaaggccccgaaagcaaccgccaactctgtgtggagggagctggcccttgcatcccaagcccgactggccgagtgcctcagacggagctcagcacctgcacccacggccactgctgctgggagtcagacacagacaccaggatggccctgtccaagttctgacacccacttgccaacccattccgggagcctgtagccgttccctgctggttgagagttgggggctgggaagggcggggccctgcctggggatctcaaggatgaggccccagcatggaggattgggggtagaattccacccttgaaccccagcagacagtccctcccctgactcccaccttggtagggtgctgcctcagggagccatagaagtcggctgtgttttgagacggcgacagaacctgacccgtggagactgggagagcccagcaggcacctgtattgcagggctccgactgcatgtggcaggggctcctgctgcgtctgggcctggaggtctctctcccagtgctctgtccccagtgttcctagcagaggtatgcttaccagctgtcagcacagaccctcctgctgcctgggtcctggccctcctcccccatctgcacccccatcataggtagagaccccaccctcccatcggtcctacatggggctgtgcagctggagccaaaaaggcaaggtagaaagaggagtgatgggggagggggattgtttcagcttctctggtgctgtgatgccccaggagagtcctaatctagggaatggggtggagtaggcagataatccacctccctatcccccaggcaagggcggagcatgtgtcttgggcccacacctgcttagtttatgaggaccggctgctttccagtggtagcccttttgccatggaggtctgggagagagagcagagggcggcagggctaagttggtgatcattgggttcttcaggaccttctatatccctcctcggtaaccccccagcccaaccccttggaatctttcctccaggcttcctgagagccctgggggtgggaggctgtgggaggctgtacatctgaaattcacttcagtccaagtcatacctaggaagctgtctgggcagctgctcgagggaggccctggctctgatcccaggctggatggagtggctggaaggaatggttccaaacaacaccaccgagatctccctcaggctggccaggttttgcagctggaattctcctcttggtcccagggcggggcagggaattctaagtgtccaccccagggaggcaaggggctgctttccactgtgggtacctggtgatcagggcaagctgtggagggccaggggtggggctgagactgggctgacatctagaatcacctgccacctggagcctcagtaaaatgcctggggtccctgctgcctctcaatctccagagccatgtccatggggaggtgggctctgaagggcgaaggtgggagagcagggcccctgaggcctgggtatccaaggaggggcacgtgcacctgattctccttggggcccagaggaagctgatgtcatggctggacaaagtcacggagtaaagccagcaaagcca

SEQ ID NO: 60360 - DNA, 2149 bp, Artificial Sequence
  derived and/or modified sequence
ctagcaggagctggcagcatgggctccccaggggctacgacaggctgggggcttctggattataagacggagaagtatgtgatgaccaggaactggcgggtgggcgccctgcagaggctgctgcagtttgggatcgtggtctatgtggtgggctctcctcgccaaaaaaggctaccaggagcgggacctggaaccccagttttccatcatcaccaaactcaaaggggtttccgtcactcagatcaaggagcttggaaaccggctgtgggatgtggccgacttcgtgaagccacctcagggagagaacgtgttcttcttggtgaccaacttccttgtgacgccagcccaagttcagggcagatgcccagagcacccgtccgtcccactggctaactgctgggtcgacgaggactgccccgaaggggagggaggcacacacagccacggtgtaaaaacaggccagtgtgtggtgttcaatgggacccacaggacctgtgagatctggagttggtgccccgtggagagtggcgttgtgccctcgaggcccctgctggcccaggcccagaacttcacactgttcatcaaaaacacagtcaccttcagcaagttcaacttctctaagtccaatgccttggagacctgggaccccacctattttaagcactgccgctatgaaccacaattcagcccctactgtcccgtgttccgcattggggacctcgtggccaaggctggagggaccttcgaggacctggcgttgctgggtggctctgtaggcatcagagttcactgggattgtgacctggacaccggggactctggctgctggcctcactactccttccagctgcaggagaagagctacaacttcaggacagccactcactggtgggagcaaccgggtgtggaggcccgcaccctgctcaagctctatggaatccgcttcgacatcctcgtcaccgggcaggcagggaagttcgggctcatccccacggccgtcacactgggcaccggggcagcttggctgggcgtggtcacctttttctgtgacctgctactgctgtatgtggatagagaagcccatttctactggaggacaaagtatgaggaggccaaggccccgaaagcaaccgccaactctgtgtggagggagctggcccttgcatcccaagcccgactggccgagtgcctcagacggagctcagcacctgcacccacggccactgctgctgggagtcagacacagacaccaggatggccctgtccaagttctgacacccacttgccaacccattccgggagcctgtagccgttccctgctggttgagagttgggggctgggaagggcggggccctgcctggggatctcaaggatgaggccccagcatggaggattgggggtagaattccacccttgaaccccagcagacagtccctcccctgactcccaccttggtagggtgctgcctcagggagccatagaagtcggctgtgttttgagacggcgacagaacctgacccgtggagactgggagagcccagcaggcacctgtattgcagggctccgactgcatgtggcaggggctcctgctgcgtctgggcctggaggtctctctcccagtgctctgtccccagtgttcctagcagaggaagctgtctgggcagctgctcgagggaggccctggctctgatcccaggctggatggagtggctggaaggaatggttccaaacaacaccaccgagatctccctcaggctggccaggttttgcagctggaattctcctcttggtcccagggcggggcagggaattctaagtgtccaccccagggaggcaaggggctgctttccactgtgggtacctggtgatcagggcaagctgtggagggccaggggtggggctgagactgggctgacatctagaatcacctgccacctggagcctcagtaaaatgcctggggtccctgctgcctctcaatctccagagccatgtccatggggaggtgggctctgaagggcgaaggtgggagagcagggcccctgaggcctgggtatccaaggaggggcacgtgcacctgattctccttggggcccagaggaagctgatgtcatggctggacaaagtcacggagtaaagccagcaaagcc

SEQ ID NO: 60361 - protein, 692 aa, Artificial Sequence
  derived and/or modified sequence
MSSIKGNKLEEQDPRPLQPIPGLMEGNKLEEQDSSPPQSTPGLMKGNKREEQGLGPEPAAPQQPTAEEEALIEFHRSYRELFEFFCNNTTIHGAIRLVCSQHNRMKTAFWAVLWLCTFGMMYWQFGLLFGEYFSYPVSLNINLNSDKLVFPAVTICTLNPYRYPEIKEELEELDRITEQTLFDLYKYSSFTTLVAGSRSRRDLRGTLPHPLQRLRVPPPPHGARRARSVASSLRDNNPQVDWKDWKIGFQLCNQNKSDCFYQTYSSGVDAVREWYRFHYINILSRLPETLPSLEEDTLGNFIFACRFNQVSCNQANYSHFHHPMYGNCYTFNDKNNSNLWMSSMPGINNGLSLMLRAEQNDFIPLLSTVTGARVMVHGQDEPAFMDDGGFNLRPGVETSISMRKETLDRLGGDYGDCTKNGSDVPVENLYPSKYTQQVCIHSCFQESMIKECGCAYIFYPRPQNVEYCDYRKHSSWGYCYYKLQVDFSSDHLGCFTKCRKPCSVTSYQLSAGYSRWPSVTSQEWVFQMLSRQNNYTVNNKRNGVAKVNIFFKELNYKTNSESPSVTMVTLLSNLGSQWSLWFGSSVLSVVEMAELVFDLLVIMFLMLLRRFRSRYWSPGRGGRGAQEVASTLASSPPSHFCPHPMSLSLSQPGPAPSPALTAPPPAYATLGPRPSPGGSAGASSSTCPLGGP

SEQ ID NO: 60362 - protein, 669 aa, Artificial Sequence
  derived and/or modified sequence
MEGNKLEEQDSSPPQSTPGLMKGNKREEQGLGPEPAAPQQPTAEEEALIEFHRSYRELFEFFCNNTTIHGAIRLVCSQHNRMKTAFWAVLWLCTFGMMYWQFGLLFGEYFSYPVSLNINLNSDKLVFPAVTICTLNPYRYPEIKEELEELDRITEQTLFDLYKYSSFTTLVAGSRSRRDLRGTLPHPLQRLRVPPPPHGARRARSVASSLRDNNPQVDWKDWKIGFQLCNQNKSDCFYQTYSSGVDAVREWYRFHYINILSRLPETLPSLEEDTLGNFIFACRFNQVSCNQANYSHFHHPMYGNCYTFNDKNNSNLWMSSMPGINNGLSLMLRAEQNDFIPLLSTVTGARVMVHGQDEPAFMDDGGFNLRPGVETSISMRKETLDRLGGDYGDCTKNGSDVPVENLYPSKYTQQVCIHSCFQESMIKECGCAYIFYPRPQNVEYCDYRKHSSWGYCYYKLQVDFSSDHLGCFTKCRKPCSVTSYQLSAGYSRWPSVTSQEWVFQMLSRQNNYTVNNKRNGVAKVNIFFKELNYKTNSESPSVTMVTLLSNLGSQWSLWFGSSVLSVVEMAELVFDLLVIMFLMLLRRFRSRYWSPGRGGRGAQEVASTLASSPPSHFCPHPMSLSLSQPGPAPSPALTAPPPAYATLGPRPSPGGSAGASSSTCPLGGP

SEQ ID NO: 60363 - DNA, 2079 bp, Artificial Sequence
  derived and/or modified sequence
atgagcagcatcaagggcaacaagctggaggagcaggaccccagacccctgcagcccatccccggcctgatggagggcaacaagctggaggagcaggacagcagccccccccagagcacccccggcctgatgaagggcaacaagagagaggagcagggcctgggccccgagcccgccgccccccagcagcccaccgccgaggaggaggccctgatcgagttccacagaagctacagagagctgttcgagttcttctgcaacaacaccaccatccacggcgccatcagactggtgtgcagccagcacaacagaatgaagaccgccttctgggccgtgctgtggctgtgcaccttcggcatgatgtactggcagttcggcctgctgttcggcgagtacttcagctaccccgtgagcctgaacatcaacctgaacagcgacaagctggtgttccccgccgtgaccatctgcaccctgaacccctacagataccccgagatcaaggaggagctggaggagctggacagaatcaccgagcagaccctgttcgacctgtacaagtacagcagcttcaccaccctggtggccggcagcagaagcagaagagacctgagaggcaccctgccccaccccctgcagagactgagagtgcccccccccccccacggcgccagaagagccagaagcgtggccagcagcctgagagacaacaacccccaggtggactggaaggactggaagatcggcttccagctgtgcaaccagaacaagagcgactgcttctaccagacctacagcagcggcgtggacgccgtgagagagtggtacagattccactacatcaacatcctgagcagactgcccgagaccctgcccagcctggaggaggacaccctgggcaacttcatcttcgcctgcagattcaaccaggtgagctgcaaccaggccaactacagccacttccaccaccccatgtacggcaactgctacaccttcaacgacaagaacaacagcaacctgtggatgagcagcatgcccggcatcaacaacggcctgagcctgatgctgagagccgagcagaacgacttcatccccctgctgagcaccgtgaccggcgccagagtgatggtgcacggccaggacgagcccgccttcatggacgacggcggcttcaacctgagacccggcgtggagaccagcatcagcatgagaaaggagaccctggacagactgggcggcgactacggcgactgcaccaagaacggcagcgacgtgcccgtggagaacctgtaccccagcaagtacacccagcaggtgtgcatccacagctgcttccaggagagcatgatcaaggagtgcggctgcgcctacatcttctaccccagaccccagaacgtggagtactgcgactacagaaagcacagcagctggggctactgctactacaagctgcaggtggacttcagcagcgaccacctgggctgcttcaccaagtgcagaaagccctgcagcgtgaccagctaccagctgagcgccggctacagcagatggcccagcgtgaccagccaggagtgggtgttccagatgctgagcagacagaacaactacaccgtgaacaacaagagaaacggcgtggccaaggtgaacatcttcttcaaggagctgaactacaagaccaacagcgagagccccagcgtgaccatggtgaccctgctgagcaacctgggcagccagtggagcctgtggttcggcagcagcgtgctgagcgtggtggagatggccgagctggtgttcgacctgctggtgatcatgttcctgatgctgctgagaagattcagaagcagatactggagccccggcagaggcggcagaggcgcccaggaggtggccagcaccctggccagcagcccccccagccacttctgcccccaccccatgagcctgagcctgagccagcccggccccgcccccagccccgccctgaccgcccccccccccgcctacgccaccctgggccccagacccagccccggcggcagcgccggcgccagcagcagcacctgccccctgggcggcccctag

SEQ ID NO: 60364 - DNA, 2079 bp, Artificial Sequence
  derived and/or modified sequence
atgtcatcgatcaaaggaaacaaactggaggaacaagatcctaggccgctccagccgatccccggacttatggagggcaacaaactggaggaacaggatagcagtccaccccaatcaacaccaggcctgatgaagggcaataagcgtgaggaacaaggcttgggacccgagccagctgcgccccagcagcccactgcagaggaagaggccttaattgagtttcacaggtcataccgggagctctttgaatttttttgcaataacacaacaatccacggtgctatccgccttgtctgcagccaacataatcgtatgaaaaccgcattttgggctgtcttgtggctatgtaccttcggtatgatgtactggcaattcggcctgttatttggcgagtacttcagttaccccgtgagcctgaatattaacctgaactccgacaaactggtattcccagcagttacaatttgtacactgaacccctataggtatccagaaatcaaagaagagttagaggaactggataggatcacagagcaaacattgtttgacctgtataagtacagctcatttacgactctggttgccggatcacgatcccggagagacctgcgggggactctgccccatccacttcaacgccttcgggttccaccccccccccacggtgcgcgtcgagcccggagcgtagcctcaagcctgagggacaacaacccccaggtggactggaaagactggaaaattggattccagctgtgtaaccagaataagagcgactgcttctaccagacatattctagcggggtagatgccgtccgggagtggtatcggttccattacataaatatcctctcacgcctcccagagaccttgccaagtctggaagaggataccttgggaaacttcatcttcgcctgcaggtttaaccaggttagctgcaaccaggccaattactctcacttccaccaccctatgtacggaaactgttacacatttaatgacaagaacaattccaacctgtggatgagttcaatgcccggtatcaacaatgggttgagtctcatgctaagagccgagcagaacgattttattcccttgctgagcaccgtgacaggtgctcgggtgatggtccacggccaggacgaacccgccttcatggatgacggggggttcaatctcagacctggcgtcgagaccagtatctcaatgagaaaagagacgctggaccgtctcggaggagattacggagattgtactaaaaacggctctgatgtccctgtagagaatttatatcctagcaaatatacacagcaggtctgcatccacagttgttttcaggagagcatgattaaagagtgtggttgtgcttatatcttttatcccagaccacagaatgtggagtactgtgattatcgaaaacattcgagctggggctattgctattacaaactccaggtggatttttcaagcgatcatctgggctgcttcaccaagtgcagaaagccctgcagcgtaacgtcttatcagctgtcggctggttattcacgatggccgtccgtgacaagccaggagtgggtctttcagatgttgagcaggcagaacaactacaccgttaacaataagaggaacggcgtggccaaggttaatatattttttaaggagttaaactataaaacaaactcagagtccccttccgtgacgatggtgacactcctgtccaacctgggcagccagtggagcctgtggtttgggtcttcggtgcttagtgttgtggaaatggcagaactggtttttgaccttctggttatcatgttcctgatgcttctgcggcgcttccggagcagatattggtccccaggtaggggcgggcgcggggctcaggaagtggcgtccactcttgcatcctcccctccctcccacttttgtccccatcctatgtcactgtctcttagtcagccaggccctgcccccagtccagctctcacagcaccacctcccgcttatgccaccctgggacctcgcccgagcccaggtggaagcgccggggctagctcatctacgtgtcccctaggcggcccctag

SEQ ID NO: 60365 - DNA, 2079 bp, Artificial Sequence
  derived and/or modified sequence
atgagcagcatcaagggcaacaagctggaggagcaggacccccggcccctgcagcccatccctggcctgatggagggcaacaagctggaggagcaggacagcagccccccccagagcaccccaggcctgatgaagggcaacaagcgggaggagcagggcctgggccctgagcctgctgccccccagcagcccacagctgaggaggaggccctgattgagttccacaggagctaccgggagctgtttgagttcttctgcaacaacaccaccatccacggggccatccggctggtgtgcagccagcacaacaggatgaagacagccttctgggccgtgctgtggctgtgcaccttcggcatgatgtactggcagtttggcctgctgtttggagagtacttctcctaccctgtgtccctgaacatcaacctgaacagcgacaagctggtgtttcctgctgtgaccatctgcaccctgaacccctaccgctacccagagatcaaggaggagctggaggagctggaccgcatcacagagcagaccctgtttgacctgtacaagtacagcagcttcaccaccctggtggccggcagccgcagccggcgggacctgcggggcaccctgccccaccccctgcagaggctgcgggtgcccccacctcctcatggagcccggcgggcccggtctgtggccagcagcctgcgggacaacaacccccaggtggactggaaggactggaagattggcttccagctgtgcaaccagaacaagagtgactgcttctaccagacctacagcagcggcgtggatgctgtgcgggagtggtaccgcttccactacatcaacatcctgagccggctgcctgagaccctgcccagcctggaggaggacaccctgggcaacttcatctttgcctgccgcttcaaccaggtgtcctgcaaccaggccaactacagccacttccaccaccccatgtatggcaactgctacaccttcaatgacaagaacaacagcaacctgtggatgagctccatgcctggcatcaacaacggcctgagcctgatgctgcgggcagagcagaatgacttcatccccctgctgagcacagtgactggagcccgggtgatggtgcacggccaggatgagcccgccttcatggatgatggcggcttcaacctgcggcctggggtggagaccagcatctccatgaggaaggagaccctggaccggctgggcggggactatggagactgcaccaagaatggaagtgatgtgcctgtggagaacctgtaccccagcaagtacacccagcaggtgtgcatccacagctgcttccaggagagcatgatcaaggaatgtggctgtgcctacatcttctacccccggccccagaatgtggagtactgtgactacaggaagcacagctcctggggctactgctactacaagctgcaggtggacttcagcagtgaccacctgggctgcttcaccaagtgcaggaagccctgcagcgtgaccagctaccagctgtctgctggctacagccgctggcccagcgtgaccagccaggagtgggtgttccagatgctgagccggcagaacaactacacagtgaacaacaagagaaatggagtggccaaggtgaacatcttcttcaaggagctgaactacaagaccaacagcgagagccccagcgtgaccatggtgaccctgctgagcaacctgggcagccagtggagcctgtggtttggcagctctgtgctgtctgtggtggagatggccgagctggtgtttgacctgctggtgatcatgttcctgatgctgctgcggcgcttccgcagccgctactggagccctggccggggcggccgcggggcccaggaggtggccagcaccctggccagcagcccccccagccacttctgcccccaccccatgagcctgagcctgagccagcccggccctgcccccagccctgccctgacagcccctcctccagcctatgccaccctgggcccccggcccagccctgggggcagcgctggggccagcagcagcacctgccccctgggcggcccctag

SEQ ID NO: 60366 - DNA, 2079 bp, Artificial Sequence
  derived and/or modified sequence
atgagcagcatcaagggcaacaagctggaggagcaggacccccggcccctgcagcctatcccaggcctgatggagggaaataaattagaggaacaggactcgagcccccctcaatccactccagggctcatgaagggcaataaaagagaagagcagggccttgggcccgagccagccgccccgcaacaacccacggccgaggaggaggcgttgattgaattccatcgctcatatcgtgaattattcgaattcttctgcaacaacaccacaatccacggcgcaatcaggctggtgtgctcacaacacaatcgcatgaagaccgccttttgggctgtattgtggctctgtactttcggcatgatgtattggcaattcgggctcctgttcggcgagtacttcagttaccctgtgtccttaaacataaatctaaactcggacaaactggtttttccggccgttactatttgcacactgaatccataccgatatcccgagatcaaggaagaactggaagagctggataggatcaccgaacaaaccctgttcgacctctacaagtactcttcctttacaacattagtggctggttcccggagcaggcgagatcttaggggcaccctgccgcaccctcttcagcgcttacgcgtgccgccaccaccccacggagcccgcagagctaggagcgtggcctcgtcattgagagataacaacccacaggttgattggaaagattggaagatcggctttcagttatgtaaccaaaataaatccgattgcttttaccaaacgtacagcagtggcgtggacgccgtgagggaatggtaccggtttcactacataaatattctctccagactgcccgagacgttgccatccctagaagaagatactctggggaatttcatttttgcttgcaggtttaaccaggtcagctgcaaccaggccaactattcgcacttccaccacccaatgtacggcaattgttacaccttcaatgataagaacaatagcaacctgtggatgtccagcatgcctgggatcaacaacggtttatccctgatgttgcgagcagaacaaaacgattttatcccccttctgtccaccgtcaccggcgccagagtgatggtgcacggccaggatgagcccgcgttcatggatgacggaggattcaatctgcgacccggcgtggaaacctcaatttcaatgcgaaaagaaacactcgatcggctggggggagactacggggactgcaccaaaaacggatctgacgtgcccgtggagaatctgtacccatctaagtatacccagcaagtctgcatccactcttgtttccaggagagcatgatcaaagagtgtgggtgcgcatacattttttacccgaggcctcagaatgtggagtattgcgattaccggaaacatagctcttggggctactgctactacaagctgcaggtcgatttttcaagtgaccacctggggtgttttacgaagtgtcgcaaaccttgcagtgtgacaagttaccagctctccgccgggtactctaggtggccaagcgtgactagtcaggaatgggtgttccagatgctttctagacagaacaattatactgttaataataagcggaacggagtggccaaggtgaatatttttttcaaggaactgaattataaaacaaattccgagagccccagcgtcacaatggtcactctccttagcaacttggggagtcagtggtctctgtggtttggtagctcagtgttgtctgtggtcgagatggcagaactcgtgtttgacctcctggttattatgtttcttatgttactgaggagatttcgctcacgctattggtcccctgggcgcggtggccgcggagcccaggaggtggcctccacactcgcatccagcccaccttcccatttttgcccgcaccccatgtcccttagtctaagccaacccggtcccgcaccaagtcctgccctgacagctcctccccctgcgtacgcaacactggggcctagaccgtcccctggcggcagcgccggcgcgtcaagttccacctgccctctgggagggccctag

SEQ ID NO: 60367 - DNA, 2079 bp, Artificial Sequence
  derived and/or modified sequence
atgagttctatcaaaggcaacaagctggaagaacaagaccccaggccactgcagccgatccctggcctcatggaaggcaacaagctagaggagcaggacagttcacccccacagagcacacccggtctgatgaagggaaacaaaagggaggaacagggactgggccctgagccagcggctccccaacaacccaccgctgaagaggaagctctcattgaattccaccgtagttaccgggagctatttgagtttttttgcaataacaccacgatacatggcgctatcaggctggtttgttctcaacacaacagaatgaagactgcgttctgggcagtcctttggttgtgtactttcgggatgatgtactggcagtttggtctccttttcggcgagtatttttcatacccagtgtctctgaacatcaacctgaattctgataaacttgtcttccctgcggtaacgatttgtacactcaacccataccgctaccctgagatcaaggaggagctcgaggaacttgacaggatcaccgagcagacattatttgatctgtacaaatattcctcgtttacaaccttggtggcaggaagcagatccaggagggacttaagaggcactctgccccatcctctccagagactgagagtgccccctccaccgcacggggcaaggcgtgcacgcagcgtcgcttcctccttgagggacaataatccacaggttgactggaaagactggaaaatcgggttccagctctgcaatcagaataaatcggattgtttctaccagacctattcatctggggtcgatgctgtgcgggagtggtaccgctttcactatatcaatatcttgtctagattgcccgagaccctgccttcactggaagaagatacactaggtaattttatcttcgcatgtaggttcaatcaagttagctgcaaccaggctaactattctcacttccatcatccaatgtatggcaattgttatacatttaacgataagaacaactccaatctttggatgagcagcatgccaggcattaacaacggtctgagcctcatgctcagagctgagcagaacgatttcatccccctgcttagcacagttaccggtgctagggtcatggtgcacgggcaggacgagcccgcttttatggacgacgggggattcaaccttcgtcccggtgtcgagacttcaatttctatgcgcaaggaaactctggataggttggggggtgattacggagactgcacaaagaacggcagcgacgttcctgtcgagaatctctatcctagcaagtatactcaacaggtatgcatccattcttgcttccaggaaagcatgattaaagaatgtggttgcgcctacatcttttacccacgaccccagaatgtggagtactgcgactaccgcaagcatagttcctggggatattgctattacaagctgcaggttgatttctcttcagatcatctcggctgtttcaccaagtgtagaaagccatgtagcgtgacatcctaccagctcagcgcaggctatagccgctggccttccgtgacatcccaggagtgggtgtttcagatgcttagtagacagaataactacactgtcaataacaaaagaaacggggtcgcaaaggtcaatattttttttaaagagttaaattataaaacaaactcagaaagtcccagtgtcacaatggttacactcctgagcaatctggggtctcagtggagcctctggttcggttcctccgtgttgtcagtggtcgaaatggccgaattggtgttcgaccttttggtgatcatgttcctgatgctgctccggcgattccggtccagatactggtcccccggacgaggtggacgcggtgctcaggaagtcgcgtctacgcttgcttcctcacctccatcccatttctgtccccacccaatgagtctcagcttgagtcagcctggccctgcaccgagtcccgctctgacagccccacctcccgcatacgccacactaggccctaggccttctccaggtggctccgcgggagcttcctccagtacatgtcctctaggtggaccatag

SEQ ID NO: 60368 - DNA, 2361 bp, Artificial Sequence
  derived and/or modified sequence
aacctcagaaaactgatttatccttgggaagggtcagtttcttcattaggacaatgaagaaaaatccagctgtcccttccaaggggaggtatcatgagcagtatcaaggggaacaagctggaggagcaggaccctagacctctgcagcccataccaggtctcatggaggggaacaagctggaggagcaggactctagccctccacagtccactccagggctcatgaaggggaacaagcgtgaggagcaggggctgggccccgaacctgcggcgccccagcagcccacggcggaggaggaggccctgatcgagttccaccgctcctaccgagagctcttcgagttcttctgcaacaacaccaccatccacggcgccatccgcctggtgtgctcccagcacaaccgcatgaagacggccttctgggcagtgctgtggctctgcacctttggcatgatgtactggcaattcggcctgcttttcggagagtacttcagctaccccgtcagcctcaacatcaacctcaactcggacaagctcgtcttccccgcagtgaccatctgcaccctcaatccctacaggtacccggaaattaaagaggagctggaggagctggaccgcatcacagagcagacgctctttgacctgtacaaatacagctccttcaccactctcgtggccggctcccgcagccgtcgcgacctgcgggggactctgccgcaccccttgcagcgcctgagggtcccgcccccgcctcacggggcccgtcgagcccgtagcgtggcctccagcttgcgggacaacaacccccaggtggactggaaggactggaagatcggcttccagctgtgcaaccagaacaaatcggactgcttctaccagacatactcatcaggggtggatgcggtgagggagtggtaccgcttccactacatcaacatcctgtcgaggctgccagagactctgccatccctggaggaggacacgctgggcaacttcatcttcgcctgccgcttcaaccaggtctcctgcaaccaggcgaattactctcacttccaccacccgatgtatggaaactgctatactttcaatgacaagaacaactccaacctctggatgtcttccatgcctggaatcaacaacggtctgtccctgatgctgcgcgcagagcagaatgacttcattcccctgctgtccacagtgactggggcccgggtaatggtgcacgggcaggatgaacctgcctttatggatgatggtggctttaacttgcggcctggcgtggagacctccatcagcatgaggaaggaaaccctggacagacttgggggcgattatggcgactgcaccaagaatggcagtgatgttcctgttgagaacctttacccttcaaagtacacacagcaggtgtgtattcactcctgcttccaggagagcatgatcaaggagtgtggctgtgcctacatcttctatccgcggccccagaacgtggagtactgtgactacagaaagcacagttcctgggggtactgctactataagctccaggttgacttctcctcagaccacctgggctgtttcaccaagtgccggaagccatgcagcgtgaccagctaccagctctctgctggttactcacgatggccctcggtgacatcccaggaatgggtcttccagatgctatcgcgacagaacaattacaccgtcaacaacaagagaaatggagtggccaaagtcaacatcttcttcaaggagctgaactacaaaaccaattctgagtctccctctgtcacgatggtcaccctcctgtccaacctgggcagccagtggagcctgtggttcggctcctcggtgttgtctgtggtggagatggctgagctcgtctttgacctgctggtcatcatgttcctcatgctgctccgaaggttccgaagccgatactggtctccaggccgagggggcaggggtgctcaggaggtagcctccaccctggcatcctcccctccttcccacttctgcccccaccccatgtctctgtccttgtcccagccaggccctgctccctctccagccttgacagcccctccccctgcctatgccaccctgggcccccgcccatctccagggggctctgcaggggccagttcctccacctgtcctctgggggggccctgagagggaaggagaggtttctcacaccaaggcagatgctcctctggtgggagggtgctggccctggcaagattgaaggatgtgcagggcttcctctcagagccgcccaaactgccgttgatgtgtggaggggaagcaagatgggtaagggctcaggaagttgctccaagaacagtagctgatgaagctgcc

SEQ ID NO: 60369 - protein, 728 aa, Artificial Sequence
  derived and/or modified sequence
MGMARGSLTRVPGVMGEGTQGPELSLDPDPCSPQSTPGLMKGNKLEEQDPRPLQPIPGLMEGNKLEEQDSSPPQSTPGLMKGNKREEQGLGPEPAAPQQPTAEEEALIEFHRSYRELFEFFCNNTTIHGAIRLVCSQHNRMKTAFWAVLWLCTFGMMYWQFGLLFGEYFSYPVSLNINLNSDKLVFPAVTICTLNPYRYPEIKEELEELDRITEQTLFDLYKYSSFTTLVAGSRSRRDLRGTLPHPLQRLRVPPPPHGARRARSVASSLRDNNPQVDWKDWKIGFQLCNQNKSDCFYQTYSSGVDAVREWYRFHYINILSRLPETLPSLEEDTLGNFIFACRFNQVSCNQANYSHFHHPMYGNCYTFNDKNNSNLWMSSMPGINNGLSLMLRAEQNDFIPLLSTVTGARVMVHGQDEPAFMDDGGFNLRPGVETSISMRKETLDRLGGDYGDCTKNGSDVPVENLYPSKYTQQVCIHSCFQESMIKECGCAYIFYPRPQNVEYCDYRKHSSWGYCYYKLQVDFSSDHLGCFTKCRKPCSVTSYQLSAGYSRWPSVTSQEWVFQMLSRQNNYTVNNKRNGVAKVNIFFKELNYKTNSESPSVTMVTLLSNLGSQWSLWFGSSVLSVVEMAELVFDLLVIMFLMLLRRFRSRYWSPGRGGRGAQEVASTLASSPPSHFCPHPMSLSLSQPGPAPSPALTAPPPAYATLGPRPSPGGSAGASSSTCPLGGP

SEQ ID NO: 60370 - DNA, 2187 bp, Artificial Sequence
  derived and/or modified sequence
atgggcatggccagaggcagcctgaccagagtgcccggcgtgatgggcgagggcacccagggccccgagctgagcctggaccccgacccctgcagcccccagagcacccccggcctgatgaagggcaacaagctggaggagcaggaccccagacccctgcagcccatccccggcctgatggagggcaacaagctggaggagcaggacagcagccccccccagagcacccccggcctgatgaagggcaacaagagagaggagcagggcctgggccccgagcccgccgccccccagcagcccaccgccgaggaggaggccctgatcgagttccacagaagctacagagagctgttcgagttcttctgcaacaacaccaccatccacggcgccatcagactggtgtgcagccagcacaacagaatgaagaccgccttctgggccgtgctgtggctgtgcaccttcggcatgatgtactggcagttcggcctgctgttcggcgagtacttcagctaccccgtgagcctgaacatcaacctgaacagcgacaagctggtgttccccgccgtgaccatctgcaccctgaacccctacagataccccgagatcaaggaggagctggaggagctggacagaatcaccgagcagaccctgttcgacctgtacaagtacagcagcttcaccaccctggtggccggcagcagaagcagaagagacctgagaggcaccctgccccaccccctgcagagactgagagtgcccccccccccccacggcgccagaagagccagaagcgtggccagcagcctgagagacaacaacccccaggtggactggaaggactggaagatcggcttccagctgtgcaaccagaacaagagcgactgcttctaccagacctacagcagcggcgtggacgccgtgagagagtggtacagattccactacatcaacatcctgagcagactgcccgagaccctgcccagcctggaggaggacaccctgggcaacttcatcttcgcctgcagattcaaccaggtgagctgcaaccaggccaactacagccacttccaccaccccatgtacggcaactgctacaccttcaacgacaagaacaacagcaacctgtggatgagcagcatgcccggcatcaacaacggcctgagcctgatgctgagagccgagcagaacgacttcatccccctgctgagcaccgtgaccggcgccagagtgatggtgcacggccaggacgagcccgccttcatggacgacggcggcttcaacctgagacccggcgtggagaccagcatcagcatgagaaaggagaccctggacagactgggcggcgactacggcgactgcaccaagaacggcagcgacgtgcccgtggagaacctgtaccccagcaagtacacccagcaggtgtgcatccacagctgcttccaggagagcatgatcaaggagtgcggctgcgcctacatcttctaccccagaccccagaacgtggagtactgcgactacagaaagcacagcagctggggctactgctactacaagctgcaggtggacttcagcagcgaccacctgggctgcttcaccaagtgcagaaagccctgcagcgtgaccagctaccagctgagcgccggctacagcagatggcccagcgtgaccagccaggagtgggtgttccagatgctgagcagacagaacaactacaccgtgaacaacaagagaaacggcgtggccaaggtgaacatcttcttcaaggagctgaactacaagaccaacagcgagagccccagcgtgaccatggtgaccctgctgagcaacctgggcagccagtggagcctgtggttcggcagcagcgtgctgagcgtggtggagatggccgagctggtgttcgacctgctggtgatcatgttcctgatgctgctgagaagattcagaagcagatactggagccccggcagaggcggcagaggcgcccaggaggtggccagcaccctggccagcagcccccccagccacttctgcccccaccccatgagcctgagcctgagccagcccggccccgcccccagccccgccctgaccgcccccccccccgcctacgccaccctgggccccagacccagccccggcggcagcgccggcgccagcagcagcacctgccccctgggcggcccctag

SEQ ID NO: 60371 - DNA, 2187 bp, Artificial Sequence
  derived and/or modified sequence
atggggatggcacgcggatctctcacaagggtccctggagtgatgggggaaggcacccaggggccggaactctctttggaccctgacccttgttccccccaaagtactccggggctgatgaaaggaaacaagctagaagagcaagatccccggcccttgcagccaattcccggcttgatggaggggaacaaactagaagagcaagactccagtccaccccagagcaccccaggcctgatgaagggcaacaaacgtgaagagcaagggcttggacctgagccagcagccccgcaacagcccacggccgaggaagaagcactgattgaatttcatcgttcataccgggagctgttcgagtttttttgcaataacacaaccatccatggggctatcagactcgtctgtagccagcacaataggatgaagacggccttctgggcagtgctgtggctctgtacgtttggcatgatgtactggcagttcggcctcctatttggagaatatttttcttaccccgtgtccttaaacatcaatctcaatagtgacaaattagtgttcccagcagtcaccatctgtactctgaatccttaccggtatcctgaaatcaaagaggaactcgaggagctcgatcgcataactgagcagacactgttcgatctgtataagtactcatcctttaccacactcgttgccgggtcaaggtcccggcgggatttgagaggtacacttccccaccctctgcaacggttgagggtgccccctcctcctcatggggctagacgagctaggagcgtggccagctctctgcgcgacaacaacccacaggtggattggaaggactggaaaattggttttcaactgtgtaatcagaataaatccgattgtttctatcagacatatagcagtggcgttgatgctgtgagagagtggtaccgctttcactacattaatatcttgagccgcctccctgagaccctgcccagtctggaagaggacactctggggaatttcatctttgcatgccgattcaaccaagtctcctgcaatcaagctaattacagtcactttcaccaccccatgtatggaaactgctacacattcaacgacaaaaacaattcgaatctatggatgtccagcatgccggggattaacaatggcttatctcttatgcttcgggcagaacagaatgatttcattccgctgctcagtaccgttaccggggcacgcgttatggtacacggtcaggacgaaccagcattcatggacgacggagggttcaacctgcgccccggagtggaaaccagcatctccatgaggaaagagaccctggataggcttgggggggattatggcgactgcactaagaatggatccgatgtgcccgtcgaaaacttgtatcctagtaagtatacccagcaagtttgcattcacagctgttttcaggagagcatgattaaggagtgtggctgtgcctatattttttaccctagaccccagaatgtggaatactgcgattacaggaaacattcatcttggggttattgctactataagctgcaggtcgatttctcttcagatcatcttgggtgcttcacaaagtgtaggaagccctgctccgtgacttcttatcagctgagtgccggttatagcagatggccctctgtgacctctcaggagtgggtctttcaaatgcttagcagacagaacaactacaccgtcaataacaaacgcaatggcgtcgccaaggttaacatcttcttcaaggaactgaactacaagactaatagcgaatcaccctcagtgacaatggtcaccttactgtcaaacctgggctctcagtggtctctgtggttcggttctagcgtgctgtctgtggtggagatggcggaattagtgttcgacctattagtgatcatgttcctgatgctgttgcgacggttccggtctaggtattggagccccggccgcggcggtagaggcgcacaggaggtcgctagcaccctggcaagctcaccaccctcgcacttttgtccccacccgatgagcctcagtctgtcccagcccggcccggctccctcgcccgctctgaccgccccccctccggcttacgcaactctggggccacggccgagtcctggcggatccgccggggcgtcatcaagtacgtgccctctcggcggcccgtag

SEQ ID NO: 60372 - DNA, 2187 bp, Artificial Sequence
  derived and/or modified sequence
atgggcatggcccggggcagcctgaccagggtgcctggggtgatgggagagggcacccagggccctgagctgagcctggaccctgacccctgcagcccccagagcaccccaggcctgatgaagggcaacaagctggaggagcaggacccccggcccctgcagcccatccctggcctgatggagggcaacaagctggaggagcaggacagcagccccccccagagcaccccaggcctgatgaagggcaacaagcgggaggagcagggcctgggccctgagcctgctgccccccagcagcccacagctgaggaggaggccctgattgagttccacaggagctaccgggagctgtttgagttcttctgcaacaacaccaccatccacggggccatccggctggtgtgcagccagcacaacaggatgaagacagccttctgggccgtgctgtggctgtgcaccttcggcatgatgtactggcagtttggcctgctgtttggagagtacttctcctaccctgtgtccctgaacatcaacctgaacagcgacaagctggtgtttcctgctgtgaccatctgcaccctgaacccctaccgctacccagagatcaaggaggagctggaggagctggaccgcatcacagagcagaccctgtttgacctgtacaagtacagcagcttcaccaccctggtggccggcagccgcagccggcgggacctgcggggcaccctgccccaccccctgcagaggctgcgggtgcccccacctcctcatggagcccggcgggcccggtctgtggccagcagcctgcgggacaacaacccccaggtggactggaaggactggaagattggcttccagctgtgcaaccagaacaagagtgactgcttctaccagacctacagcagcggcgtggatgctgtgcgggagtggtaccgcttccactacatcaacatcctgagccggctgcctgagaccctgcccagcctggaggaggacaccctgggcaacttcatctttgcctgccgcttcaaccaggtgtcctgcaaccaggccaactacagccacttccaccaccccatgtatggcaactgctacaccttcaatgacaagaacaacagcaacctgtggatgagctccatgcctggcatcaacaacggcctgagcctgatgctgcgggcagagcagaatgacttcatccccctgctgagcacagtgactggagcccgggtgatggtgcacggccaggatgagcccgccttcatggatgatggcggcttcaacctgcggcctggggtggagaccagcatctccatgaggaaggagaccctggaccggctgggcggggactatggagactgcaccaagaatggaagtgatgtgcctgtggagaacctgtaccccagcaagtacacccagcaggtgtgcatccacagctgcttccaggagagcatgatcaaggaatgtggctgtgcctacatcttctacccccggccccagaatgtggagtactgtgactacaggaagcacagctcctggggctactgctactacaagctgcaggtggacttcagcagtgaccacctgggctgcttcaccaagtgcaggaagccctgcagcgtgaccagctaccagctgtctgctggctacagccgctggcccagcgtgaccagccaggagtgggtgttccagatgctgagccggcagaacaactacacagtgaacaacaagagaaatggagtggccaaggtgaacatcttcttcaaggagctgaactacaagaccaacagcgagagccccagcgtgaccatggtgaccctgctgagcaacctgggcagccagtggagcctgtggtttggcagctctgtgctgtctgtggtggagatggccgagctggtgtttgacctgctggtgatcatgttcctgatgctgctgcggcgcttccgcagccgctactggagccctggccggggcggccgcggggcccaggaggtggccagcaccctggccagcagcccccccagccacttctgcccccaccccatgagcctgagcctgagccagcccggccctgcccccagccctgccctgacagcccctcctccagcctatgccaccctgggcccccggcccagccctgggggcagcgctggggccagcagcagcacctgccccctgggcggcccctag

SEQ ID NO: 60373 - DNA, 2187 bp, Artificial Sequence
  derived and/or modified sequence
atgggcatggcccggggcagcctgacccgggtgcccggcgtgatgggggaggggacccagggtcctgagctaagcctggaccctgacccgtgttcgcctcagagcactcctggacttatgaaaggcaacaagctggaggaacaggatcctaggcctctgcagcctattcccgggttgatggagggtaacaaattagaagagcaggactcatctccaccacagtccacacccgggctgatgaaaggtaacaaacgagaggagcaaggcttaggtccagagccagccgctccgcagcagccaacagcagaggaagaggcccttattgagttccaccgctcttacagggaattatttgagttcttttgcaataataccactatacatggagcaataaggctcgtctgttcccaacacaatcggatgaagacagcattctgggccgtcctgtggctctgcaccttcggtatgatgtattggcagttcggcctcctgttcggagagtatttttcctatcctgtgagcttaaatattaatttgaatagcgataaactggtttttcccgccgtgacaatctgcaccctcaacccctataggtaccccgagatcaaagaagaactggaagaattggacaggatcaccgaacaaaccctcttcgacctctataaatattcttcctttacgactcttgtggcgggtagtcgctctaggcgggatctccgggggacgctgcctcatccactccagcgactgcgggtgccgcctcccccccatggtgctaggagagcacgctctgtggcgtccagtctgcgggacaacaacccacaggtcgattggaaggactggaagatcggatttcaactgtgcaaccaaaataagagtgattgcttctaccagacatactcttccggtgtcgatgccgtcagagagtggtacagattccactacatcaacattctgtctagattgcctgaaaccttgccaagcttggaagaagacaccttaggcaactttatctttgcatgtagatttaaccaagtcagttgcaaccaagccaattactcacactttcaccacccaatgtatggcaattgttacaccttcaacgacaaaaacaatagcaatctctggatgagcagcatgcccggaatcaataacggcctttccctcatgctacgcgctgaacagaacgacttcattccactcttatccacggtcaccggtgcacgtgtgatggtccacggacaggacgagcctgcatttatggacgatggcggttttaatttgcgacctggagtagagacatctataagcatgcgcaaggagacactggatcgcctgggtggagactatggtgattgcacgaagaacggatcagacgtgcctgtcgaaaatctgtatccatctaagtacacacagcaggtctgcatccactcctgtttccaggagagtatgataaaagaatgtggctgcgcatatatcttttacccacggccgcagaatgtagaatactgcgactaccgaaagcactcatcctggggatattgctactacaagttgcaagttgatttcagctctgatcatctgggctgtttcactaagtgccgcaagccatgttccgtgacaagctaccagctctccgccggctattctagatggccatcagtgaccagccaggaatgggtgtttcaaatgttatcacgacagaacaactacacagtgaataacaagcgaaatggagttgccaaggtcaacatttttttcaaggaattaaactacaaaactaattccgaatccccgtctgtgaccatggttaccctgctgtccaatttgggctcacagtggagcctctggttcggttctagcgtgctgtccgtcgtagagatggccgaactcgtttttgacctgctggttatcatgtttctgatgcttttacgaaggtttcgcagtaggtactggagccctggtaggggtggccggggcgcccaggaggttgcctctacgctggcaagttcccctccatcgcacttctgccctcacccaatgagtctctccctcagccagcctgggccagcgccttctcctgcgctgacagcacctcctcccgcctatgcaaccctggggccaaggccatctccaggtggcagcgctggggcgtcaagtagcacctgccccctgggcggcccctag

SEQ ID NO: 60374 - DNA, 2187 bp, Artificial Sequence
  derived and/or modified sequence
atgggcatggcacggggttcattaacccgggtccccggtgttatgggggaaggcacacagggccctgagctgagcctcgaccctgacccttgttccccacagagcactcccggactgatgaagggtaataagctcgaggagcaggatcctcggccactacaaccaatacctggcctcatggagggaaacaagctcgaggaacaggattcatcccctcctcagagtacccccggtttaatgaagggaaacaaacgtgaggaacagggcctcggtcccgaacccgctgctccacagcagcctacggccgaggaggaggctctgatcgagttccaccggtcctaccgggagctgttcgagttcttctgcaataacaccacgattcacggcgcaatcaggctagtgtgttcccagcataacaggatgaaaactgccttttgggctgtgttatggctgtgtaccttcggtatgatgtattggcagttcgggttattattcggtgagtatttttcctaccccgtcagcctcaatatcaacctgaactccgacaaacttgtgttccctgccgtcacaatctgcaccctcaatccctaccgctacccagagatcaaagaggagttagaagaactggacagaattactgagcaaacattgttcgacctctataaatacagttcctttactactttagtggctggatcaaggtctaggagagacctacgaggcaccttgccccatccgctgcagcgcctcagggtacctccgcctcctcacggcgctagaagggcccgttcagttgcttcttctctgagagataataatcctcaggtggattggaaagattggaagattggtttccagctgtgcaatcagaacaagagtgattgcttctaccagacctattctagtggagtcgatgcagtccgcgaatggtaccgttttcattacatcaatatcctgtctagactcccagaaacactcccttctctggaggaggataccctaggcaacttcatttttgcctgcagatttaaccaggtgagctgtaaccaggcgaattattcacacttccaccatccaatgtacggcaattgttacacgttcaacgacaagaataactctaacctgtggatgtcttctatgccgggtatcaataacggattaagcctaatgctaagggcagaacaaaatgacttcatccctcttctgtccactgttacaggcgctagagttatggtccatggacaagacgagccagcttttatggatgacggtggtttcaatctcaggcctggcgtggaaacttcaatttccatgcggaaggagaccctggacagacttggcggagactacggagactgcactaaaaacggtagtgacgtacccgtggaaaatctgtacccctctaagtatactcagcaggtctgcattcactcctgctttcaagaatccatgattaaggaatgtggctgcgcttacatcttttacccgcgtccccagaatgtggaatattgtgactatagaaaacactcctcttggggttattgctattacaagttgcaggtagatttctcttccgaccatcttggatgcttcaccaagtgccgcaagccctgtagcgtcacctcatatcagctgtccgccggatatagtcggtggccctctgtgacaagccaggaatgggtgtttcaaatgctctctcgccagaacaactatacagttaataataaaagaaacggggtggccaaagttaatatttttttcaaagaactgaattacaagactaactctgagtctccctcagtcaccatggttaccttactgagcaacctgggcagccaatggagcctctggttcggttcttcagtgctgagcgtggtcgagatggcagagcttgtgttcgacctcctcgtgattatgttcctcatgctgctccggaggttccggagccgctactggagccctgggagaggaggtagaggagcccaggaggtggcaagtacattagccagcagtcccccttcccacttctgtccccaccctatgagtttgtctctctcccagccagggcctgccccttcgcctgcgctgacagcacctccccctgcatacgccactttaggcccacgcccttctccgggaggatcagccggtgcctctagcagtacatgtccactcggtggcccttag

SEQ ID NO: 60375 - DNA, 3481 bp, Artificial Sequence
  derived and/or modified sequence
aaacagaaggcagatagagagggagtgagaggcaggagctgagacacagatcctggaggaagaagaccaaaggaagggggcagagacagaaagggaggtgctaggacaaaactcgaaaggtggccctatcagggaagcagaggagaggccgttctagggaagcccagctccggcacttttggccccaactcccgcaggtctgctggctccaggaaaggtggaggagggagggaggagtgggagaatgtgggcgcagggtgggacatgggcatggccaggggcagcctcactcgggttccaggggtgatgggagagggcactcagggcccagagctcagccttgaccctgacccttgctctccccaatccactccggggctcatgaaggggaacaagctggaggagcaggaccctagacctctgcagcccataccaggtctcatggaggggaacaagctggaggagcaggactctagccctccacagtccactccagggctcatgaaggggaacaagcgtgaggagcaggggctgggccccgaacctgcggcgccccagcagcccacggcggaggaggaggccctgatcgagttccaccgctcctaccgagagctcttcgagttcttctgcaacaacaccaccatccacggcgccatccgcctggtgtgctcccagcacaaccgcatgaagacggccttctgggcagtgctgtggctctgcacctttggcatgatgtactggcaattcggcctgcttttcggagagtacttcagctaccccgtcagcctcaacatcaacctcaactcggacaagctcgtcttccccgcagtgaccatctgcaccctcaatccctacaggtacccggaaattaaagaggagctggaggagctggaccgcatcacagagcagacgctctttgacctgtacaaatacagctccttcaccactctcgtggccggctcccgcagccgtcgcgacctgcgggggactctgccgcaccccttgcagcgcctgagggtcccgcccccgcctcacggggcccgtcgagcccgtagcgtggcctccagcttgcgggacaacaacccccaggtggactggaaggactggaagatcggcttccagctgtgcaaccagaacaaatcggactgcttctaccagacatactcatcaggggtggatgcggtgagggagtggtaccgcttccactacatcaacatcctgtcgaggctgccagagactctgccatccctggaggaggacacgctgggcaacttcatcttcgcctgccgcttcaaccaggtctcctgcaaccaggcgaattactctcacttccaccacccgatgtatggaaactgctatactttcaatgacaagaacaactccaacctctggatgtcttccatgcctggaatcaacaacggtctgtccctgatgctgcgcgcagagcagaatgacttcattcccctgctgtccacagtgactggggcccgggtaatggtgcacgggcaggatgaacctgcctttatggatgatggtggctttaacttgcggcctggcgtggagacctccatcagcatgaggaaggaaaccctggacagacttgggggcgattatggcgactgcaccaagaatggcagtgatgttcctgttgagaacctttacccttcaaagtacacacagcaggtgtgtattcactcctgcttccaggagagcatgatcaaggagtgtggctgtgcctacatcttctatccgcggccccagaacgtggagtactgtgactacagaaagcacagttcctgggggtactgctactataagctccaggttgacttctcctcagaccacctgggctgtttcaccaagtgccggaagccatgcagcgtgaccagctaccagctctctgctggttactcacgatggccctcggtgacatcccaggaatgggtcttccagatgctatcgcgacagaacaattacaccgtcaacaacaagagaaatggagtggccaaagtcaacatcttcttcaaggagctgaactacaaaaccaattctgagtctccctctgtcacgatggtcaccctcctgtccaacctgggcagccagtggagcctgtggttcggctcctcggtgttgtctgtggtggagatggctgagctcgtctttgacctgctggtcatcatgttcctcatgctgctccgaaggttccgaagccgatactggtctccaggccgagggggcaggggtgctcaggaggtagcctccaccctggcatcctcccctccttcccacttctgcccccaccccatgtctctgtccttgtcccagccaggccctgctccctctccagccttgacagcccctccccctgcctatgccaccctgggcccccgcccatctccagggggctctgcaggggccagttcctccacctgtcctctgggggggccctgagagggaaggagaggtttctcacaccaaggcagatgctcctctggtgggagggtgctggccctggcaagattgaaggatgtgcagggcttcctctcagagccgcccaaactgccgttgatgtgtggaggggaagcaagatgggtaagggctcaggaagttgctccaagaacagtagctgatgaagctgcccagaagtgccttggctccagccctgtaccccttggtactgcctctgaacactctggtttccccacccaactgcggctaagtctctttttcccttggatcagccaagcgaaacttggagctttgacaaggaactttcctaagaaaccgctgataaccaggacaaaacacaaccaagggtacacgcaggcatgcacgggtttcctgcccagcgacggcttaagccagcccccgactggcctggccacactgctctccagtagcacagatgtctgctcctcctcttgaacttgggtgggaaaccccacccaaaagccccctttgttacttaggcaattccccttccctgactcccgagggctagggctagagcagacccgggtaagtaaaggcagacccagggctcctctagcctcatacccgtgccctcacagagccatgccccggcacctctgccctgtgtctttcatacctctacatgtctgcttgagatatttcctcagcctgaaagtttccccaaccatctgccagagaactcctatgcatcccttagaaccctgctcagacaccattacttttgtgaacgcttctgccacatcttgtcttccccaaaattgatcactccgccttctcctgggctcccgtagcacactataacatctgctggagtgttgctgttgcaccatactttcttgtacatttgtgtctcccttcccaactagactgtaagtgccttgcggtcagggactgaatcttgcccgtttatgtatgctccatgtctagcccatcatcctgcttggagcaagtaggcaggagctcaataaatgtttgttgcatgaaggaa

SEQ ID NO: 60376 - DNA, 2010 bp, Artificial Sequence
  derived and/or modified sequence
atggagggcaacaagctggaggagcaggacagcagccccccccagagcacccccggcctgatgaagggcaacaagagagaggagcagggcctgggccccgagcccgccgccccccagcagcccaccgccgaggaggaggccctgatcgagttccacagaagctacagagagctgttcgagttcttctgcaacaacaccaccatccacggcgccatcagactggtgtgcagccagcacaacagaatgaagaccgccttctgggccgtgctgtggctgtgcaccttcggcatgatgtactggcagttcggcctgctgttcggcgagtacttcagctaccccgtgagcctgaacatcaacctgaacagcgacaagctggtgttccccgccgtgaccatctgcaccctgaacccctacagataccccgagatcaaggaggagctggaggagctggacagaatcaccgagcagaccctgttcgacctgtacaagtacagcagcttcaccaccctggtggccggcagcagaagcagaagagacctgagaggcaccctgccccaccccctgcagagactgagagtgcccccccccccccacggcgccagaagagccagaagcgtggccagcagcctgagagacaacaacccccaggtggactggaaggactggaagatcggcttccagctgtgcaaccagaacaagagcgactgcttctaccagacctacagcagcggcgtggacgccgtgagagagtggtacagattccactacatcaacatcctgagcagactgcccgagaccctgcccagcctggaggaggacaccctgggcaacttcatcttcgcctgcagattcaaccaggtgagctgcaaccaggccaactacagccacttccaccaccccatgtacggcaactgctacaccttcaacgacaagaacaacagcaacctgtggatgagcagcatgcccggcatcaacaacggcctgagcctgatgctgagagccgagcagaacgacttcatccccctgctgagcaccgtgaccggcgccagagtgatggtgcacggccaggacgagcccgccttcatggacgacggcggcttcaacctgagacccggcgtggagaccagcatcagcatgagaaaggagaccctggacagactgggcggcgactacggcgactgcaccaagaacggcagcgacgtgcccgtggagaacctgtaccccagcaagtacacccagcaggtgtgcatccacagctgcttccaggagagcatgatcaaggagtgcggctgcgcctacatcttctaccccagaccccagaacgtggagtactgcgactacagaaagcacagcagctggggctactgctactacaagctgcaggtggacttcagcagcgaccacctgggctgcttcaccaagtgcagaaagccctgcagcgtgaccagctaccagctgagcgccggctacagcagatggcccagcgtgaccagccaggagtgggtgttccagatgctgagcagacagaacaactacaccgtgaacaacaagagaaacggcgtggccaaggtgaacatcttcttcaaggagctgaactacaagaccaacagcgagagccccagcgtgaccatggtgaccctgctgagcaacctgggcagccagtggagcctgtggttcggcagcagcgtgctgagcgtggtggagatggccgagctggtgttcgacctgctggtgatcatgttcctgatgctgctgagaagattcagaagcagatactggagccccggcagaggcggcagaggcgcccaggaggtggccagcaccctggccagcagcccccccagccacttctgcccccaccccatgagcctgagcctgagccagcccggccccgcccccagccccgccctgaccgcccccccccccgcctacgccaccctgggccccagacccagccccggcggcagcgccggcgccagcagcagcacctgccccctgggcggcccctag

SEQ ID NO: 60377 - DNA, 2010 bp, Artificial Sequence
  derived and/or modified sequence
atggagggtaacaagttagaggaacaggattctagcccaccgcagagtaccccaggccttatgaaagggaataaaagagaggaacagggactgggcccagaaccagccgctcctcagcaaccgactgcagaggaagaggccttaattgagttccatagatcgtatagggagttattcgaatttttttgtaacaacactactattcacggggccatacgcttagtttgtagccaacacaacagaatgaagaccgcgttttgggctgttctgtggctttgcaccttcggaatgatgtattggcaatttggtctgctgtttggagaatacttttcttatccagtgtccctaaatattaatctgaactccgacaagctggtttttcccgccgtcactatttgcaccctgaatccataccggtaccctgaaattaaagaagagctagaagagctggacaggatcactgagcaaacactttttgatctgtacaagtatagctccttcactacattagtggctggttctaggtcccggcgagatcttcggggcacgttgcctcacccactccagagattaagagtgcccccccccccccacggtgcgcgaagagctaggagcgttgctagcagtctccgtgacaacaatccgcaggttgactggaaagattggaaaatcggatttcagttgtgcaaccagaacaagtccgactgtttctaccagacttattctagtggcgttgacgcagtgagagaatggtaccgcttccattacataaatatactctctcggttacctgaaaccctgccttctctcgaggaagacactcttgggaattttatcttcgcctgccggttcaaccaggtctcctgcaaccaggctaattactcacactttcatcatcctatgtacggcaactgttacaccttcaacgacaagaataattcaaacttatggatgagctcaatgcctggaatcaacaatggcctttctctgatgctcagagctgagcaaaacgacttcatccccttactttctacggtcacaggggctagggtgatggtgcacggtcaagatgagcccgcatttatggacgatgggggtttcaacctacgtccgggcgtggagacgagtattagtatgaggaaggagaccctggatcggctgggtggagactacggagactgtaccaagaacgggagtgatgtgccagtggagaatctgtacccttctaaatatacccagcaggtctgtatccacagctgttttcaggagtctatgattaaagagtgcggttgtgcttacatcttctatccgaggccacagaacgtcgagtactgtgactaccgcaagcactcgtcgtggggctattgctattacaaactgcaggtcgatttcagttccgaccatttgggatgttttactaaatgcaggaaaccttgctctgttacaagttatcagctctctgctggatactcaagatggccctcagtcacttctcaggagtgggtgttccagatgttgtcccgacagaacaactatacagtgaacaataagaggaatggagtggccaaggtgaatattttcttcaaggaactcaactacaaaacaaactctgagtctccttccgtaacaatggtgactctgctaagtaatttgggctcccagtggagcctttggttcggcagctccgtgttaagcgtagtggaaatggcggagctggtcttcgatttactggttataatgttccttatgctcttgagaaggtttagatctcggtactggtctccagggagaggggggcgcggcgcgcaggaggtcgcttccaccctggccagtagcccccctagccatttttgtcctcatccaatgtcgctatcactgtcacaaccaggaccagccccctctcctgccctcaccgctcccccccccgcttacgcgaccctggggcctaggccctccccaggcggatccgctggcgcctcatcaagtacttgcccccttggggggccatag

SEQ ID NO: 60378 - DNA, 2010 bp, Artificial Sequence
  derived and/or modified sequence
atggagggcaacaagctggaggagcaggacagcagccccccccagagcaccccaggcctgatgaagggcaacaagcgggaggagcagggcctgggccctgagcctgctgccccccagcagcccacagctgaggaggaggccctgattgagttccacaggagctaccgggagctgtttgagttcttctgcaacaacaccaccatccatggagccatccggctggtgtgcagccagcacaacaggatgaagacagccttctgggccgtgctgtggctgtgcaccttcggcatgatgtactggcagtttggcctgctgtttggagagtacttctcctaccctgtgtccctgaacatcaacctgaacagcgacaagctggtgtttcctgctgtgaccatctgcaccctgaacccctaccgctacccagagatcaaggaggagctggaggagctggaccgcatcacagagcagaccctgtttgacctgtacaagtacagcagcttcaccaccctggtggccggcagccgcagcagaagagacctgcggggcaccctgccccaccccctgcagaggctgcgggtgcccccaccaccccacggggcccggcgggcccggtctgtggccagcagcctgcgggacaacaacccccaggtggactggaaggactggaagattggcttccagctgtgcaaccagaacaagagtgactgcttctaccagacctacagcagtggagtggatgctgtgcgggagtggtaccgcttccactacatcaacatcctgagccggctgcctgagaccctgcccagcctggaggaggacaccctgggcaacttcatctttgcctgccgcttcaaccaggtgtcctgcaaccaggccaactacagccacttccaccaccccatgtatggcaactgctacaccttcaatgacaagaacaacagcaacctgtggatgagctccatgcctggcatcaacaacggcctgagcctgatgctgcgggcagagcagaatgacttcatccccctgctgagcacagtgactggagcccgggtgatggtgcacggccaggatgagcccgccttcatggatgatggcggcttcaacctgcggcctggggtggagaccagcatctccatgaggaaggagaccctggaccggctgggcggggactatggagactgcaccaagaatggaagtgatgtgcctgtggagaacctgtaccccagcaagtacacccagcaggtgtgcatccacagctgcttccaggagagcatgatcaaggaatgtggctgtgcctacatcttctacccccggccccagaatgtggagtactgtgactacaggaagcacagctcctggggctactgctactacaagctgcaggtggacttcagcagtgaccacctgggctgcttcaccaagtgcaggaagccctgcagcgtgaccagctaccagctgtctgctggctacagccgctggcccagcgtgaccagccaggagtgggtgttccagatgctgagccggcagaacaactacacagtgaacaacaagagaaatggagtggccaaggtgaacatcttcttcaaggagctgaactacaagaccaacagcgagagccccagcgtgaccatggtgaccctgctgagcaacctgggcagccagtggagcctgtggtttggcagctctgtgctgtctgtggtggagatggccgagctggtgtttgacctgctggtgatcatgttcctgatgctgctgcggcgcttccgcagccgctactggagccctggccggggcggccgcggggcccaggaggtggccagcaccctggccagcagcccccccagccacttctgcccccaccccatgagcctgagcctgagccagcccggccctgcccccagccctgccctgacagcccctcctccagcctatgccaccctgggcccccggcccagccctgggggcagcgctggggccagcagcagcacctgccccctgggcggcccctag

SEQ ID NO: 60379 - DNA, 2010 bp, Artificial Sequence
  derived and/or modified sequence
atggagggcaacaagctggaggagcaggacagcagccccccccagagtacgccggggcttatgaaaggaaacaagcgcgaggagcagggactcggtccggaaccagctgcaccccagcaacccacagctgaggaggaggctctcatcgaatttcatagatcttatcgggaactgttcgagttcttttgcaacaacacgacaattcatggtgcaattagacttgtgtgttcacagcacaaccgcatgaaaaccgcattctgggccgtgctatggctgtgcaccttcgggatgatgtattggcagttcggattactgttcggagaatatttctcctacccagtcagcctgaatattaacttaaacagtgataaactggtgttccccgcagtgactatatgcacgctgaatccctatcgctatccagaaattaaggaagaattggaggagctggacagaataaccgagcaaaccctgtttgatctctacaagtattcctccttcacaaccctggttgctggtagccggagtaggcgggatctgagagggactttacctcacccactccagcgcctccgggtgcctcctcccccccatggcgccaggagggcccggagtgtagctagctccctccgcgacaataaccctcaggtggattggaaagactggaagatcggctttcaactgtgcaaccagaacaagagcgattgtttctatcagacgtattctagcggcgtggacgccgtgcgagaatggtatcggtttcattatatcaacattttatcccggctacctgagactttaccgtccctggaagaggacacactgggtaattttatctttgcctgccgcttcaatcaagtgtcctgcaaccaggcaaactacagtcacttccaccatcctatgtatgggaactgctacacctttaacgataagaacaattccaatctctggatgtcatccatgccaggtattaacaatggtctctcactgatgctgcgtgcagagcaaaatgactttattcctcttttgtctaccgttactggcgcaagggtcatggtgcacggccaagacgagcccgcgtttatggatgatgggggattcaatttgcggcctggagttgaaacatccatatctatgcgcaaggagaccctggaccgactaggtggcgattacggcgactgcacaaagaatggaagtgatgtgcccgtggaaaacctgtacccatccaaatatacacagcaggtttgcattcactcgtgctttcaagagagcatgattaaagaatgcggttgcgcatatatcttttatccaagacctcagaacgtagagtattgcgactatagaaaacattcttcttggggctattgctactacaagttgcaggtagattttagctcagatcatctaggatgcttcacaaaatgccgtaagccttgcagcgtgactagctatcagttaagcgccggatacagccgctggcctagcgttacctcccaggagtgggtgttccagatgctgtctaggcaaaataattacacagttaataataaaagaaatggggtggccaaggtaaacatcttttttaaagaattaaattacaaaaccaacagcgagtccccgtctgtgaccatggtgacattgctgtcaaatcttggctcacagtggagcctgtggtttggtagctctgtgttgtcagtggtagagatggccgaactggtattcgacctgctcgtgataatgttcttgatgcttttacgccgcttccgatcaaggtattggtcgcccggcaggggagggcggggggcccaggaggtggcgagtaccctagccagctctccacctagtcacttctgcccacacccaatgtctctgagtttaagccagcccggacccgccccgtcaccggcccttactgccccaccacccgcatatgcaacactgggccctaggccttcacccggcggtagtgcaggtgcctcctctagtacttgccctctaggcgggccttag

SEQ ID NO: 60380 - DNA, 2010 bp, Artificial Sequence
  derived and/or modified sequence
atggaaggtaacaagctggaggaacaggacagcagccctcctcagagtaccccagggctgatgaagggcaacaagcgcgaggaacagggactgggaccagagcctgcagccccacaacagcctacagccgaggaggaagccctgattgagttccaccggtcctatagagaactgttcgagtttttttgcaataacaccactattcacggcgcaatccggctagtatgtagtcaacataaccgcatgaagacggccttttgggccgttctctggctctgcacattcggcatgatgtattggcagtttggcttgctatttggcgaatatttcagttaccccgtttcgctcaacattaacctgaatagcgacaaacttgtcttccccgcagtcacgatctgcactctcaacccttatcgttaccctgaaatcaaggaggagctggaagaacttgaccgcattaccgagcagaccttgttcgatctgtataagtactcctcattcactacattggtagctggcagcagaagccgaagagatctgcgtggaacacttccacatcctctgcagagactgagagtcccaccgcctcctcacggtgccagacgggctcggagcgtcgcttcgagtctccgtgataataaccctcaggtcgactggaaagattggaagattgggttccagctgtgcaaccagaataagtccgattgtttttaccagacttactcttccggagttgacgccgtcagagagtggtataggttccactacataaacatcttaagccgattacctgaaaccttgcctagcctcgaagaggatacgttgggtaattttatctttgcatgtcgcttcaatcaggtcagctgtaaccaggcaaattatagtcactttcaccacccaatgtacggcaactgttacacattcaatgacaaaaacaactctaatctctggatgtctagcatgccgggaatcaacaatgggctgtcactgatgttgcgagccgaacagaacgattttataccccttctgagcaccgtcaccggggcaagagtgatggtgcatggccaggatgagcctgccttcatggatgatgggggttttaacttgcgccctggcgttgagacgtccatttcaatgagaaaggagaccctggacagactggggggtgattatggcgactgcactaagaacggctctgatgttcctgtcgagaatctgtacccctcaaaatacacgcagcaagtttgcattcactcctgtttccaagagagcatgatcaaagaatgcggctgcgcttatattttctatcccagaccacagaatgtagagtactgtgactatcggaagcactcttcgtggggctattgctactataagctccaagtggacttttcaagcgaccacctggggtgttttaccaaatgccggaagccttgttctgtgacatcttatcagctgagcgctggctatagccggtggcctagtgttacttcccaggagtgggtgtttcaaatgttgtctcgacagaacaattatacggtgaataataagaggaatggcgtcgccaaagtgaacatatttttcaaggaattgaattacaaaaccaattcggagtccccctcagtgaccatggtcacccttcttagcaatctcgggagccagtggtctctgtggtttggctcgtcagtgctgtccgttgtcgagatggctgagctggtgtttgatcttctggtcatcatgtttctaatgctgttgcggcgatttcggagtcgctactggtcgccaggcagaggtggcaggggcgcacaggaagtggcgtctacactggcttccagcccaccatcccatttttgcccacacccaatgagcctgtccctgtcccaacctggaccagcgccatcccccgctttgactgctccgccaccggcttacgccacgttagggcctagaccaagccccggagggagcgcgggagctagttcctcaacgtgcccccttggcggtccatag

SEQ ID NO: 60381 - DNA, 2076 bp, Artificial Sequence
  derived and/or modified sequence
atggagggcaataagctggaagaacaggatagctctccccctcagagtacccccggcctgatgaaaggcaataagcgggaggagcaggggctcggccccgagccagccgccccacagcagcccacggctgaagaggaggccttgatcgagtttcatcggtcatatcgcgaattatttgagttcttctgtaataataccacaatccatggagcaatccgcttggtgtgtagtcaacacaacaggatgaaaaccgccttctgggctgtcctgtggctctgcacctttggcatgatgtactggcagttcggtctgctgtttggtgaatatttctcttatcccgtgtctctgaatatcaatctaaactcggataagttggtgttccccgccgttaccatttgcacattgaacccgtaccgctatccggaaatcaaagaggagttggaggagctcgataggattaccgagcagacactatttgacttgtacaagtatagttccttcaccactttggtcgctgggtccagaagcaggcgcgacctgcgcggcacgttgccgcaccccttgcaaaggctgagagtgccgcctccccctcacggagccaggcgggcgagaagcgtcgcctccagcctccgagacaataacccccaagtcgattggaaggactggaaaattggcttccagctgtgcaaccagaacaagagcgactgcttttaccagacgtactcttccggtgtggatgctgtaagggagtggtacaggtttcactatataaacatactctccaggctaccggagaccctcccgtcacttgaggaggatacacttggcaacttcatttttgcctgtcgatttaatcaggtcagttgcaatcaggcaaattattctcactttcatcaccccatgtatggaaattgttacacatttaacgataaaaacaatagtaacctgtggatgagttctatgccgggtatcaacaatgggctgagcctgatgctgcgggcggagcaaaatgactttatccccctactgagtacagtcacaggcgctcgggttatggtgcatggccaggatgagccagcgttcatggacgacggaggtttcaatttgagacccggagtcgagacatccatatcaatgagaaaggaaaccctggataggcttggcggcgattacggggattgcacaaaaaatggttcagacgttcctgtagaaaacctgtatccttcaaaatacacccaacaggtgtgtatccatagttgtttccaggagagtatgatcaaagagtgtggctgcgcgtatatattttatccgagaccccaaaatgtcgagtattgcgattataggaagcacagctcatgggggcaagtgcggtctctcactccggtgatccccgccctgtgggaggcggaagccgggcgctccaggggctactgttattataagttacaggtggatttttcatccgatcatctggggtgttttactaagtgcaggaagccatgctctgttacatcataccagttgtctgctgggtatagcagatggccgagcgtgacaagccaggaatgggttttccaaatgctgtcacgccagaataattacacagtgaacaacaaacgtaacggagtggccaaggtgaatatcttctttaaggagcttaattacaagaccaattcagaatctccgtcagtgacaatggttacactgctctcgaatctgggatcgcagtggagcctgtggttcggttcatctgtgctgtcggtggtggagatggccgagctcgtctttgatcttcttgtgataatgttcctgatgctcttaaggcgttttcgttcgaggtattggtctccgggcagaggtgggcgaggagctcaggaggtagcttctactttagcttcttctcctccatcccacttttgcccccatccgatgagtctgtccctgagccagcccggacccgcgccctctccagccctgaccgcgcctcctcctgcatacgcaactctgggaccgcggcctagccctgggggctctgctggcgcctcttcatcaacttgccctctaggcgggccttag

SEQ ID NO: 60382 - DNA, 2076 bp, Artificial Sequence
  derived and/or modified sequence
atggagggcaacaagctggaggagcaggacagcagccccccccagagcaccccaggcctgatgaagggcaacaagcgggaggagcagggcctgggccctgagcctgctgccccccagcagcccacagctgaggaggaggccctgattgagttccacaggagctaccgggagctgtttgagttcttctgcaacaacaccaccatccatggagccatccggctggtgtgcagccagcacaacaggatgaagacagccttctgggccgtgctgtggctgtgcaccttcggcatgatgtactggcagtttggcctgctgtttggagagtacttctcctaccctgtgtccctgaacatcaacctgaacagcgacaagctggtgtttcctgctgtgaccatctgcaccctgaacccctaccgctacccagagatcaaggaggagctggaggagctggaccgcatcacagagcagaccctgtttgacctgtacaagtacagcagcttcaccaccctggtggccggcagccgcagcagaagagacctgcggggcaccctgccccaccccctgcagaggctgcgggtgcccccaccaccccacggggcccggcgggcccggtctgtggccagcagcctgcgggacaacaacccccaggtggactggaaggactggaagattggcttccagctgtgcaaccagaacaagagtgactgcttctaccagacctacagcagtggagtggatgctgtgcgggagtggtaccgcttccactacatcaacatcctgagccggctgcctgagaccctgcccagcctggaggaggacaccctgggcaacttcatctttgcctgccgcttcaaccaggtgtcctgcaaccaggccaactacagccacttccaccaccccatgtatggcaactgctacaccttcaatgacaagaacaacagcaacctgtggatgagctccatgcctggcatcaacaacggcctgagcctgatgctgcgggcagagcagaatgacttcatccccctgctgagcacagtgactggagcccgggtgatggtgcacggccaggatgagcccgccttcatggatgatggcggcttcaacctgcggcctggggtggagaccagcatctccatgaggaaggagaccctggaccggctgggcggggactatggagactgcaccaagaatggaagtgatgtgcctgtggagaacctgtaccccagcaagtacacccagcaggtgtgcatccacagctgcttccaggagagcatgatcaaggaatgtggctgtgcctacatcttctacccccggccccagaatgtggagtactgtgactacaggaagcacagctcctggggccaggtgcgcagcctgacccctgtgatcccagccctgtgggaggccgaggccggccgcagccggggctactgctactacaagctgcaggtggacttcagcagtgaccacctgggctgcttcaccaagtgcaggaagccctgcagcgtgaccagctaccagctgtctgctggctacagccgctggcccagcgtgaccagccaggagtgggtgttccagatgctgagccggcagaacaactacacagtgaacaacaagagaaatggagtggccaaggtgaacatcttcttcaaggagctgaactacaagaccaacagcgagagccccagcgtgaccatggtgaccctgctgagcaacctgggcagccagtggagcctgtggtttggcagctctgtgctgtctgtggtggagatggccgagctggtgtttgacctgctggtgatcatgttcctgatgctgctgcggcgcttccgcagccgctactggagccctggccggggcggccgcggggcccaggaggtggccagcaccctggccagcagcccccccagccacttctgcccccaccccatgagcctgagcctgagccagcccggccctgcccccagccctgccctgacagcccctcctccagcctatgccaccctgggcccccggcccagccctgggggcagcgctggggccagcagcagcacctgccccctgggcggcccctag

SEQ ID NO: 60383 - DNA, 2076 bp, Artificial Sequence
  derived and/or modified sequence
atggagggcaacaagctggaggagcaggacagcagccccccccagtccactccgggcttaatgaaagggaacaaacgagaggagcagggcctaggaccagaacctgcagccccccaacagcccactgctgaggaagaggcattgatcgagttccaccggtcatacagagaactgttcgagtttttttgtaacaatacgaccattcacggagcaatcagactagtgtgctcccagcataaccgcatgaaaactgccttttgggcagttttgtggctgtgcactttcggaatgatgtactggcagtttgggctgctgtttggagaatattttagctaccctgtgagcctcaatattaatctcaatagcgacaaattggtgttccctgcagtgacaatttgcaccttaaacccctacaggtatccagaaatcaaagaagaactcgaagagctggaccgcatcactgaacagactctcttcgatctgtacaagtattcctctttcaccactctcgttgccggcagtagaagcagacgggatttgaggggcaccctccctcaccctctccagcggttacgggttccacctcctccccatggggcacgtcgagcaaggtcagtcgccagttcgctccgcgacaataacccccaagtagattggaaggactggaagataggctttcagttatgcaatcagaataaatctgactgtttctaccagacctacagctccggcgtggacgctgtgagggaatggtatcggtttcattatattaatatcctctcacggcttccagagaccctcccctcattggaggaagacacgctaggaaattttatcttcgcatgcaggttcaatcaggttagttgcaaccaggctaattacagccatttccaccatcccatgtacggcaattgctacaccttcaacgataagaacaatagtaatctgtggatgtcctctatgcctgggattaataacggcctatccctgatgctgagggcagagcaaaacgattttattccattgctcagcacggtgacaggggctcgggtaatggtgcatggccaggatgaacctgcttttatggatgatggcggcttcaacctaagaccgggagtggagacaagcatttctatgagaaaggagacactggaccgcctagggggggattatggcgactgcacaaagaatggctccgatgtgcctgtagagaatctatacccatcaaaatatacacagcaggtgtgcatccatagctgcttccaggaaagtatgatcaaggagtgtggatgcgcctatatcttttatccgaggcctcagaacgtagagtactgcgactacagaaagcactcatcctggggtcaggtccggagcctcaccccagtgattccagccctctgggaggccgaagcgggtaggtctcgaggatactgctattacaagctccaagtcgacttctctagcgatcacctcggatgctttaccaagtgtcgcaaaccttgcagtgtaaccagctaccagttgtctgcaggctactctcggtggcccagcgtgacctcccaggaatgggtgttccagatgctatctagacagaacaattataccgtaaacaacaaacggaatggcgtggcaaaggtcaatatcttttttaaagagctcaattacaaaaccaactcagagtccccatctgtcaccatggtgactctactgagcaacctagggtcacagtggtccttatggtttggttcttcagtgttatccgtagtggagatggcagaacttgtgttcgacttactggtcattatgttcctgatgttacttcgccgcttcaggagtaggtactggtcacccggaaggggagggcgtggcgcccaggaagtggcgagtaccctcgccagttcacccccttctcatttctgtccacaccccatgagcttgagtctgtcacaaccgggaccagccccatcgcctgccctgaccgcacctccacccgcttacgcgaccctggggccccggccctccccaggggggtctgctggggcctcaagctccacctgtccgttgggcggtccctag

SEQ ID NO: 60384 - DNA, 2076 bp, Artificial Sequence
  derived and/or modified sequence
atggagggaaataaactcgaggaacaggattcgagtccaccacagtcaacgccagggcttatgaaggggaacaaacgggaagagcaaggacttggcccagagccggctgcgccacagcaacccactgcagaggaagaggctctgattgaatttcacagaagttacagggagctgttcgaatttttttgcaataacacaaccatccatggagccatccgcctggtctgttcgcagcacaataggatgaagaccgccttttgggcggtgctctggctctgtaccttcgggatgatgtactggcagttcgggctcctgtttggggagtacttctcatacccagtgtctctgaacatcaacctaaattccgataagttggtctttccggctgtgaccatttgtaccctgaatccttatcggtatcctgagattaaagaggagctggaggagttggataggatcaccgaacagaccctgttcgacctgtataaatatagctccttcacgacgcttgtggctgggtccaggtccagaagggatctgcggggtactctgccacaccctttacaacgtctacgagtgccgccacccccacacggagctaggcgtgcaaggtctgtggcctcctcgcttcgggacaacaaccctcaagtggactggaaggactggaagatcggcttccagctctgcaatcagaataaatctgattgcttctaccagacttactcaagtggcgtggacgcagtgcgggagtggtatcggtttcactatatcaacatcctctctcgtctacccgagactctcccctccctggaggaggatacattgggcaactttatttttgcttgccgattcaatcaggtttcttgcaatcaggctaactacagtcactttcaccatcccatgtacggtaactgctacactttcaacgataagaacaactcgaacctgtggatgagcagtatgcctggcattaacaatgggcttagccttatgcttagagctgaacagaatgatttcatcccactgctgtctactgtgactggggcaagagttatggtgcacgggcaagacgaaccagcctttatggacgacggcggtttcaatcttaggcccggagtcgaaacgtccatatctatgcggaaggagactctggatcgtctgggaggcgactacggcgactgtactaagaatgggtcagatgtcccagtcgagaacctttatccctccaagtacacccagcaggtgtgcatccatagctgttttcaagagtccatgataaaggagtgcgggtgcgcctatatcttttatccccgtccacagaacgtggaatattgtgattatagaaagcactcaagctggggtcaagtgagatcactcacacccgtgatccccgctctatgggaagctgaggctggacgcagtcggggatactgctattacaagctgcaggtggactttagtagcgaccaccttgggtgcttcaccaaatgcaggaagccctgttcagtgaccagttaccagctttctgctggctacagccggtggccttcagtgacaagtcaggagtgggtttttcaaatgctgtcgaggcagaataattacaccgtgaataataagcgtaatggcgttgcaaaggtgaatatcttcttcaaggaactgaactataaaactaacagtgaaagcccgtcagtcacaatggttacactcttgagcaacctgggtagccagtggtccctgtggttcggctcatcagtcttaagtgtggtggaaatggccgaactggtgttcgatctgttggtgatcatgtttctgatgctcctgcgcaggtttcgctctcgatactggagtcctggcagggggggaaggggtgcccaggaggttgccagcaccttggcttcgtctcccccaagtcacttttgtccacatcctatgtccttgtctttaagccagccaggccctgctcctagtcctgcccttaccgcccctccaccagcctacgccaccctggggcctaggcccagcccaggcggatccgcaggcgcaagcagtagtacatgcccactgggcggaccatag

SEQ ID NO: 60385 - DNA, 3135 bp, Artificial Sequence
  derived and/or modified sequence
ccggccagcgggcgggctccccagccaggccgctgcacctgtcaggggaacaagctggaggagcaggaccctagacctctgcagcccataccaggtctcatggaggggaacaagctggaggagcaggactctagccctccacagtccactccagggctcatgaaggggaacaagcgtgaggagcaggggctgggccccgaacctgcggcgccccagcagcccacggcggaggaggaggccctgatcgagttccaccgctcctaccgagagctcttcgagttcttctgcaacaacaccaccatccacggcgccatccgcctggtgtgctcccagcacaaccgcatgaagacggccttctgggcagtgctgtggctctgcacctttggcatgatgtactggcaattcggcctgcttttcggagagtacttcagctaccccgtcagcctcaacatcaacctcaactcggacaagctcgtcttccccgcagtgaccatctgcaccctcaatccctacaggtacccggaaattaaagaggagctggaggagctggaccgcatcacagagcagacgctctttgacctgtacaaatacagctccttcaccactctcgtggccggctcccgcagccgtcgcgacctgcgggggactctgccgcaccccttgcagcgcctgagggtcccgcccccgcctcacggggcccgtcgagcccgtagcgtggcctccagcttgcgggacaacaacccccaggtggactggaaggactggaagatcggcttccagctgtgcaaccagaacaaatcggactgcttctaccagacatactcatcaggggtggatgcggtgagggagtggtaccgcttccactacatcaacatcctgtcgaggctgccagagactctgccatccctggaggaggacacgctgggcaacttcatcttcgcctgccgcttcaaccaggtctcctgcaaccaggcgaattactctcacttccaccacccgatgtatggaaactgctatactttcaatgacaagaacaactccaacctctggatgtcttccatgcctggaatcaacaacggtctgtccctgatgctgcgcgcagagcagaatgacttcattcccctgctgtccacagtgactggggcccgggtaatggtgcacgggcaggatgaacctgcctttatggatgatggtggctttaacttgcggcctggcgtggagacctccatcagcatgaggaaggaaaccctggacagacttgggggcgattatggcgactgcaccaagaatggcagtgatgttcctgttgagaacctttacccttcaaagtacacacagcaggtgtgtattcactcctgcttccaggagagcatgatcaaggagtgtggctgtgcctacatcttctatccgcggccccagaacgtggagtactgtgactacagaaagcacagttcctgggggtactgctactataagctccaggttgacttctcctcagaccacctgggctgtttcaccaagtgccggaagccatgcagcgtgaccagctaccagctctctgctggttactcacgatggccctcggtgacatcccaggaatgggtcttccagatgctatcgcgacagaacaattacaccgtcaacaacaagagaaatggagtggccaaagtcaacatcttcttcaaggagctgaactacaaaaccaattctgagtctccctctgtcacgatggtcaccctcctgtccaacctgggcagccagtggagcctgtggttcggctcctcggtgttgtctgtggtggagatggctgagctcgtctttgacctgctggtcatcatgttcctcatgctgctccgaaggttccgaagccgatactggtctccaggccgagggggcaggggtgctcaggaggtagcctccaccctggcatcctcccctccttcccacttctgcccccaccccatgtctctgtccttgtcccagccaggccctgctccctctccagccttgacagcccctccccctgcctatgccaccctgggcccccgcccatctccagggggctctgcaggggccagttcctccacctgtcctctgggggggccctgagagggaaggagaggtttctcacaccaaggcagatgctcctctggtgggagggtgctggccctggcaagattgaaggatgtgcagggcttcctctcagagccgcccaaactgccgttgatgtgtggaggggaagcaagatgggtaagggctcaggaagttgctccaagaacagtagctgatgaagctgcccagaagtgccttggctccagccctgtaccccttggtactgcctctgaacactctggtttccccacccaactgcggctaagtctctttttcccttggatcagccaagcgaaacttggagctttgacaaggaactttcctaagaaaccgctgataaccaggacaaaacacaaccaagggtacacgcaggcatgcacgggtttcctgcccagcgacggcttaagccagcccccgactggcctggccacactgctctccagtagcacagatgtctgctcctcctcttgaacttgggtgggaaaccccacccaaaagccccctttgttacttaggcaattccccttccctgactcccgagggctagggctagagcagacccgggtaagtaaaggcagacccagggctcctctagcctcatacccgtgccctcacagagccatgccccggcacctctgccctgtgtctttcatacctctacatgtctgcttgagatatttcctcagcctgaaagtttccccaaccatctgccagagaactcctatgcatcccttagaaccctgctcagacaccattacttttgtgaacgcttctgccacatcttgtcttccccaaaattgatcactccgccttctcctgggctcccgtagcacactataacatctgctggagtgttgctgttgcaccatactttcttgtacatttgtgtctcccttcccaactagactgtaagtgccttgcggtcagggactgaatcttgcccgtttatgtatgctccatgtctagcccatcatcctgcttggagcaagtaggcaggagctcaataaatgtttgttgcatgaa

SEQ ID NO: 60386 - DNA, 3545 bp, Artificial Sequence
  derived and/or modified sequence
aaacagaaggcagatagagagggagtgagaggcaggagctgagacacagatcctggaggaagaagaccaaaggaagggggcagagacagaaagggaggtgctaggacaaaactcgaaaggtggccctatcagggaagcagaggagaggccgttctagggaagcccagctccggcacttttggccccaactcccgcaggtctgctggctccaggaaaggtggaggagggagggaggagtgggagaatgtgggcgcagggtgggacatgggcatggccaggggcagcctcactcgggttccaggggtgatgggagagggcactcagggcccagagctcagccttgaccctgacccttgctctccccaatccactccggggctcatgaaggggaacaagctggaggagcaggaccctagacctctgcagcccataccaggtctcatggaggggaacaagctggaggagcaggactctagccctccacagtccactccagggctcatgaaggggaacaagcgtgaggagcaggggctgggccccgaacctgcggcgccccagcagcccacggcggaggaggaggccctgatcgagttccaccgctcctaccgagagctcttcgagttcttctgcaacaacaccaccatccacggcgccatccgcctggtgtgctcccagcacaaccgcatgaagacggccttctgggcagtgctgtggctctgcacctttggcatgatgtactggcaattcggcctgcttttcggagagtacttcagctaccccgtcagcctcaacatcaacctcaactcggacaagctcgtcttccccgcagtgaccatctgcaccctcaatccctacaggtacccggaaattaaagaggagctggaggagctggaccgcatcacagagcagacgctctttgacctgtacaaatacagctccttcaccactctcgtggccggctcccgcagccgtcgcgacctgcgggggactctgccgcaccccttgcagcgcctgagggtcccgcccccgcctcacggggcccgtcgagcccgtagcgtggcctccagcttgcgggacaacaacccccaggtggactggaaggactggaagatcggcttccagctgtgcaaccagaacaaatcggactgcttctaccagacatactcatcaggggtggatgcggtgagggagtggtaccgcttccactacatcaacatcctgtcgaggctgccagagactctgccatccctggaggaggacacgctgggcaacttcatcttcgcctgccgcttcaaccaggtctcctgcaaccaggcgaattactctcacttccaccacccgatgtatggaaactgctatactttcaatgacaagaacaactccaacctctggatgtcttccatgcctggaatcaacaacggtctgtccctgatgctgcgcgcagagcagaatgacttcattcccctgctgtccacagtgactggggcccgggtaatggtgcacgggcaggatgaacctgcctttatggatgatggtggctttaacttgcggcctggcgtggagacctccatcagcatgaggaaggaaaccctggacagacttgggggcgattatggcgactgcaccaagaatggcagtgatgttcctgttgagaacctttacccttcaaagtacacacagcaggtgtgtattcactcctgcttccaggagagcatgatcaaggagtgtggctgtgcctacatcttctatccgcggccccagaacgtggagtactgtgactacagaaagcacagttcctggggccaggtgcggtcgctcacacctgtaatcccagcactttgggaggccgaggcgggcagatcacgagggtactgctactataagctccaggttgacttctcctcagaccacctgggctgtttcaccaagtgccggaagccatgcagcgtgaccagctaccagctctctgctggttactcacgatggccctcggtgacatcccaggaatgggtcttccagatgctatcgcgacagaacaattacaccgtcaacaacaagagaaatggagtggccaaagtcaacatcttcttcaaggagctgaactacaaaaccaattctgagtctccctctgtcacgatggtcaccctcctgtccaacctgggcagccagtggagcctgtggttcggctcctcggtgttgtctgtggtggagatggctgagctcgtctttgacctgctggtcatcatgttcctcatgctgctccgaaggttccgaagccgatactggtctccaggccgagggggcaggggtgctcaggaggtagcctccaccctggcatcctcccctccttcccacttctgcccccaccccatgtctctgtccttgtcccagccaggccctgctccctctccagccttgacagcccctccccctgcctatgccaccctgggcccccgcccatctccagggggctctgcaggggccagttcctccacctgtcctctgggggggccctgagagggaaggagaggtttctcacaccaaggcagatgctcctctggtgggagggtgctggccctggcaagattgaaggatgtgcagggcttcctctcagagccgcccaaactgccgttgatgtgtggaggggaagcaagatgggtaagggctcaggaagttgctccaagaacagtagctgatgaagctgcccagaagtgccttggctccagccctgtaccccttggtactgcctctgaacactctggtttccccacccaactgcggctaagtctctttttcccttggatcagccaagcgaaacttggagctttgacaaggaactttcctaagaaaccgctgataaccaggacaaaacacaaccaagggtacacgcaggcatgcacgggtttcctgcccagcgacggcttaagccagcccccgactggcctggccacactgctctccagtagcacagatgtctgctcctcctcttgaacttgggtgggaaaccccacccaaaagccccctttgttacttaggcaattccccttccctgactcccgagggctagggctagagcagacccgggtaagtaaaggcagacccagggctcctctagcctcatacccgtgccctcacagagccatgccccggcacctctgccctgtgtctttcatacctctacatgtctgcttgagatatttcctcagcctgaaagtttccccaaccatctgccagagaactcctatgcatcccttagaaccctgctcagacaccattacttttgtgaacgcttctgccacatcttgtcttccccaaaattgatcactccgccttctcctgggctcccgtagcacactataacatctgctggagtgttgctgttgcaccatactttcttgtacatttgtgtctcccttcccaactagactgtaagtgccttgcggtcagggactgaatcttgcccgtttatgtatgctccatgtctagcccatcatcctgcttggagcaagtaggcaggagctcaataaatgtttgttgcatgaagg

SEQ ID NO: 60387 - DNA, 2076 bp, Artificial Sequence
  derived and/or modified sequence
atggagggcaacaagctggaggagcaggacagcagccccccccagagcacccccggcctgatgaagggcaacaagagagaggagcagggcctgggccccgagcccgccgccccccagcagcccaccgccgaggaggaggccctgatcgagttccacagaagctacagagagctgttcgagttcttctgcaacaacaccaccatccacggcgccatcagactggtgtgcagccagcacaacagaatgaagaccgccttctgggccgtgctgtggctgtgcaccttcggcatgatgtactggcagttcggcctgctgttcggcgagtacttcagctaccccgtgagcctgaacatcaacctgaacagcgacaagctggtgttccccgccgtgaccatctgcaccctgaacccctacagataccccgagatcaaggaggagctggaggagctggacagaatcaccgagcagaccctgttcgacctgtacaagtacagcagcttcaccaccctggtggccggcagcagaagcagaagagacctgagaggcaccctgccccaccccctgcagagactgagagtgcccccccccccccacggcgccagaagagccagaagcgtggccagcagcctgagagacaacaacccccaggtggactggaaggactggaagatcggcttccagctgtgcaaccagaacaagagcgactgcttctaccagacctacagcagcggcgtggacgccgtgagagagtggtacagattccactacatcaacatcctgagcagactgcccgagaccctgcccagcctggaggaggacaccctgggcaacttcatcttcgcctgcagattcaaccaggtgagctgcaaccaggccaactacagccacttccaccaccccatgtacggcaactgctacaccttcaacgacaagaacaacagcaacctgtggatgagcagcatgcccggcatcaacaacggcctgagcctgatgctgagagccgagcagaacgacttcatccccctgctgagcaccgtgaccggcgccagagtgatggtgcacggccaggacgagcccgccttcatggacgacggcggcttcaacctgagacccggcgtggagaccagcatcagcatgagaaaggagaccctggacagactgggcggcgactacggcgactgcaccaagaacggcagcgacgtgcccgtggagaacctgtaccccagcaagtacacccagcaggtgtgcatccacagctgcttccaggagagcatgatcaaggagtgcggctgcgcctacatcttctaccccagaccccagaacgtggagtactgcgactacagaaagcacagcagctggggccaggtgagaagcctgacccccgtgatccccgccctgtgggaggccgaggccggcagaagcagaggctactgctactacaagctgcaggtggacttcagcagcgaccacctgggctgcttcaccaagtgcagaaagccctgcagcgtgaccagctaccagctgagcgccggctacagcagatggcccagcgtgaccagccaggagtgggtgttccagatgctgagcagacagaacaactacaccgtgaacaacaagagaaacggcgtggccaaggtgaacatcttcttcaaggagctgaactacaagaccaacagcgagagccccagcgtgaccatggtgaccctgctgagcaacctgggcagccagtggagcctgtggttcggcagcagcgtgctgagcgtggtggagatggccgagctggtgttcgacctgctggtgatcatgttcctgatgctgctgagaagattcagaagcagatactggagccccggcagaggcggcagaggcgcccaggaggtggccagcaccctggccagcagcccccccagccacttctgcccccaccccatgagcctgagcctgagccagcccggccccgcccccagccccgccctgaccgcccccccccccgcctacgccaccctgggccccagacccagccccggcggcagcgccggcgccagcagcagcacctgccccctgggcggcccctag

SEQ ID NO: 60388 - protein, 1428 aa, Artificial Sequence
  derived and/or modified sequence
MQGPPLLTAAHLLCVCTAALAVAPGPRFLVTAPGIIRPGGNVTIGVELLEHCPSQVTVKAELLKTASNLTVSVLEAEGVFEKGSFKTLTLPSLPLNSADEIYELRVTGRTQDEILFSNSTRLSFETKRISVFIQTDKALYKPKQEVKFRIVTLFSDFKPYKTSLNILIKDPKSNLIQQWLSQQSDLGVISKTFQLSSHPILGDWSIQVQVNDQTYYQSFQVSEYVLPKFEVTLQTPLYCSMNSKHLNGTITAKYTYGKPVKGDVTLTFLPLSFWGKKKNITKTFKINGSANFSFNDEEMKNVMDSSNGLSEYLDLSSPGPVEILTTVTESVTGISRNVSTNVFFKQHDYIIEFFDYTTVLKPSLNFTATVKVTRADGNQLTLEERRNNVVITVTQRNYTEYWSGSNSGNQKMEAVQKINYTVPQSGTFKIEFPILEDSSELQLKAYFLGSKSSMAVHSLFKSPSKTYIQLKTRDENIKVGSPFELVVSGNKRLKELSYMVVSRGQLVAVGKQNSTMFSLTPENSWTPKACVIVYYIEDDGEIISDVLKIPVQLVFKNKIKLYWSKVKAEPSEKVSLRISVTQPDSIVGIVAVDKSVNLMNASNDITMENVVHELELYNTGYYLGMFMNSFAVFQECGLWVLTDANLTKDYIDGVYDNAEYAERFMEENEGHIVDIHDFSLGSSPHVRKHFPETWIWLDTNMGYRIYQEFEVTVPDSITSWVATGFVISEDLGLGLTTTPVELQAFQPFFIFLNLPYSVIRGEEFALEITIFNYLKDATEVKVIIEKSDKFDILMTSNEINATGHQQTLLVPSEDGATVLFPIRPTHLGEIPITVTALSPTASDAVTQMILVKAEGIEKSYSQSILLDLTDNRLQSTLKTLSFSFPPNTVTGSERVQITAIGDVLGPSINGLASLIRMPYGCGEQNMINFAPNIYILDYLTKKKQLTDNLKEKALSFMRQGYQRELLYQREDGSFSAFGNYDPSGSTWLSAFVLRCFLEADPYIDIDQNVLHRTYTWLKGHQKSNGEFWDPGRVIHSELQGGNKSPVTLTAYIVTSLLGYRKYQPNIDVQESIHFLESEFSRGISDNYTLALITYALSSVGSPKAKEALNMLTWRAEQEGGMQFWVSSESKLSDSWQPRSLDIEVAAYALLSHFLQFQTSEGIPIMRWLSRQRNSLGGFASTQDTTVALKALSEFAALMNTERTNIQVTVTGPSSPSPLAVVQPTAVNISANGFGFAICQLNVVYNVKASGSSRRRRSIQNQEAFDLDVAVKENKDDLNHVDLNVCTSFSGPGRSGMALMEVNLLSGFMVPSEAISLSETVKKVEYDHGKLNLYLDSVNETQFCVNIPAVRNFKVSNTQDASVSIVDYYEPRRQAVRSYNSEVKLSSCDLCSDVQGCRPCEDGASGSHHHSSVIFIFCFKLLYFMELWL

SEQ ID NO: 60389 - DNA, 4287 bp, Artificial Sequence
  derived and/or modified sequence
atgcagggacctccacttctgactgcagcacaccttctgtgcgtctgtaccgcagctctcgctgtagcccccggaccccgtttccttgtgacagccccagggataattcgacctggagggaacgtgaccatcggagtagagctacttgagcactgcccttcccaggtgacagttaaggccgaactactaaagactgccagtaatctcactgtctccgtgttggaggccgaaggagtgttcgagaagggtagctttaaaaccctgaccctgccctccctcccactgaatagtgccgacgagatctacgagctacgtgtgactggaagaacccaggacgagattctgttcagcaattccaccaggctaagcttcgaaactaagcgcattagcgtgtttattcagacggacaaggccttatataaacctaagcaggaagtgaaatttcgtattgtgacgttgtttagtgattttaaaccctataaaacaagcctcaatatccttatcaaggaccccaagagcaacctgatccagcaatggctgagccagcagagcgatctcggagtcatttccaagacctttcagctgtcaagtcatccaattctcggtgattggtccatccaggtccaagtcaatgatcagacctattatcaaagcttccaggttagtgaatatgtgttacctaagtttgaggtgacactacagacccccctctactgcagtatgaactcaaaacatctaaacgggacaatcaccgcgaaatacacttacggcaaaccggttaagggggacgtcaccctaacattcctgccgcttagcttttgggggaagaaaaagaacatcaccaaaaccttcaagataaatgggagcgcaaatttttctttcaacgatgaagagatgaaaaacgtgatggacagttctaatggcctgagtgaatacctcgacttatcctcaccgggtcctgtggagatcctgaccacagtcacagagtctgtaacaggtatttctcggaatgtgtctacgaatgtattcttcaaacagcacgactacatcatcgagttctttgattacacgacagtcctgaagccctcactgaattttacagccaccgttaaggtcacccgggcagacggcaatcagcttacgttggaagagcggcgcaataatgtagtcattacagttactcagagaaattacaccgagtattggtccgggtctaattccggcaatcagaagatggaagcagtccagaaaattaactacaccgtgccgcagtcgggtacgttcaagatcgagtttccaatactggaagatagcagcgagttacaactcaaagcctattttctcggcagtaaatcctcaatggctgttcacagtctttttaaaagcccatccaaaacatatatccagttaaagaccagagacgagaacattaaagtgggctcaccttttgagcttgtggtctctggcaataaacgcctgaaagaactctcctacatggtggtttcccgcgggcagctggtggctgtcgggaagcaaaatagcaccatgttcagcctcactccagagaactcctggacccccaaagcgtgtgtgatagtatattacattgaagacgacggcgaaataatctccgacgtgttaaaaatccccgtgcagctcgtgtttaagaacaagatcaaactgtattggagcaaagtgaaggccgagccgtcagaaaaggtttcactgaggatatcagtcacacagcccgacagtatcgtcggtatagtggctgtcgacaaatcagtaaatctgatgaatgcctcaaatgatattaccatggagaacgttgtccacgaactggagctgtacaataccgggtattacctcggcatgttcatgaattcatttgcagtcttccaagaatgtgggctgtgggttttgacagatgccaatttgacaaaagattatattgacggcgtttacgataacgcggagtacgctgagaggtttatggaggaaaacgagggtcatatagttgacattcatgacttctcacttggctcttctcctcatgtcaggaagcatttccctgaaacttggatctggctggacaccaatatgggataccggatttaccaggaattcgaggtgaccgtgcctgatagcatcacatcctgggtggcaaccggcttcgtgatctcagaggatctgggtttgggcctcacaacaacacctgtcgaactacaggcttttcaacctttcttcatttttctgaacctcccttacagtgtaatacggggagaggaattcgccctggagatcacaatttttaactacttaaaggatgccacagaggtcaaagtgatcattgaaaagtcggacaaatttgacattctcatgactagcaacgaaatcaacgcgacgggacatcaacagaccctacttgttcctagtgaggacggcgctactgtgctgtttccaatccggccaactcaccttggcgagattcctattactgttactgcgctctcaccaacagccagtgatgccgttacgcagatgatattagtcaaggccgaggggattgagaagtcatactcacagtccattcttctcgatctcacggataatcgcctgcagagtacacttaaaacactcagtttcagttttccccccaatacagtgactggctctgagagggtgcagataacggcaatcggagacgtacttggccccagtatcaatggtctggcaagccttatccgcatgccctatggctgcggcgaacaaaatatgatcaacttcgcccctaatatctatattcttgattacctgaccaaaaagaagcagttgaccgacaatttgaaggagaaagccttgtcctttatgcgccagggctaccagcgggagctcctgtatcaacgagaggacggtagcttcagcgctttcggcaactatgatccatccgggagcacctggttgtcagcctttgttttgagatgctttctggaagccgatccgtacatcgatatagaccagaacgtgctacacagaacatatacgtggctgaaggggcatcaaaaaagtaacggcgagttctgggatcccggcagggtcattcacagcgaactccaagggggaaacaagagccccgtcacactgaccgcctacatcgtaaccagcctattaggttataggaagtaccaaccaaatattgatgtgcaggagtcaattcattttctggagagcgaatttagtagaggtatttccgataactacaccctggccctcattacttacgccctctcatccgtgggatcccccaaagcgaaagaggccctgaacatgcttacctggagggctgaacaagaaggcggaatgcagttttgggtatcatctgaaagcaaactgtctgatagctggcagccaaggagtctggatatcgaagttgctgcctacgcgttgttatcccacttcttgcagttccaaactagtgagggcattccaatcatgcgctggctgtcccgacaaaggaacagcctgggtggtttcgccagcactcaggacaccacagtcgctttgaaggccctgagcgaatttgcagcattgatgaataccgagcgcacaaatattcaagtaaccgtgactggaccatcctcgccgtctcctctggcggtcgttcaaccaaccgccgtgaatattagcgctaacggttttggctttgcaatttgtcagctgaatgtcgtttacaacgttaaggcctcgggaagcagtcggcggcggaggagtatccaaaaccaggaagcattcgaccttgacgtggccgtaaaagaaaacaaggacgatctgaaccacgtagatttgaacgtgtgcacaagcttctccggccctgggaggagtgggatggcactgatggaggtaaacctgctgtctgggttcatggtgccatcagaggctattagtctcagcgaaacagttaagaaggttgagtatgatcatggcaaactgaatctctatctggacagcgtaaatgaaacacaattttgcgtcaatatccccgccgtacggaattttaaagtgtctaatacacaggatgcctcggtttctattgttgattactatgaaccgaggaggcaagcagttagatcatataattctgaagtgaaactctcttcatgtgatctatgttccgatgtgcagggttgtagaccctgtgaggacggcgcctccgggtctcaccaccattctagcgtaatattcatattttgtttcaagctcctatattttatggagctctggttgtag

SEQ ID NO: 60390 - DNA, 4287 bp, Artificial Sequence
  derived and/or modified sequence
atgcagggcccccccctgctgacagctgcccacctgctgtgtgtgtgcacagctgccctggccgtggcccctggcccccgcttcctggtgacagcccctggcatcatccggcctggaggaaatgtgaccatcggcgtggagctgctggagcactgccccagccaggtgacagtgaaggccgagctgctgaagacagccagcaacctgactgtgtctgtgctggaggccgagggcgtgtttgagaagggcagcttcaagaccctgaccctgcccagcctgcccctgaacagcgcagatgagatctatgagctgcgggtgactggaagaacccaggatgagatcctcttcagcaacagcacccggctgagctttgagaccaagaggatcagcgtcttcatccagacagacaaggccctgtacaagcccaagcaggaggtgaagttccgcatcgtgaccctcttcagtgacttcaagccctacaagaccagcctgaacatcctgatcaaggaccccaagagcaacctgatccagcagtggctgagccagcagagcgacctgggcgtcatcagcaagaccttccagctgagcagccaccccatcctgggggactggagcatccaggtgcaggtgaatgaccagacctactaccagagcttccaggtgtctgaatatgtgctgcccaagtttgaggtgaccctgcagacccccctgtactgcagcatgaacagcaagcacctgaatggcaccatcacagccaagtacacctacggcaagcctgtgaagggagatgtgaccctgaccttcctgcccctgtccttctggggcaagaagaagaacatcaccaagaccttcaagatcaatggaagtgccaacttctccttcaatgatgaggagatgaagaatgtgatggacagcagcaatggcctgtctgagtacctggacctgagcagccctggccctgtggagatcctgaccaccgtgacagagagcgtgacaggcatcagcagaaatgtgtccaccaacgtgttcttcaagcagcacgactacatcatcgagttctttgactacaccaccgtgctgaagcccagcctgaacttcaccgccaccgtgaaggtgaccagggcagatggcaaccagctgaccctggaggagaggaggaacaacgtggtgatcaccgtgacccagaggaactacacagagtactggagcggcagcaacagcggcaaccagaagatggaggccgtgcagaagatcaactacacagtgccccagagcggcaccttcaagattgagttccccatcctggaggacagcagcgagctgcagctgaaggcctacttcctgggcagcaagagctccatggctgtgcacagcctcttcaagagccccagcaagacctacatccagctgaagaccagagatgagaacatcaaggtgggcagcccctttgagctggtggtgtctggcaacaagaggctgaaggagctgagctacatggtggtgtcccggggccagctggtggccgtgggcaagcagaacagcaccatgttcagcctgaccccagagaacagctggacccccaaggcctgcgtcatcgtgtactacattgaagatgatggagagatcatcagtgatgtgctgaagatccctgtgcagctggtgttcaagaacaagatcaagctgtactggagcaaggtgaaggccgagcccagcgagaaggtgtccctgcgcatctctgtgacccagcctgacagcatcgtgggcatcgtggccgtggacaagtctgtgaacctgatgaatgccagcaatgacatcaccatggagaatgtggtgcatgagctggagctgtacaacacaggctactacctgggcatgttcatgaacagctttgctgtgttccaggagtgtggcctgtgggtgctgacagatgccaacctgaccaaggactacattgatggagtgtatgacaatgcagaatatgcagagcgcttcatggaggagaatgaaggccacatcgtggacatccatgacttcagcctgggcagcagcccccacgtgaggaagcacttccctgagacctggatctggctggacaccaacatgggctaccgcatctaccaggagtttgaggtgacagtgcctgacagcatcacctcctgggtggccactggatttgtgatcagcgaggacctgggcctgggcctgaccaccacccctgtggagctgcaggccttccagcccttcttcatcttcctgaacctgccctacagcgtcatccggggggaggagtttgccctggagatcaccatcttcaactacctgaaggatgccacagaggtgaaggtgatcatcgagaagagtgacaagtttgacatcctgatgaccagcaatgagatcaatgccaccggccaccagcagaccctgctggtgcccagtgaagatggagccaccgtgctcttccccatccggcccacccacctgggggagatccccatcaccgtgacagccctgagccccacagccagtgatgctgtgacccagatgatcctggtgaaggccgagggcatcgagaagagctacagccagagcatcctgctggacctgacagacaaccggctgcagagcaccctgaagaccctgtccttctccttcccccccaacacagtgacaggcagcgagcgggtgcagatcacagccatcggagatgtgctgggccccagcatcaatggcctggccagcctcatccgcatgccctacggctgtggggagcagaacatgatcaactttgcccccaacatctacatcctggactacctgaccaagaagaagcagctgacagacaacctgaaggagaaggccctgtccttcatgaggcagggctaccagcgggagctgctgtaccagcgggaggatggcagcttcagcgcctttggaaattatgaccccagcggcagcacctggctgagcgcctttgtgctgcgctgcttcctggaggccgacccctacattgatattgaccagaatgtgctgcacaggacctacacctggctgaagggccaccagaagagcaatggagagttctgggaccccggccgggtcatccacagcgagctgcagggcggcaacaagagccctgtgaccctgacagcctacatcgtgaccagcctgctgggctacaggaagtaccagcccaacattgatgtgcaggagagcatccacttcctggagagcgagttcagccggggcatcagtgacaactacaccctggccctgatcacctacgccctgagctctgtgggcagccccaaggccaaggaggccctgaacatgctgacctggagggctgagcaggagggcggcatgcagttctgggtgtcctctgagagcaagctgagtgacagctggcagcccaggagcctggacatcgaggtggccgcctatgccctgctgagccacttcctgcagttccagaccagcgagggcatccccatcatgcgctggctgagccggcagaggaacagcctgggcggctttgccagcacccaggacaccaccgtggccctgaaggccctgtctgaatttgctgccctgatgaacacagagaggaccaacatccaggtgacagtgacaggccccagcagccccagccccctggccgtggtgcagcccacagctgtgaacatcagcgccaatggatttggatttgccatctgccagctgaatgtggtgtacaacgtgaaggccagcggcagcagcagaagaagaagaagcatccagaaccaggaggcctttgacctggatgtggccgtgaaggagaacaaggatgacctgaaccacgtggacctgaatgtgtgcaccagcttcagcggccctggccgcagcggcatggccctgatggaggtgaacctgctgagcggcttcatggtgcccagcgaggccatcagcctgtctgaaacagtgaagaaggtggagtatgaccacggcaagctgaacctgtacctggacagcgtgaatgagacccagttctgtgtgaacatcccagctgtgaggaacttcaaggtgagcaacacccaggatgcctctgtgtccatcgtggactactatgagccccggcggcaggccgtgcgcagctacaacagcgaggtgaagctgagcagctgtgacctgtgcagtgatgtgcagggctgccggccctgtgaagatggagccagcggcagccaccaccacagcagcgtcatcttcatcttctgcttcaagctgctgtacttcatggagctgtggctgtag

SEQ ID NO: 60391 - DNA, 4287 bp, Artificial Sequence
  derived and/or modified sequence
atgcagggcccccccctgctgaccgccgcccacctgctgtgcgtgtgcaccgctgccttagccgtggcacctggccccagattcctcgtcaccgcccctggcattatcaggccgggtggcaacgtgaccataggagttgagctgctggagcattgtccttcccaggttacggtaaaggcagaactgctgaagaccgcctcaaacctgaccgtgtccgtcctggaggctgaaggggtttttgagaagggctctttcaaaaccctgactctgcctagcctgcccctaaactctgccgacgaaatctatgaacttagggtcaccggtcgtactcaggacgaaatcttgttttcaaatagcactcgcctgagcttcgaaacgaagaggattagtgttttcattcaaacagataaagccttgtacaagccaaagcaagaggtgaagtttcgaattgtgacacttttttcagacttcaagccatataagacttctctgaacatcttgattaaagatcccaaaagcaacttaatccagcagtggttgagtcagcaatctgaccttggcgtgatttctaaaacattccagctctcgagtcacccgatcttgggcgattggtccatacaggtgcaggtgaatgatcagacctattatcaaagctttcaggtgtcggaatacgtcctgcctaagttcgaagttaccctgcagactccattgtattgttccatgaatagcaaacacctcaatggtactatcactgctaagtatacttatggaaaaccagtgaaaggagacgttacgctgactttcctgccattaagcttttgggggaagaaaaaaaacatcaccaagacctttaagatcaatggatccgccaactttagttttaacgacgaggagatgaaaaatgtgatggactcatcaaacggcctttcagaataccttgacctgtcctctcccgggcccgtagaaatcctgacaactgtgaccgagtccgtcactgggataagcagaaatgtctcaaccaatgtgttcttcaaacagcacgactacatcatcgaattcttcgactacaccacagtcctcaagccttctttgaactttaccgctacggtgaaggtgacccgggctgatggcaatcagcttaccctcgaggagaggagaaacaacgtagtgatcaccgttacacaacgcaactacacagagtattggagcggttccaattccggtaatcaaaagatggaagcggtgcagaagattaactacactgttcctcagtccggcacttttaagatcgaattccctattctcgaggactcctctgaactgcagctgaaggcctactttctgggatcaaagtcgtctatggctgtacacagtctgtttaagagtccaagcaagacatatatccagcttaagacacgggacgagaacattaaggtcggctccccttttgagctggttgtttccggaaataagcgtcttaaggaattatcctacatggtggtctctaggggacaactcgttgctgtgggtaagcagaatagcactatgtttagcctcactccggagaattcttggacgcccaaagcctgcgtcatcgtgtactacatagaagatgacggagagattatttcggacgtcctgaaaattccggtgcagcttgtttttaagaacaagattaagctttactggtccaaggtgaaggcagagccaagcgagaaggtttccctccgtatttctgtgacgcagcctgattccattgtgggaattgtcgccgttgataagtcggtgaacctcatgaatgcaagcaacgatattacaatggagaacgttgttcatgagctggaactctataacaccggctactacctggggatgtttatgaatagcttcgccgtcttccaggaatgtgggttgtgggtgctgactgatgctaacctgacgaaggactacattgatggagtttacgataatgccgaatatgctgagaggttcatggaggagaacgagggacacatcgtggacatccatgatttttcactggggagcagtccgcacgtgcgaaagcacttccccgagacctggatatggctcgacaccaatatgggatataggatttaccaggagtttgaggtgacggtccccgactctatcaccagctgggtggccaccgggttcgtgatttccgaggaccttggtcttggacttaccaccacgccggtcgagttgcaggcctttcagcctttcttcattttcctcaacctgccttatagcgtgattagaggggaagaattcgcactagagattacaatcttcaattatctcaaagatgctacggaggtgaaagtcattattgaaaagtctgacaagttcgatattctcatgacaagcaacgagatcaatgcaaccggccatcagcaaacgctgctcgtcccatctgaagacggcgcgaccgtactgttccctattcgacctactcatctgggggaaattcctatcactgtcaccgcactgtcacccaccgcctctgacgccgtgactcaaatgatcttagtgaaggccgagggcattgagaagtcctactcccaaagcatcctcctagacttgaccgacaatcgattgcagagcaccctgaaaacactaagtttttccttcccacctaacaccgtgaccgggtctgagcgtgtccagattactgctatcggagacgtgctggggcccagtatcaatgggctggcatccctgatacggatgccttacggatgtggcgaacagaatatgattaattttgctccaaacatttatatccttgattatcttacaaagaagaagcagctgacggataacttgaaggagaaagcactgtctttcatgcggcaagggtatcagcgggaacttctctaccagcgggaagatggaagtttctccgcatttggaaattatgacccctctggatcgacctggctttccgccttcgtcctaagatgctttcttgaggcggacccgtacatagacatcgaccagaacgtgctgcacaggacatacacatggctgaaggggcaccagaagtccaatggggagttctgggatccaggcagggtgatccacagtgaactgcagggaggcaacaaatcacctgtcacgctgaccgcctatatcgtcacaagtctactaggctatcggaaatatcagcctaacatcgatgtgcaggagtccattcacttcctggagagcgagttcagtcgggggattagcgacaattatactctagctctgataacttacgcgctatcatcggtgggtagcccaaaagctaaagaagccctgaacatgttgacctggagagctgaacaggaagggggcatgcaattttgggtgagctccgagtcaaagctaagcgactcctggcagcctcggtcgttggacatcgaagtggccgcgtatgccctgctgagccattttctgcagtttcagaccagtgaaggcatcccaatcatgcgatggttatcacgacagagaaacagtttgggaggcttcgcatcaactcaagataccactgttgctctaaaagcactgtctgagtttgctgctctgatgaataccgagaggacaaatatccaggttactgtgaccggacccagctcaccatcacctcttgccgtggttcagcccaccgccgtcaacattagcgcaaatggctttggctttgccatatgccagctaaacgttgtttacaacgtgaaggcttctggttcaagcagacgcaggaggtcaattcaaaaccaggaggcctttgaccttgatgtagcagtcaaggagaacaaagatgatttgaatcacgtcgacttaaacgtgtgtacaagctttagtggtcctgggagaagcggaatggccctgatggaggttaatttactgtcggggttcatggtgccttcagaggctattagtctgtccgagacagtcaaaaaggtggaatacgatcacggtaaacttaatctgtatttggactccgtaaacgaaacacagttttgtgttaacatccccgctgttcgaaatttcaaggtttccaacacccaagacgcttctgtctccatcgtagactattacgagccgagacggcaggccgtgcggtcttacaacagcgaggttaaattgagtagctgtgacctctgcagtgacgtgcagggttgtcggccgtgtgaggatggcgcgtctgggtcccatcaccattcgtccgttatcttcattttttgcttcaagctgctgtatttcatggagttgtggctctag

SEQ ID NO: 60392 - DNA, 4287 bp, Artificial Sequence
  derived and/or modified sequence
atgcaaggccctccgttacttacagcagcccacctcctgtgcgtatgtaccgctgctttggccgtcgctcccggacctagattcctggttactgccccaggtattatccgccctggtgggaatgttaccatcggggtcgagctcctggagcactgccctagccaagtgaccgtcaaagcagagcttctcaagacagcatccaatctgaccgtgtctgtcctcgaggccgagggagtgttcgaaaagggcagctttaagactctgacactgccttccttgccgctaaacagcgctgacgaaatatacgagctccgtgtcacgggccgtacacaagatgagatactgttctccaatagcaccaggttgtcttttgaaaccaagagaataagcgtcttcatccagactgacaaggctctgtacaagccaaaacaagaagtaaaatttcgaatcgttacgctattcagcgacttcaagccatacaagactagtctgaacatcctgatcaaagacccgaagtccaacctgattcagcagtggctctcccagcagtccgacttgggtgtaatttccaagactttccagctgtcatcccatcccatcctgggtgactggagcattcaggtgcaggtcaacgatcagacttactatcagagcttccaggtctccgagtacgtgctccctaaattcgaggtaactttacaaacgcctctctattgctccatgaacagcaagcacttaaacgggacaatcactgccaagtacacttacggaaagcccgtgaagggagatgtgacgttgaccttcctgccattaagcttctggggaaaaaagaaaaacatcaccaaaaccttcaagataaacggaagcgcaaatttctccttcaatgatgaagaaatgaagaatgttatggattcgagcaacggcctgagtgaatatctagatttgagtagtccagggccagtcgagattctgacaactgtgacagaaagtgtgacaggaattagcagaaatgtcagcaccaacgttttcttcaaacagcacgattacatcattgagttcttcgactatacaaccgtgttgaaaccctccctgaatttcaccgccaccgtcaaagtaacgagggctgacggaaaccagctgacattggaagagaggagaaacaacgtggtaatcactgttacacagcgcaattataccgaatattggagcggaagcaactccggtaatcagaagatggaagctgtacagaaaatcaattacacggttcctcagagtggtacgttcaaaattgaattcccaatactagaagatagcagcgagctgcaattgaaagcatattttttaggctccaaatccagcatggcagtccacagcctgttcaaaagcccaagcaaaacctatattcagctgaaaacgcgggacgaaaacattaaagttgggtctcctttcgagctggtggtgtccggtaacaaacgcttgaaggagctgtcatacatggtggtcagtagggggcagctcgtcgccgttgggaaacagaacagtaccatgttctcactcactcctgagaactcctggacccccaaggcctgtgtgattgtgtactacatcgaggatgatggagagattataagtgatgtgttaaagattcccgtgcagctggtattcaagaacaagattaaattatactggtctaaagtaaaggccgaaccgtcagagaaagtaagtctgcggatttctgtcacacagccagacagcatcgtgggcatagtggcagtagacaagtctgtcaaccttatgaacgccagcaacgacatcactatggagaacgtggtgcacgaactagaactgtataacactggctactatctgggtatgtttatgaactcattcgcagtcttccaggaatgcggactgtgggtactgactgacgccaacctcaccaaagattacatagatggtgtctatgataacgccgaatatgctgagagattcatggaggaaaatgagggacatatagtagatatccatgacttctccctaggctcatccccacatgttagaaagcactttccagagacttggatctggctggatacaaatatgggatatcgaatctaccaagaattcgaggtcactgtccccgattcgataacttcttgggtggctacagggttcgtaatcagcgaggacctgggtctggggctgacgaccacccctgttgagctccaggctttccagcccttttttatttttctgaatctcccttacagcgtgatcagaggggaagagttcgcgctggagatcactatattcaactacctgaaagacgcaaccgaggtgaaggtaataattgaaaagagtgacaagttcgatattctgatgacctcaaacgaaatcaatgcaactggtcaccagcagacactgctggtgccttccgaggacggagccaccgttctgtttcctattcgcccaactcatctgggtgagatacccattaccgtgactgctctgagccctaccgcgtctgacgctgtcacgcagatgattctggtgaaagcagaggggattgagaagtcttactcccagtccatcctgctcgacctgacggataacagactgcagtcaacgctgaaaaccctcagtttcagctttcccccaaatacggtgacagggagtgagcgggtgcagatcaccgcaattggggacgttctgggcccttccattaatggcctggcatctctgatccgaatgccctatggctgtggagagcagaatatgattaactttgccccaaatatatatattctggactatctgacaaaaaagaagcagctaacggacaacctgaaggagaaggcactaagttttatgaggcagggttatcaaagggaactgctgtatcagagagaagatggctcgttctctgccttcggcaactacgatccatcgggctccacatggttatccgcctttgtactgagatgtttcctcgaagccgatccttatattgatattgaccagaacgtcttgcacagaacttatacatggctgaagggtcaccagaaatcgaacggcgagttttgggaccctggcagagtcattcactccgaattgcagggtggaaacaaatcgccagtgacacttacagcctatatcgtgacatctctcctcggctacaggaagtatcagcctaatatcgatgttcaagagagtattcactttttagagagtgagttttcacgtggcatctctgataattataccctggcattaattacttatgccctctcttccgtgggctctccaaaggctaaagaagccctcaacatgctcacatggagagcagagcaggaaggaggcatgcagttctgggtctccagtgagtcgaagctgtctgattcttggcaaccgagaagcctggatatagaggtggcagcctacgcgcttcttagccacttcctccagtttcagacctccgaaggaatcccaatcatgagatggctctctcgccagcggaacagtctcggcggatttgcctctactcaggacacaacagttgccctgaaggctctgtccgagtttgcagccctcatgaacaccgagcgcaccaacatccaggtcaccgtgaccggcccttcttctccatcccctttagcagttgtccaaccaacggccgttaacataagtgccaacgggtttggttttgcaatctgccagttaaatgtggtgtataatgtgaaagcatcagggtcgtctcgacgccgtagaagcatccagaatcaggaagctttcgatttggatgtcgcggtcaaggagaacaaggacgacctgaatcatgtcgacctgaacgtctgtaccagtttttcagggccaggtcgtagtgggatggccttgatggaagttaacctgctgagcggattcatggtgcccagcgaggccatcagtttgagtgaaactgttaagaaagtcgagtacgatcacggtaaactgaacctctatctcgattcagtgaacgagacccagttctgcgtgaatattcccgctgttaggaactttaaggtttccaatactcaggatgccagtgtgagcattgtagattactacgagccgaggcgacaggccgtccggagttataactcagaggttaaactgtccagctgtgatttgtgcagtgacgttcagggttgtcgcccttgcgaagatggcgcttctggctctcatcatcacagttcagtgattttcatattttgtttcaaacttctgtactttatggaattgtggctctag

SEQ ID NO: 60393 - DNA, 9401 bp, Artificial Sequence
  derived and/or modified sequence
atagttgctatgaatttctcctcacaaggatgggcctgtttactcaccctgggcatcgttggtagagcgctagtgtaaacagcctgaggaacccggtgggccggggaagtgggcgcgctctgttctccgcggccagctgggacgccgggccaggtggggccgcctgcgtttagcaactgctttctcaccccctggatttgcgatgtttgccacagcagcgagaagcgccattgtaatggggatgggaggggtggagcctccaagtcctgtctcaatttagatctctcactctgctgttaggcgcgcccatttcagattactaaactcgaattaagagggaaaaaaaatcagggaggaggtggcaagccacaccccacggtgcccgcgaacttccccggcagcggactgtagcccaggcagacgccgtcgagatgcagggcccaccgctcctgaccgccgcccacctcctctgcgtgtgcaccgccgcgctggccgtggctcccgggcctcggtttctggtgacagccccagggatcatcaggcccggaggaaatgtgactattggggtggagcttctggaacactgcccttcacaggtgactgtgaaggcggagctgctcaagacagcatcaaacctcactgtctctgtcctggaagcagaaggagtctttgaaaaaggctcttttaagacacttactcttccatcactacctctgaacagtgcagatgagatttatgagctacgtgtaaccggacgtacccaggatgagattttattctctaatagtacccgcttatcatttgagaccaagagaatatctgtcttcattcaaacagacaaggccttatacaagccaaagcaagaagtgaagtttcgcattgttacactcttctcagattttaagccttacaaaacctctttaaacattctcattaaggaccccaaatcaaatttgatccaacagtggttgtcacaacaaagtgatcttggagtcatttccaaaacttttcagctatcttcccatccaatacttggtgactggtctattcaagttcaagtgaatgaccagacatactatcaatcatttcaggtttcagaatatgtattaccaaaatttgaagtgactttgcagacaccattatattgttctatgaattctaagcatttaaatggtaccatcacggcaaagtatacatatgggaagccagtgaaaggagacgtaacgcttacatttttacctttatccttttggggaaagaagaaaaatattacaaaaacatttaagataaatggatctgcaaacttctcttttaatgatgaagagatgaaaaatgtaatggattcttcaaatggactttctgaatacctggatctatcttcccctggaccagtagaaattttaaccacagtgacagaatcagttacaggtatttcaagaaatgtaagcactaatgtgttcttcaagcaacatgattacatcattgagttttttgattatactactgtcttgaagccatctctcaacttcacagccactgtgaaggtaactcgtgctgatggcaaccaactgactcttgaagaaagaagaaataatgtagtcataacagtgacacagagaaactatactgagtactggagcggatctaacagtggaaatcagaaaatggaagctgttcagaaaataaattatactgtcccccaaagtggaacttttaagattgaattcccaatcctggaggattccagtgagctacagttgaaggcctatttccttggtagtaaaagtagcatggcagttcatagtctgtttaagtctcctagtaagacatacatccaactaaaaacaagagatgaaaatataaaggtgggatcgccttttgagttggtggttagtggcaacaaacgattgaaggagttaagctatatggtagtatccaggggacagttggtggctgtaggaaaacaaaattcaacaatgttctctttaacaccagaaaattcttggactccaaaagcctgtgtaattgtgtattatattgaagatgatggggaaattataagtgatgttctaaaaattcctgttcagcttgtttttaaaaataagataaagctatattggagtaaagtgaaagctgaaccatctgagaaagtctctcttaggatctctgtgacacagcctgactccatagttgggattgtagctgttgacaaaagtgtgaatctgatgaatgcctctaatgatattacaatggaaaatgtggtccatgagttggaactttataacacaggatattatttaggcatgttcatgaattcttttgcagtctttcaggaatgtggactctgggtattgacagatgcaaacctcacgaaggattatattgatggtgtttatgacaatgcagaatatgctgagaggtttatggaggaaaatgaaggacatattgtagatattcatgacttttctttgggtagcagtccacatgtccgaaagcattttccagagacttggatttggctagacaccaacatgggttacaggatttaccaagaatttgaagtaactgtacctgattctatcacttcttgggtggctactggttttgtgatctctgaggacctgggtcttggactaacaactactccagtggagctccaagccttccaaccatttttcatttttttgaatcttccctactctgttatcagaggtgaagaatttgctttggaaataactatattcaattatttgaaagatgccactgaggttaaggtaatcattgagaaaagtgacaaatttgatattctaatgacttcaaatgaaataaatgccacaggccaccagcagacccttctggttcccagtgaggatggggcaactgttctttttcccatcaggccaacacatctgggagaaattcctatcacagtcacagctctttcacccactgcttctgatgctgtcacccagatgattttagtaaaggctgaaggaatagaaaaatcatattcacaatccatcttattagacttgactgacaataggctacagagtaccctgaaaactttgagtttctcatttcctcctaatacagtgactggcagtgaaagagttcagatcactgcaattggagatgttcttggtccttccatcaatggcttagcctcattgattcggatgccttatggctgtggtgaacagaacatgataaattttgctccaaatatttacattttggattatctgactaaaaagaaacaactgacagataatttgaaagaaaaagctctttcatttatgaggcaaggttaccagagagaacttctctatcagagggaagatggctctttcagtgcttttgggaattatgacccttctgggagcacttggttgtcagcttttgttttaagatgtttccttgaagccgatccttacatagatattgatcagaatgtgttacacagaacatacacttggcttaaaggacatcagaaatccaacggtgaattttgggatccaggaagagtgattcatagtgagcttcaaggtggcaataaaagtccagtaacacttacagcctatattgtaacttctctcctgggatatagaaagtatcagcctaacattgatgtgcaagagtctatccattttttggagtctgaattcagtagaggaatttcagacaattatactctagcccttataacttatgcattgtcatcagtggggagtcctaaagcgaaggaagctttgaatatgctgacttggagagcagaacaagaaggtggcatgcaattctgggtgtcatcagagtccaaactttctgactcctggcagccacgctccctggatattgaagttgcagcctatgcactgctctcacacttcttacaatttcagacttctgagggaatcccaattatgaggtggctaagcaggcaaagaaatagcttgggtggttttgcatctactcaggataccactgtggctttaaaggctctgtctgaatttgcagccctaatgaatacagaaaggacaaatatccaagtgaccgtgacggggcctagctcaccaagtcctcttgctgtggtacagccaacggcagttaatatttccgcaaatggttttggatttgctatttgtcagctcaatgttgtatataatgtgaaggcttctgggtcttctagaagacgaagatctatccaaaatcaagaagcctttgatttagatgttgctgtaaaagaaaataaagatgatctcaatcatgtggatttgaatgtgtgtacaagcttttcgggcccgggtaggagtggcatggctcttatggaagttaacctattaagtggctttatggtgccttcagaagcaatttctctgagcgagacagtgaagaaagtggaatatgatcatggaaaactcaacctctatttagattctgtaaatgaaacccagttttgtgttaatattcctgctgtgagaaactttaaagtttcaaatacccaagatgcttcagtgtccatagtggattactatgagccaaggagacaggctgtgagaagttacaactctgaagtgaagctgtcctcctgtgacctttgcagtgatgtccagggctgccgtccttgtgaggatggagcttcaggctcccatcatcactcttcagtcatttttattttctgtttcaagcttctgtactttatggaactttggctgtgatttatttttaaaggactctgtgtaacactaacatttccagtagtcacatgtgattgttttgttttcgtagaagaatactgcttctattttgaaaaaagagttttttttctttctatggggttgcagggatggtgtacaacaggtcctagcatgtatagctgcatagatttcttcacctgatctttgtgtggaagatcagaatgaatgcagttgtgtgtctatattttcccctctcaaaatcttttagaatttttttggaggtgtttgttttctccagaataaaggtattactttagaataggtattctcctcattttgtgaaagaaatgaacctagattcttaagcattattacacatccatgtttgcttaaagatggatttccctgggaatgggagaaaacagccagcaggaggagcttcatctgttcccttcccacctccaacctagccctactgcccaccccaccccaacccaccccatgcccagtggtctcagtagatacttcttaactggaaattctttcttttcagaatctaggtggtgaattttttttaagtggcacggtctttttctgcttgaaatctgatcacaccccccagccattgccctccctctctttttcctctgtagagaaatgtgaggggcagtacatttactgtgcttttcacaccatctcagaggttgaggagcatactgaaaattgccctggggggtgctgggtgtgctatctccttcccacatcctcagccccacaccagctctatttcaggggtgagagtcagagagcactgcaatatgtgcttcatgggatttcgattcgaagatcctagaccagggagacactgtgagccagggatacaacaaaatactaggtaagtcactgcagaccgacctccctgcagtttgggaaagaagctgggtttgtggagaatcagagcatcttgacatgactgctgacctaaagatccctggcattggccagggatcctgtggaacctcttctagttcaggggtgtgagcattagactgccagttgtctagtgacatctgatgcttgctgtgaacttttaagatccccgaatcctgagcacctcaatctttaattgccctgtattccgaagggtaatataatttatctggatggaaattttaaagatgaatcccccttttttcttttcttctctcttttctttccttctccctttcttctttgccttctaaatatactgaaatgatttagatatgtgtcaacaattaatgatcttttattcaatctaagaaatggtttagtttttctctttagctctatggcatttcactcaagtggacaggggaaaaagtaattgccatgggctccaaagaatttgctttatgtttttagctatttaaaaataaatccatcaaaaataaagtatgcaaatgtatcttttaaagttaatttttaaaaatgctcttattttagtgaattttcagaaattatagtggaatggatgctcatatattgcttatggatattttggataccaaagtaggaataactgacattcagtattttaaagctggcaaacctgtacatagaaaatagatccccagacagtggtctatgaagagggcagttaagtatcaaatacttaattttcttgcctttttttcttaagtggggaaaagtttctagatctcttacacctctgacacaatctgttctaaaacaggcacttgtaatgttggggcctccttgtaaacgtgtttttgccctttactctctgggagttctttaaaggtgaaatcatcttacaaagaaattgggggagggtcttggcaaaggactttcccctcctctttcctggcctgggaaccttatactgacaatcaatactttatattttaaagtatataatttatagttaacttctagtgtaatatattaggaaacactagaatggaaaggccattggaagacaggttgtatcttttttagaccatatttccttgtttaaaaactatcatttgaatacttttttggtgaagaactccatgttttcaagttaaaggtcacctcgtaggccaggcgcagtggctcatgcctgtaatcccagcactctgggaggctgaggcgggtgaatcacaaggttaggagtttgagaccagcctggccaatatggtgaaaccccgtccctactaaaaatacaaaatttagccaggcgtggtggcatgcacctgtagtcccacctactcgggaggctgaggcaggagaatcacttgaacctgagagacagaggttgcagtgagccgagatcacgccactgcactccagcctgggggacagagtgagattctgtctcaaaaaacaaaaaacaaaaaagtcaccttgtaactcatctctttttattgtaagtttattaaaaatgaagaggacaacaatgagaaggaacataaagggttagctagcactgtctcctggtgcatggggctgtgcagatgtcccggccacttcttccttcatacttcccttagagaacttgctctgctacaagcagtgggcttggactaaaagtgattaaaataccacaggcataaggagaaaaggagtatatgtagtagtaataattactagtataaattattttcttcacatgctatgagtaataatattaaaaaactcattttaccattaagattccttatgctgaagctcttccatttagaatactgtcaatgtcatttactggtatgaactaaagtcccccttcttttccactcactgggaaccttagtaaaacaccagcatatcttacctctctttctgactggccgatgcttccagagactgaatgttgggaaaacctagtagccaaacaattctaggacagaataacatttttatatttggttccaccatcttattacatttagttatagttttaaaaaagaaattcaagcccattaaaatatgtctggtcaatgaaatgcttccttttattgtgttgtgctattgtgctttgtttttcaaaacattgtaaaaatagtatctttggtttagtattttggattatatattataatctgaggagtgttttgcttatgtagaatccagatatatttctgttacctaggagatgttacttacatatgtaatactgtatcctgcacatggaaatattcagaattgtagatagcataactctccctgctcctattcttttgagcctaggtataattttttttttttttttagaaaaagacatatttagctttaatttctatttatgctaaacatatttataagtagtctgtcaatataataccaactatttttatttttacataattcaattatttcatttgacatgtctggcagactcaagacattaagtaaaaaattggaactatgatttttctttgtcattttttaaaaaagaattattttattaacctgctggcatataatctggagttcttttcacaaccttactttttctgatttgctttattgaatgattgaatactcatttctttctaaaaatatgttgtaaattctcccttggcaagatttctccctatgagggtagttattatttgagtctgccaagtggttaccatggggcaaggtgccatgatgtattcttgggtgcattggttttttgcgcattgtaaatttaagacacttatagtaagtggactcattcatagatgagtttcagaaccttttacgttctcggtagaggcttctgtcggacaggcagaagagtgtattcctcacttttttttttgtcttcaaattccagtaaggcatagcacttttaagaaattagaatttttctatcatctatgcaaatgatatttatgttaatattaaatatcttatgttacactgggagtaatttgaggtgcaattatttttattactactttgaatagaggaccattatccttctttcttcagaaaactaagaagtaagtgtaacttttaaagtaagtatatatcagtgagagtaggcttgttttacaactatttctagccagtgagttgtgttttcatgtctcatcaaaagacaataccacattgcatcattttacaaaatatgttgtcattttcatttcagttgtaacataggaaaatagatatttcctagatgatttctgagtttcttactgcaaagaacagttataaattggtatacatgtgtctctgtaatagggataatattgatatatctgttgctacatatttaagaatcattctatcttatgttgtcttgaggccaagatttaccacgtttgcccagtgtattgaattggtggtagaaggtagttccatgttccatttgtagatctttaagattttatctttgataactttaatagaatgtggctcagttctggtccttcaagcctgtatggtttggattttcagtaggggacagttgatgtggagtcaatctctttggtacacaggaagctttataaaatttcattcacgaatctcttattttgggaagctgttttgcatatgagaagaacactgttgaaataaggaactaaagctttatatattgatcaaggtgattctgaaagttttaatttttaatgttgtaatgttatgttattgttaattgtactttattatgtattcaatagaaaatcatgatttattaataaaagcttaaattctcatctattt

SEQ ID NO: 60394 - DNA, 4287 bp, Artificial Sequence
  derived and/or modified sequence
atgcagggcccccccctgctgaccgccgcccacctgctgtgcgtgtgcaccgccgccctggccgtggcccccggccccagattcctggtgaccgcccccggcatcatcagacccggcggcaacgtgaccatcggcgtggagctgctggagcactgccccagccaggtgaccgtgaaggccgagctgctgaagaccgccagcaacctgaccgtgagcgtgctggaggccgagggcgtgttcgagaagggcagcttcaagaccctgaccctgcccagcctgcccctgaacagcgccgacgagatctacgagctgagagtgaccggcagaacccaggacgagatcctgttcagcaacagcaccagactgagcttcgagaccaagagaatcagcgtgttcatccagaccgacaaggccctgtacaagcccaagcaggaggtgaagttcagaatcgtgaccctgttcagcgacttcaagccctacaagaccagcctgaacatcctgatcaaggaccccaagagcaacctgatccagcagtggctgagccagcagagcgacctgggcgtgatcagcaagaccttccagctgagcagccaccccatcctgggcgactggagcatccaggtgcaggtgaacgaccagacctactaccagagcttccaggtgagcgagtacgtgctgcccaagttcgaggtgaccctgcagacccccctgtactgcagcatgaacagcaagcacctgaacggcaccatcaccgccaagtacacctacggcaagcccgtgaagggcgacgtgaccctgaccttcctgcccctgagcttctggggcaagaagaagaacatcaccaagaccttcaagatcaacggcagcgccaacttcagcttcaacgacgaggagatgaagaacgtgatggacagcagcaacggcctgagcgagtacctggacctgagcagccccggccccgtggagatcctgaccaccgtgaccgagagcgtgaccggcatcagcagaaacgtgagcaccaacgtgttcttcaagcagcacgactacatcatcgagttcttcgactacaccaccgtgctgaagcccagcctgaacttcaccgccaccgtgaaggtgaccagagccgacggcaaccagctgaccctggaggagagaagaaacaacgtggtgatcaccgtgacccagagaaactacaccgagtactggagcggcagcaacagcggcaaccagaagatggaggccgtgcagaagatcaactacaccgtgccccagagcggcaccttcaagatcgagttccccatcctggaggacagcagcgagctgcagctgaaggcctacttcctgggcagcaagagcagcatggccgtgcacagcctgttcaagagccccagcaagacctacatccagctgaagaccagagacgagaacatcaaggtgggcagccccttcgagctggtggtgagcggcaacaagagactgaaggagctgagctacatggtggtgagcagaggccagctggtggccgtgggcaagcagaacagcaccatgttcagcctgacccccgagaacagctggacccccaaggcctgcgtgatcgtgtactacatcgaggacgacggcgagatcatcagcgacgtgctgaagatccccgtgcagctggtgttcaagaacaagatcaagctgtactggagcaaggtgaaggccgagcccagcgagaaggtgagcctgagaatcagcgtgacccagcccgacagcatcgtgggcatcgtggccgtggacaagagcgtgaacctgatgaacgccagcaacgacatcaccatggagaacgtggtgcacgagctggagctgtacaacaccggctactacctgggcatgttcatgaacagcttcgccgtgttccaggagtgcggcctgtgggtgctgaccgacgccaacctgaccaaggactacatcgacggcgtgtacgacaacgccgagtacgccgagagattcatggaggagaacgagggccacatcgtggacatccacgacttcagcctgggcagcagcccccacgtgagaaagcacttccccgagacctggatctggctggacaccaacatgggctacagaatctaccaggagttcgaggtgaccgtgcccgacagcatcaccagctgggtggccaccggcttcgtgatcagcgaggacctgggcctgggcctgaccaccacccccgtggagctgcaggccttccagcccttcttcatcttcctgaacctgccctacagcgtgatcagaggcgaggagttcgccctggagatcaccatcttcaactacctgaaggacgccaccgaggtgaaggtgatcatcgagaagagcgacaagttcgacatcctgatgaccagcaacgagatcaacgccaccggccaccagcagaccctgctggtgcccagcgaggacggcgccaccgtgctgttccccatcagacccacccacctgggcgagatccccatcaccgtgaccgccctgagccccaccgccagcgacgccgtgacccagatgatcctggtgaaggccgagggcatcgagaagagctacagccagagcatcctgctggacctgaccgacaacagactgcagagcaccctgaagaccctgagcttcagcttcccccccaacaccgtgaccggcagcgagagagtgcagatcaccgccatcggcgacgtgctgggccccagcatcaacggcctggccagcctgatcagaatgccctacggctgcggcgagcagaacatgatcaacttcgcccccaacatctacatcctggactacctgaccaagaagaagcagctgaccgacaacctgaaggagaaggccctgagcttcatgagacagggctaccagagagagctgctgtaccagagagaggacggcagcttcagcgccttcggcaactacgaccccagcggcagcacctggctgagcgccttcgtgctgagatgcttcctggaggccgacccctacatcgacatcgaccagaacgtgctgcacagaacctacacctggctgaagggccaccagaagagcaacggcgagttctgggaccccggcagagtgatccacagcgagctgcagggcggcaacaagagccccgtgaccctgaccgcctacatcgtgaccagcctgctgggctacagaaagtaccagcccaacatcgacgtgcaggagagcatccacttcctggagagcgagttcagcagaggcatcagcgacaactacaccctggccctgatcacctacgccctgagcagcgtgggcagccccaaggccaaggaggccctgaacatgctgacctggagagccgagcaggagggcggcatgcagttctgggtgagcagcgagagcaagctgagcgacagctggcagcccagaagcctggacatcgaggtggccgcctacgccctgctgagccacttcctgcagttccagaccagcgagggcatccccatcatgagatggctgagcagacagagaaacagcctgggcggcttcgccagcacccaggacaccaccgtggccctgaaggccctgagcgagttcgccgccctgatgaacaccgagagaaccaacatccaggtgaccgtgaccggccccagcagccccagccccctggccgtggtgcagcccaccgccgtgaacatcagcgccaacggcttcggcttcgccatctgccagctgaacgtggtgtacaacgtgaaggccagcggcagcagcagaagaagaagaagcatccagaaccaggaggccttcgacctggacgtggccgtgaaggagaacaaggacgacctgaaccacgtggacctgaacgtgtgcaccagcttcagcggccccggcagaagcggcatggccctgatggaggtgaacctgctgagcggcttcatggtgcccagcgaggccatcagcctgagcgagaccgtgaagaaggtggagtacgaccacggcaagctgaacctgtacctggacagcgtgaacgagacccagttctgcgtgaacatccccgccgtgagaaacttcaaggtgagcaacacccaggacgccagcgtgagcatcgtggactactacgagcccagaagacaggccgtgagaagctacaacagcgaggtgaagctgagcagctgcgacctgtgcagcgacgtgcagggctgcagaccctgcgaggacggcgccagcggcagccaccaccacagcagcgtgatcttcatcttctgcttcaagctgctgtacttcatggagctgtggctgtag

SEQ ID NO: 60395 - protein, 1368 aa, Artificial Sequence
  derived and/or modified sequence
MQGPPLLTAAHLLCVCTAALAVAPGPRFLVTAPGIIRPGGNVTIGVELLEHCPSQVTVKAELLKTASNLTVSVLEAEGVFEKGSFKTLTLPSDPKSNLIQQWLSQQSDLGVISKTFQLSSHPILGDWSIQVQVNDQTYYQSFQVSEYVLPKFEVTLQTPLYCSMNSKHLNGTITAKYTYGKPVKGDVTLTFLPLSFWGKKKNITKTFKINGSANFSFNDEEMKNVMDSSNGLSEYLDLSSPGPVEILTTVTESVTGISRNVSTNVFFKQHDYIIEFFDYTTVLKPSLNFTATVKVTRADGNQLTLEERRNNVVITVTQRNYTEYWSGSNSGNQKMEAVQKINYTVPQSGTFKIEFPILEDSSELQLKAYFLGSKSSMAVHSLFKSPSKTYIQLKTRDENIKVGSPFELVVSGNKRLKELSYMVVSRGQLVAVGKQNSTMFSLTPENSWTPKACVIVYYIEDDGEIISDVLKIPVQLVFKNKIKLYWSKVKAEPSEKVSLRISVTQPDSIVGIVAVDKSVNLMNASNDITMENVVHELELYNTGYYLGMFMNSFAVFQECGLWVLTDANLTKDYIDGVYDNAEYAERFMEENEGHIVDIHDFSLGSSPHVRKHFPETWIWLDTNMGYRIYQEFEVTVPDSITSWVATGFVISEDLGLGLTTTPVELQAFQPFFIFLNLPYSVIRGEEFALEITIFNYLKDATEVKVIIEKSDKFDILMTSNEINATGHQQTLLVPSEDGATVLFPIRPTHLGEIPITVTALSPTASDAVTQMILVKAEGIEKSYSQSILLDLTDNRLQSTLKTLSFSFPPNTVTGSERVQITAIGDVLGPSINGLASLIRMPYGCGEQNMINFAPNIYILDYLTKKKQLTDNLKEKALSFMRQGYQRELLYQREDGSFSAFGNYDPSGSTWLSAFVLRCFLEADPYIDIDQNVLHRTYTWLKGHQKSNGEFWDPGRVIHSELQGGNKSPVTLTAYIVTSLLGYRKYQPNIDVQESIHFLESEFSRGISDNYTLALITYALSSVGSPKAKEALNMLTWRAEQEGGMQFWVSSESKLSDSWQPRSLDIEVAAYALLSHFLQFQTSEGIPIMRWLSRQRNSLGGFASTQDTTVALKALSEFAALMNTERTNIQVTVTGPSSPSPVKFLIDTHNRLLLQTAELAVVQPTAVNISANGFGFAICQLNVVYNVKASGSSRRRRSIQNQEAFDLDVAVKENKDDLNHVDLNVCTSFSGPGRSGMALMEVNLLSGFMVPSEAISLSETVKKVEYDHGKLNLYLDSVNETQFCVNIPAVRNFKVSNTQDASVSIVDYYEPRRQAVRSYNSEVKLSSCDLCSDVQGCRPCEDGASGSHHHSSVIFIFCFKLLYFMELWL

SEQ ID NO: 60396 - DNA, 4107 bp, Artificial Sequence
  derived and/or modified sequence
atgcagggccctcctttactaacagctgctcacttgctatgtgtgtgcactgccgcactggcggtggcgcccggcccacgtttcctggtgacagccccaggaatcattaggcctggaggcaacgtgaccatcggcgtcgaactgctggagcattgcccttcacaggtcaccgtgaaagcagagttgctcaagactgcatctaatttgactgtctccgttctggaagccgagggggtgtttgagaaggggagctttaaaacactaacactgccatccgatccaaaaagcaacctgatacagcagtggctctcacagcaatccgatctgggggtgatttccaaaacgttccaactgtccagccaccctattcttggtgattggagtatccaggtgcaggtcaatgaccaaacgtactaccagtcgttccaggtaagtgagtatgtcctccctaagtttgaagtgactctccagacccctttgtactgtagtatgaactctaagcatctgaatggcacaatcacagccaaatacacatacgggaaacctgtgaagggcgacgtcacactaacctttctccctctgtccttctggggtaagaagaagaatatcactaagacctttaaaataaacggctctgccaatttctcattcaacgacgaagagatgaaaaatgtcatggattcctccaacgggcttagcgaatacttggatttgtcatctcctggccctgtcgaaatcttaaccaccgtgaccgagtccgttactgggatttccagaaacgtttctactaatgttttcttcaagcaacacgattacattattgagttcttcgactacactacggtgttgaaaccttcgctgaatttcactgctacagtcaaggttacgcgagccgacgggaaccaactgactctcgaagaacggcgcaataatgtcgtaattactgtgactcaacggaattataccgaatattggagcggttcaaactctgggaatcagaagatggaagcagtccaaaagatcaattatacggtgccgcagtcgggaacctttaagattgagttccccattctggaggacagctcggagctgcagctgaaggcatattttcttggctcaaagtctagtatggcggtgcacagtcttttcaagtccccatctaagacatatatccaactcaaaacccgcgatgaaaatattaaagtgggctcccctttcgaattggtcgtgtcaggcaacaagcgcctgaaggagttaagttacatggtcgtctccaggggccagcttgtggcagtgggtaagcagaacagtaccatgttctccctgacccccgaaaattcgtggacccctaaggcctgtgtgattgtgtactatatcgaggacgacggggaaatcattagcgacgtactgaagattcctgtccagttggtgttcaagaataagattaagctgtactggagcaaagtaaaggcagagccctcggagaaggtgtccctgaggatctcagtgacccaaccagactcaatcgtcgggatagtcgccgtggacaagtccgtgaacctcatgaacgcaagcaacgacattactatggagaatgtggtccacgagcttgagctgtataacacaggctactatcttggcatgtttatgaactcattcgcggtctttcaagaatgtggattgtgggtgctgaccgacgctaacctgactaaagactatatcgacggcgtttacgacaacgctgagtatgccgagcggtttatggaagagaacgagggacatatcgttgatatccacgacttttctctcgggtcaagcccccatgtgaggaaacattttcccgaaacctggatttggttggacaccaatatgggataccgaatctaccaggagtttgaagtgactgtgcccgactccattacaagctgggtcgctaccggctttgtcatatctgaagatttgggcctcggccttactaccacgcccgtggagcttcaggcgtttcagccctttttcatctttctcaatctaccttacagcgttatcagaggcgaagagtttgccctagaaatcaccatcttcaattacctcaaggatgctacagaagtgaaggtgattatagaaaagtcagataagtttgacattcttatgaccagcaacgaaatcaacgcaactggacatcaacagacattactggtaccaagtgaagatggagcgaccgttctcttcccgatccgcccgactcacctcggcgagatccccattactgtgaccgctctgtcgcctaccgcctccgatgcagttacccaaatgattttagtgaaagccgaaggaattgaaaaatcctacagtcagtcaatactcctcgacctgacagacaacaggctgcaatctacactgaaaaccctctcattcagcttcccacctaacaccgtgacgggcagcgagagagtccaaatcacagcgatcggtgacgtcttaggcccctccatcaatggtctggcgtctttgattcggatgccatatggatgcggcgaacagaacatgattaactttgccccaaatatctatatcctggactacttgacaaagaaaaagcagctcaccgacaacttaaaagaaaaggccttgtctttcatgaggcagggttaccagagagagctactctaccaaagagaggacggtagcttctctgcctttggaaattacgaccccagcggaagcacctggctgtccgcgtttgtcctgaggtgctttctcgaggcagacccgtatatcgacatcgaccagaatgtacttcaccggacatacacatggttaaaaggccaccagaagagtaatggtgaattctgggatcccgggcgtgtgattcacagcgagctccagggaggcaataaatcaccagtaacactgacagcctacatcgtaacttccctgctaggttatcgcaagtatcagcccaacatcgacgttcaagaaagtatccattttctggaatcagaattcagccgggggatctcagataattataccctcgcattgataacctacgccctaagctctgtaggtagtccaaaggccaaagaagcccttaacatgttgacttggcgggctgagcaagaaggaggcatgcagttttgggtctctagcgaatccaaattaagcgattcatggcagccacgatccctagacatcgaagttgccgcctatgccttattgagccattttctccagtttcagacctcggaagggatccccatcatgcgctggctgtcccgacagcggaactctttaggcgggtttgcctccactcaagatactacagtagcgctgaaggcgctatcagagttcgcagctctcatgaatactgagaggacgaatatacaggtgaccgtgaccggccctagcagcccctctccagtcaaattcctcatcgatacccataacagactgctcctgcagacagctgagctggctgtggtgcaacccactgcagtgaatattagtgctaatgggtttggctttgcaatctgccaactcaatgtcgtatacaacgtgaaagcgtcagggtcttcacgcaggaggagaagtatccaaaatcaggaagcgtttgatcttgacgtcgctgtcaaggagaacaaggatgacttgaatcatgtggatttgaatgtctgcacttccttcagtggccccggccgatctggtatggccttaatggaagtgaatttactgtccggtttcatggtcccctcagaggctatttccctgagtgagaccgtgaagaaggtggagtacgatcacgggaaactaaatctttatctggattctgttaatgaaactcagttttgtgtaaatatcccagctgtcagaaacttcaaagtgtccaatacacaggacgcgtctgtctctatagtcgattattacgaaccacgacgacaagcagtccgaagctacaacagcgaggtgaagctcagcagttgtgacttgtgtagcgacgtgcagggatgccggccctgcgaagatggcgcatcaggctcccatcaccatagctccgttatcttcatcttttgctttaagcttctctattttatggagctgtggctctag

SEQ ID NO: 60397 - DNA, 4107 bp, Artificial Sequence
  derived and/or modified sequence
atgcagggcccccccctgctgacagctgcccacctgctgtgtgtgtgcacagctgccctggccgtggcccctggcccccgcttcctggtgacagcccctggcatcatccggcctggaggaaatgtgaccatcggcgtggagctgctggagcactgccccagccaggtgacagtgaaggccgagctgctgaagacagccagcaacctgactgtgtctgtgctggaggccgagggcgtgtttgagaagggcagcttcaagaccctgaccctgcccagcgaccccaagagcaacctgatccagcagtggctgagccagcagagcgacctgggcgtcatcagcaagaccttccagctgagcagccaccccatcctgggggactggagcatccaggtgcaggtgaatgaccagacctactaccagagcttccaggtgtctgaatatgtgctgcccaagtttgaggtgaccctgcagacccccctgtactgcagcatgaacagcaagcacctgaatggcaccatcacagccaagtacacctacggcaagcctgtgaagggagatgtgaccctgaccttcctgcccctgtccttctggggcaagaagaagaacatcaccaagaccttcaagatcaatggcagcgccaacttctccttcaatgatgaggagatgaagaatgtgatggacagcagcaatggcctgtctgagtacctggacctgagcagccctggccctgtggagatcctgaccaccgtgacagaatctgtgacaggcatcagcagaaatgtgtccaccaacgtgttcttcaagcagcacgactacatcatcgagttctttgactacaccaccgtgctgaagcccagcctgaacttcaccgccaccgtgaaggtgaccagggcagatggcaaccagctgaccctggaggagaggagaaataatgtggtgatcaccgtgacccagaggaactacacagagtactggagcggcagcaacagcggcaaccagaagatggaggccgtgcagaagatcaactacacagtgccccagagcggcaccttcaagattgagttccccatcctggaggacagcagcgagctgcagctgaaggcctacttcctgggcagcaagagctccatggctgtgcacagcctcttcaagagccccagcaagacctacatccagctgaagaccagagatgagaacatcaaggtgggcagcccctttgagctggtggtgtctggcaacaagaggctgaaggagctgagctacatggtggtgtcccggggccagctggtggccgtgggcaagcagaacagcaccatgttcagcctgaccccagaaaattcctggacccccaaggcctgtgtgattgtgtactacattgaagatgatggagagatcatcagtgatgtgctgaagatccctgtgcagctggtgttcaagaacaagatcaagctgtactggagcaaggtgaaggccgagcccagcgagaaggtgtccctgcgcatctctgtgacccagcctgacagcatcgtgggcatcgtggccgtggacaagtctgtgaacctgatgaatgccagcaatgacatcaccatggagaatgtggtgcatgagctggagctgtacaacacaggctactacctgggcatgttcatgaacagctttgctgtgttccaggagtgtggcctgtgggtgctgacagatgccaacctgaccaaggactacattgatggagtgtatgacaatgcagaatatgcagagcgcttcatggaggagaatgaaggccacatcgtggacatccatgacttcagcctgggcagcagcccccacgtgaggaagcacttccctgagacctggatctggctggacaccaacatgggctaccgcatctaccaggagtttgaggtgacagtgcctgacagcatcacctcctgggtggccaccggcttcgtcatcagcgaggacctgggcctgggcctgaccaccacccctgtggagctgcaggccttccagcccttcttcatcttcctgaacctgccctacagcgtcatccggggggaggagtttgccctggagatcaccatcttcaactacctgaaggatgccacagaggtgaaggtgatcatcgagaagagtgacaagtttgacatcctgatgaccagcaatgagatcaatgccaccggccaccagcagaccctgctggtgcccagtgaagatggagccaccgtgctcttccccatccggcccacccacctgggggagatccccatcaccgtgacagccctgagccccacagccagtgatgctgtgacccagatgatcctggtgaaggccgagggcatcgagaagagctacagccagagcatcctgctggacctgacagacaaccggctgcagagcaccctgaagaccctgtccttctccttcccccccaacacagtgactggaagtgagcgggtgcagatcacagccatcggagatgtgctgggccccagcatcaatggcctggccagcctcatccgcatgccctacggctgtggggagcagaacatgatcaactttgcccccaacatctacatcctggactacctgaccaagaagaagcagctgacagacaacctgaaggagaaggccctgtccttcatgaggcagggctaccagcgggagctgctgtaccagagagaagatggcagcttcagcgccttcggcaactatgaccccagcggcagcacctggctgagcgcctttgtgctgcgctgcttcctggaggccgacccctacatcgacatcgaccagaatgtgctgcacaggacctacacctggctgaagggccaccagaagagcaatggagagttctgggaccccggccgggtcatccacagcgagctgcagggcggcaacaagagccctgtgaccctgacagcctacatcgtgaccagcctgctgggctacaggaagtaccagcccaacattgatgtgcaggagagcatccacttcctggagagcgagttcagccggggcatcagtgacaactacaccctggccctgatcacctacgccctgagctctgtgggcagccccaaggccaaggaggccctgaacatgctgacctggagggctgagcaggagggcggcatgcagttctgggtgagcagcgagagcaagctgagtgacagctggcagcccaggagcctggacatcgaggtggccgcctatgccctgctgagccacttcctgcagttccagaccagcgagggcatccccatcatgcgctggctgagccggcagaggaacagcctgggcggctttgccagcacccaggacaccaccgtggccctgaaggccctgtctgaatttgctgccctgatgaacacagagaggaccaacatccaggtgacagtgacaggccccagcagccccagccctgtgaagttcctgattgacacccacaaccggctgctgctgcagacagctgagctggccgtggtgcagcccacagctgtgaacatcagcgccaatggatttggatttgccatctgccagctgaatgtggtgtacaacgtgaaggccagcggcagcagcagaagaagaagaagcatccagaaccaggaggcctttgacctggatgtggccgtgaaggagaacaaggatgacctgaaccacgtggacctgaatgtgtgcaccagcttcagcggccctggccgcagcggcatggccctgatggaggtgaacctgctgagcggcttcatggtgcccagcgaggccatcagcctgtctgaaacagtgaagaaggtggagtatgaccacggcaagctgaacctgtacctggacagcgtgaatgagacccagttctgtgtgaacatcccagctgtgaggaacttcaaggtgagcaacacccaggatgcctctgtgtccatcgtggactactatgagccccggcggcaggccgtgcgcagctacaacagcgaggtgaagctgagcagctgtgacctgtgcagtgatgtgcagggctgccggccctgtgaagatggagccagcggcagccaccaccacagcagcgtcatcttcatcttctgcttcaagctgctgtacttcatggagctgtggctgtag

SEQ ID NO: 60398 - DNA, 4107 bp, Artificial Sequence
  derived and/or modified sequence
atgcagggcccccccctgctgaccgccgcccacctgctgtgcgtgtgtacagctgcactggccgtggcgccaggaccaaggtttcttgttaccgcgcctgggattattcgacctggcggtaacgtgacaatcggagtcgagctgctggagcattgtccatcccaggtcactgtcaaagccgagctgctgaaaactgccagcaatctgacggtgagtgtcctcgaggccgagggtgtgtttgaaaaaggcagttttaaaaccctcacactcccttctgatcccaaaagcaatctcattcagcagtggctgagccagcagagcgacctgggtgtcatttcaaagacattccaactatcctctcatccaatattaggcgattggagtatccaggttcaagtcaacgatcagacgtattaccagagtttccaggtgtcagagtacgtcttacccaagtttgaagtgaccctgcaaacacctttatactgctctatgaactccaagcacctgaacgggactatcactgctaagtacacctacggcaagcccgttaagggagatgttacactcacattccttccgctctccttttggggaaaaaaaaagaacatcacaaagacattcaagatcaacggatctgcgaacttctccttcaatgatgaggagatgaagaatgttatggattcatcaaacgggctgtccgaataccttgatctgtcgtccccgggccctgtcgaaatactgacaacagtcaccgaatccgtcacaggcatcagcagaaatgttagcaccaatgtcttcttcaagcaacacgactatatcatcgagttcttcgattataccacagtgcttaaacccagtctgaactttaccgccaccgtaaaggtgaccagagcggacggcaaccagcttactctggaagaacgcagaaacaacgtagtgataactgtgacacaacggaattataccgagtactggagcggaagcaactctggcaatcagaagatggaagcagtgcaaaaaataaattatacagtgccacaatcgggcacctttaagatagagttcccaatcctggaggactcttccgaattgcaacttaaagcgtacttcctgggatcaaagtcttcaatggccgtacattctttgtttaagtcaccctcaaaaacttacatacagttaaagactagagacgagaacatcaaagtggggagcccattcgaactggttgtctctggtaataagcgcctaaaggaattaagctacatggtcgtcagcagaggccagctcgttgctgtcggcaagcagaactccaccatgttctctctgacccctgagaattcttggacgcctaaggcgtgtgtaatcgtgtattatatcgaagacgatggagaaattatctcagacgtgcttaaaatcccagtgcagctggtgtttaagaataaaataaaactttattggtctaaagttaaggccgagcctagcgaaaaagtgagcttgcgcatcagtgtcacccagcctgatagtatagtgggcattgtagccgttgacaaaagcgtgaaccttatgaacgcatccaacgacattaccatggagaacgtcgtgcacgaactggagttgtataatacgggatactacctgggcatgttcatgaattccttcgctgtctttcaggagtgtggcttgtgggtgctgaccgatgcgaatctgactaaagattatattgacggggtctatgacaatgcagagtatgcagaacggtttatggaagagaatgaaggccacattgtggatatacacgacttttcactagggtcttccccacacgttagaaaacactttcctgaaacatggatctggctggacactaatatggggtaccgcatctatcaggagtttgaagtgaccgtgcccgattccatcacctcatgggttgccaccggcttcgtaatctctgaagatctggggttagggctaactacaacacccgtggagctgcaggccttccaaccatttttcatttttcttaacctgccctacagcgttatcaggggtgaggaattcgccctcgagatcactatttttaattatctcaaagacgctacagaagtcaaggtgattatagagaaatcagacaaatttgacatactaatgacctccaacgagataaacgctaccggccaccagcaaaccctacttgtgccatccgaggacggcgccaccgtgcttttccccatcaggcccacacatttgggggaaatccctatcaccgtgaccgcactcagtcctacagcgtccgatgccgtgacccagatgatattagtcaaggctgaaggtattgaaaagtcttactctcagtcaatacttctggacctgactgataacagactccaatcaactctgaagacattgtcattctcgttcccccccaatacagtcactgggagcgagagggtgcaaattaccgctatcggggacgttttaggaccaagcattaacgggctggcaagtcttatacgcatgccttatggatgcggcgagcagaacatgatcaactttgctccgaatatctacatcttggactatctgacgaagaagaagcagcttacagataatctcaaagagaaggccttgagttttatgcgccaaggctatcagcgagaactcctgtaccagcgcgaggatggtagcttttcagccttcggaaattacgacccaagcggaagtacctggctgagtgcttttgttctcagatgcttcctagaagctgacccctacattgacattgatcagaacgtcttacacaggacatacacttggctgaagggccaccaaaagtcaaacggagaattttgggatccgggtcgggtgatacattctgagttgcagggggggaacaagagcccagtcaccctgacggcctatattgtaacgtctctccttggttatagaaagtaccaaccaaacattgacgtgcaggagtccatacatttcttagagtccgaatttagcaggggaatttccgacaattatacgttagcactgatcacttacgccctgtcatctgtgggatctccaaaggcgaaggaggccctgaacatgctcacatggagagcggaacaagaagggggaatgcagttctgggtttcttctgagagcaaattgtccgacagctggcagccgcgtagtcttgacattgaagtagcagcgtacgcccttctatcccatttcttgcaatttcagaccagtgaaggcatcccaatcatgagatggttatctaggcagaggaattcgctcggtggattcgcctctactcaggataccacagtggcgctcaaagctctgtctgagttcgcagccctcatgaataccgagcgaactaatattcaagtcacggtcaccggcccatccagcccaagtccagtgaaatttctcatcgacacacacaatcggctcttactccagacggccgagctcgccgtcgtgcaaccaaccgccgtgaacatctcggcgaacgggttcggctttgcaatctgccaattgaatgtggtttataatgtaaaagcatccggctcatcccgccgcaggaggtcaatacaaaaccaagaggcatttgatctggacgtcgctgtgaaggaaaataaagatgatctgaaccacgtggacctcaacgtgtgcacatcattcagtggtcctggtcggagcgggatggcactgatggaggtcaatcttctgtccggcttcatggtgccctcagaagctatcagtctgagcgaaactgtaaagaaggtagagtacgatcatggcaagctcaacctgtacttggacagtgtgaatgagactcagttctgcgtgaacataccagctgtgcggaattttaaagtgtcaaacacacaggatgcctcagtcagcatagttgattactacgaacccagacggcaggccgtgcgaagttacaactctgaggtaaagttgagctcatgtgacctgtgctccgatgtgcagggttgcaggccttgcgaggacggtgcatccggcagccatcatcacagctccgtgatcttcatcttctgttttaagttgttgtactttatggaactgtggctgtag

SEQ ID NO: 60399 - DNA, 4107 bp, Artificial Sequence
  derived and/or modified sequence
atgcaggggccaccattacttacagctgcccacttactgtgcgtgtgtaccgcggctcttgcagtggctccagggcctcgcttcctcgtgacagcccctggcattatccgccctggcggaaacgttactataggcgtcgagctgctcgaacattgcccctctcaggtcactgtaaaagcagagctgctgaaaacggcctctaatcttactgttagcgtgctggaggcggagggtgtctttgagaaagggagtttcaagacactgacattaccatcagatcctaagtctaatctgattcaacaatggctcagccagcagagcgacctgggcgtcatctcaaaaacgttccagctctcaagtcatcctattctgggggattggtctattcaggtgcaggttaacgatcagacctactaccagtcctttcaggtgagcgagtatgtgctgcctaagttcgaagtcacgctccagacaccactgtactgctccatgaatagtaaacacctgaacggtacgatcactgcgaagtacacctacggaaaacctgtgaaaggcgacgtgaccctcacgttcctgcccctgagcttttggggcaaaaagaaaaacattaccaaaacttttaaaattaacggatctgccaacttctcctttaatgatgaagagatgaaaaacgtgatggactcatctaacggcctcagtgaatacctggatctcagctctccaggccctgttgagatcttgacgacagtcacagagagcgtgaccggaattagccggaatgtatcaaccaatgtattctttaagcagcatgattacattatagaatttttcgactatacaactgtgctcaagccttccctgaatttcactgcaacagtgaaagtgactcgggctgacggaaaccagctgacattggaggagcgacgcaacaacgtcgtgattactgtgacgcagcggaattataccgagtactggtccgggagtaattcaggtaatcagaaaatggaggcggtccaaaaaataaactatactgtccctcagagcggcacattcaagattgagtttcccattttagaagattcaagtgagctacaactcaaagcgtacttcttggggtcgaaatctagtatggctgtgcacagtttgttcaaatccccgtcaaagacgtatatccaattgaagacccgcgacgaaaacatcaaggtcgggagtccgttcgagctagtggtgagcggcaacaagagactaaaagaactgtcgtacatggttgtgtccaggggacagttagtggccgtggggaagcagaattcgactatgttctccctaacgccggaaaatagctggacccccaaggcttgtgtgatcgtgtactacattgaggacgatggcgagatcatctcagatgtgctcaagatccctgtgcagttagtgtttaaaaataagattaagttatactggagcaaagttaaagcagagcccagcgaaaaagttagcctgagaatcagcgtgactcagcctgactctatcgtgggaattgtcgccgtcgataaatccgtgaatctaatgaacgcgtctaatgacatcacgatggagaacgttgtacacgaactcgaattatataatacgggctactatctggggatgttcatgaattcctttgccgtcttccaggaatgcggactgtgggtcctgacagacgctaacctgacaaaggactatatcgatggggtttatgacaatgcagaatacgccgagcgctttatggaggagaacgagggtcacatcgtggacatacatgattttagtctgggttctagtcctcatgtgcgaaagcatttccctgagacatggatttggttggatactaatatgggctatcgtatctatcaggagttcgaagtgactgtccctgactcaatcacgtcttgggtggccaccggtttcgtcatctctgaggacctcggcctgggactgactactactcccgtcgaactgcaggcatttcaaccattcttcatcttcctaaacctgccatactctgtcataagaggcgaagagtttgcgctggaaatcacaatcttcaattacctgaaagacgcgacagaggtcaaggtaatcattgagaagtcagacaaatttgatattctgatgacttcaaatgaaatcaacgccaccggccaccagcaaacgctgctggttccgtccgaggacggagccactgtactgtttccaattaggcccacccatctgggcgaaattccaattaccgtgacagcactgagccccacagcaagtgacgcagtaacgcagatgatattggtgaaagctgaagggattgagaagagctacagccagtcaatactgctcgatctgactgacaatcggttacagagtaccctcaagaccctctcattttcttttcccccaaacactgtgacaggaagcgagcgcgtgcagataacagccatcggggatgtcctgggcccatcaattaacggtctggccagtctcatcagaatgccctacggatgcggagaacaaaatatgatcaattttgctcccaacatatatatccttgattatctgaccaagaaaaaacagctgaccgacaatttgaaggaaaaagctttgtcattcatgaggcagggttaccagcgagaactattgtaccagcgagaggacggcagcttctccgcttttgggaattatgatccatcgggctctacctggttatccgcgttcgtgctgagatgctttttagaagccgacccatacattgatattgaccaaaatgtgctgcatagaacctacacttggctaaagggccatcaaaaaagcaacggggagttttgggatcctggccgagtaattcattctgaactgcaaggcggaaacaagtcaccagtgaccttaacagcttacattgttacaagcctgctaggttaccggaagtaccagcctaacatcgatgttcaggaatccatccacttcctagagtcagaattcagtagggggattagcgacaattataccctcgcccttataacatatgcactttcttctgtggggtcaccaaaagctaaagaggctcttaacatgctgacctggcgtgctgagcaggaggggggaatgcagttctgggtaagtagcgagtcaaaactctccgattcttggcagcccaggagtttggatatagaagtggcagcatacgctctgctgagccattttctgcagtttcagacaagcgagggaattcccattatgcgatggctttcacggcagagaaatagccttggtgggtttgcctccacccaggacacaaccgtggcgctgaaggctttaagtgagtttgccgcactcatgaacaccgagcgtaccaatatccaggttacagtgacgggtcccagctccccctccccggttaaatttctgattgatacacacaataggttgttgctccagactgcagagctcgctgtagtgcagcctactgcagtgaatatttcagccaatgggttcggcttcgcaatctgtcaactgaacgttgtctataatgtaaaagcatccggcagttctcggagaagacgtagtatccagaaccaggaggcatttgacctggatgtcgcggtgaaggagaataaagatgacctgaaccacgtggatctcaatgtctgcacctcattctctggcccagggcgtagtggcatggccttgatggaagtcaacctgctgtcggggttcatggtcccctccgaggctatttcactgtccgagacggtcaaaaaagtggaatacgatcatggaaaactaaacctgtatcttgattccgtgaacgaaacccagttctgcgtgaacatacccgcagtacgcaactttaaagtctcaaatacgcaggacgccagcgtttctattgtggattactacgaacctcgacggcaagccgtgaggagctataattctgaggtgaaactctcaagttgcgacctgtgctctgacgtgcaagggtgtcgcccttgcgaagacggagcatcaggctcccatcatcactcaagcgtcatctttattttttgcttcaaactgctttactttatggagttgtggctgtag

SEQ ID NO: 60400 - DNA, 9221 bp, Artificial Sequence
  derived and/or modified sequence
atagttgctatgaatttctcctcacaaggatgggcctgtttactcaccctgggcatcgttggtagagcgctagtgtaaacagcctgaggaacccggtgggccggggaagtgggcgcgctctgttctccgcggccagctgggacgccgggccaggtggggccgcctgcgtttagcaactgctttctcaccccctggatttgcgatgtttgccacagcagcgagaagcgccattgtaatggggatgggaggggtggagcctccaagtcctgtctcaatttagatctctcactctgctgttaggcgcgcccatttcagattactaaactcgaattaagagggaaaaaaaatcagggaggaggtggcaagccacaccccacggtgcccgcgaacttccccggcagcggactgtagcccaggcagacgccgtcgagatgcagggcccaccgctcctgaccgccgcccacctcctctgcgtgtgcaccgccgcgctggccgtggctcccgggcctcggtttctggtgacagccccagggatcatcaggcccggaggaaatgtgactattggggtggagcttctggaacactgcccttcacaggtgactgtgaaggcggagctgctcaagacagcatcaaacctcactgtctctgtcctggaagcagaaggagtctttgaaaaaggctcttttaagacacttactcttccatcagaccccaaatcaaatttgatccaacagtggttgtcacaacaaagtgatcttggagtcatttccaaaacttttcagctatcttcccatccaatacttggtgactggtctattcaagttcaagtgaatgaccagacatactatcaatcatttcaggtttcagaatatgtattaccaaaatttgaagtgactttgcagacaccattatattgttctatgaattctaagcatttaaatggtaccatcacggcaaagtatacatatgggaagccagtgaaaggagacgtaacgcttacatttttacctttatccttttggggaaagaagaaaaatattacaaaaacatttaagataaatggatctgcaaacttctcttttaatgatgaagagatgaaaaatgtaatggattcttcaaatggactttctgaatacctggatctatcttcccctggaccagtagaaattttaaccacagtgacagaatcagttacaggtatttcaagaaatgtaagcactaatgtgttcttcaagcaacatgattacatcattgagttttttgattatactactgtcttgaagccatctctcaacttcacagccactgtgaaggtaactcgtgctgatggcaaccaactgactcttgaagaaagaagaaataatgtagtcataacagtgacacagagaaactatactgagtactggagcggatctaacagtggaaatcagaaaatggaagctgttcagaaaataaattatactgtcccccaaagtggaacttttaagattgaattcccaatcctggaggattccagtgagctacagttgaaggcctatttccttggtagtaaaagtagcatggcagttcatagtctgtttaagtctcctagtaagacatacatccaactaaaaacaagagatgaaaatataaaggtgggatcgccttttgagttggtggttagtggcaacaaacgattgaaggagttaagctatatggtagtatccaggggacagttggtggctgtaggaaaacaaaattcaacaatgttctctttaacaccagaaaattcttggactccaaaagcctgtgtaattgtgtattatattgaagatgatggggaaattataagtgatgttctaaaaattcctgttcagcttgtttttaaaaataagataaagctatattggagtaaagtgaaagctgaaccatctgagaaagtctctcttaggatctctgtgacacagcctgactccatagttgggattgtagctgttgacaaaagtgtgaatctgatgaatgcctctaatgatattacaatggaaaatgtggtccatgagttggaactttataacacaggatattatttaggcatgttcatgaattcttttgcagtctttcaggaatgtggactctgggtattgacagatgcaaacctcacgaaggattatattgatggtgtttatgacaatgcagaatatgctgagaggtttatggaggaaaatgaaggacatattgtagatattcatgacttttctttgggtagcagtccacatgtccgaaagcattttccagagacttggatttggctagacaccaacatgggttacaggatttaccaagaatttgaagtaactgtacctgattctatcacttcttgggtggctactggttttgtgatctctgaggacctgggtcttggactaacaactactccagtggagctccaagccttccaaccatttttcatttttttgaatcttccctactctgttatcagaggtgaagaatttgctttggaaataactatattcaattatttgaaagatgccactgaggttaaggtaatcattgagaaaagtgacaaatttgatattctaatgacttcaaatgaaataaatgccacaggccaccagcagacccttctggttcccagtgaggatggggcaactgttctttttcccatcaggccaacacatctgggagaaattcctatcacagtcacagctctttcacccactgcttctgatgctgtcacccagatgattttagtaaaggctgaaggaatagaaaaatcatattcacaatccatcttattagacttgactgacaataggctacagagtaccctgaaaactttgagtttctcatttcctcctaatacagtgactggcagtgaaagagttcagatcactgcaattggagatgttcttggtccttccatcaatggcttagcctcattgattcggatgccttatggctgtggtgaacagaacatgataaattttgctccaaatatttacattttggattatctgactaaaaagaaacaactgacagataatttgaaagaaaaagctctttcatttatgaggcaaggttaccagagagaacttctctatcagagggaagatggctctttcagtgcttttgggaattatgacccttctgggagcacttggttgtcagcttttgttttaagatgtttccttgaagccgatccttacatagatattgatcagaatgtgttacacagaacatacacttggcttaaaggacatcagaaatccaacggtgaattttgggatccaggaagagtgattcatagtgagcttcaaggtggcaataaaagtccagtaacacttacagcctatattgtaacttctctcctgggatatagaaagtatcagcctaacattgatgtgcaagagtctatccattttttggagtctgaattcagtagaggaatttcagacaattatactctagcccttataacttatgcattgtcatcagtggggagtcctaaagcgaaggaagctttgaatatgctgacttggagagcagaacaagaaggtggcatgcaattctgggtgtcatcagagtccaaactttctgactcctggcagccacgctccctggatattgaagttgcagcctatgcactgctctcacacttcttacaatttcagacttctgagggaatcccaattatgaggtggctaagcaggcaaagaaatagcttgggtggttttgcatctactcaggataccactgtggctttaaaggctctgtctgaatttgcagccctaatgaatacagaaaggacaaatatccaagtgaccgtgacggggcctagctcaccaagtcctgtaaagtttctgattgacacacacaaccgcttactccttcagacagcagagcttgctgtggtacagccaacggcagttaatatttccgcaaatggttttggatttgctatttgtcagctcaatgttgtatataatgtgaaggcttctgggtcttctagaagacgaagatctatccaaaatcaagaagcctttgatttagatgttgctgtaaaagaaaataaagatgatctcaatcatgtggatttgaatgtgtgtacaagcttttcgggcccgggtaggagtggcatggctcttatggaagttaacctattaagtggctttatggtgccttcagaagcaatttctctgagcgagacagtgaagaaagtggaatatgatcatggaaaactcaacctctatttagattctgtaaatgaaacccagttttgtgttaatattcctgctgtgagaaactttaaagtttcaaatacccaagatgcttcagtgtccatagtggattactatgagccaaggagacaggctgtgagaagttacaactctgaagtgaagctgtcctcctgtgacctttgcagtgatgtccagggctgccgtccttgtgaggatggagcttcaggctcccatcatcactcttcagtcatttttattttctgtttcaagcttctgtactttatggaactttggctgtgatttatttttaaaggactctgtgtaacactaacatttccagtagtcacatgtgattgttttgttttcgtagaagaatactgcttctattttgaaaaaagagttttttttctttctatggggttgcagggatggtgtacaacaggtcctagcatgtatagctgcatagatttcttcacctgatctttgtgtggaagatcagaatgaatgcagttgtgtgtctatattttcccctctcaaaatcttttagaatttttttggaggtgtttgttttctccagaataaaggtattactttagaataggtattctcctcattttgtgaaagaaatgaacctagattcttaagcattattacacatccatgtttgcttaaagatggatttccctgggaatgggagaaaacagccagcaggaggagcttcatctgttcccttcccacctccaacctagccctactgcccaccccaccccaacccaccccatgcccagtggtctcagtagatacttcttaactggaaattctttcttttcagaatctaggtggtgaattttttttaagtggcacggtctttttctgcttgaaatctgatcacaccccccagccattgccctccctctctttttcctctgtagagaaatgtgaggggcagtacatttactgtgcttttcacaccatctcagaggttgaggagcatactgaaaattgccctggggggtgctgggtgtgctatctccttcccacatcctcagccccacaccagctctatttcaggggtgagagtcagagagcactgcaatatgtgcttcatgggatttcgattcgaagatcctagaccagggagacactgtgagccagggatacaacaaaatactaggtaagtcactgcagaccgacctccctgcagtttgggaaagaagctgggtttgtggagaatcagagcatcttgacatgactgctgacctaaagatccctggcattggccagggatcctgtggaacctcttctagttcaggggtgtgagcattagactgccagttgtctagtgacatctgatgcttgctgtgaacttttaagatccccgaatcctgagcacctcaatctttaattgccctgtattccgaagggtaatataatttatctggatggaaattttaaagatgaatcccccttttttcttttcttctctcttttctttccttctccctttcttctttgccttctaaatatactgaaatgatttagatatgtgtcaacaattaatgatcttttattcaatctaagaaatggtttagtttttctctttagctctatggcatttcactcaagtggacaggggaaaaagtaattgccatgggctccaaagaatttgctttatgtttttagctatttaaaaataaatccatcaaaaataaagtatgcaaatgtatcttttaaagttaatttttaaaaatgctcttattttagtgaattttcagaaattatagtggaatggatgctcatatattgcttatggatattttggataccaaagtaggaataactgacattcagtattttaaagctggcaaacctgtacatagaaaatagatccccagacagtggtctatgaagagggcagttaagtatcaaatacttaattttcttgcctttttttcttaagtggggaaaagtttctagatctcttacacctctgacacaatctgttctaaaacaggcacttgtaatgttggggcctccttgtaaacgtgtttttgccctttactctctgggagttctttaaaggtgaaatcatcttacaaagaaattgggggagggtcttggcaaaggactttcccctcctctttcctggcctgggaaccttatactgacaatcaatactttatattttaaagtatataatttatagttaacttctagtgtaatatattaggaaacactagaatggaaaggccattggaagacaggttgtatcttttttagaccatatttccttgtttaaaaactatcatttgaatacttttttggtgaagaactccatgttttcaagttaaaggtcacctcgtaggccaggcgcagtggctcatgcctgtaatcccagcactctgggaggctgaggcgggtgaatcacaaggttaggagtttgagaccagcctggccaatatggtgaaaccccgtccctactaaaaatacaaaatttagccaggcgtggtggcatgcacctgtagtcccacctactcgggaggctgaggcaggagaatcacttgaacctgagagacagaggttgcagtgagccgagatcacgccactgcactccagcctgggggacagagtgagattctgtctcaaaaaacaaaaaacaaaaaagtcaccttgtaactcatctctttttattgtaagtttattaaaaatgaagaggacaacaatgagaaggaacataaagggttagctagcactgtctcctggtgcatggggctgtgcagatgtcccggccacttcttccttcatacttcccttagagaacttgctctgctacaagcagtgggcttggactaaaagtgattaaaataccacaggcataaggagaaaaggagtatatgtagtagtaataattactagtataaattattttcttcacatgctatgagtaataatattaaaaaactcattttaccattaagattccttatgctgaagctcttccatttagaatactgtcaatgtcatttactggtatgaactaaagtcccccttcttttccactcactgggaaccttagtaaaacaccagcatatcttacctctctttctgactggccgatgcttccagagactgaatgttgggaaaacctagtagccaaacaattctaggacagaataacatttttatatttggttccaccatcttattacatttagttatagttttaaaaaagaaattcaagcccattaaaatatgtctggtcaatgaaatgcttccttttattgtgttgtgctattgtgctttgtttttcaaaacattgtaaaaatagtatctttggtttagtattttggattatatattataatctgaggagtgttttgcttatgtagaatccagatatatttctgttacctaggagatgttacttacatatgtaatactgtatcctgcacatggaaatattcagaattgtagatagcataactctccctgctcctattcttttgagcctaggtataattttttttttttttttagaaaaagacatatttagctttaatttctatttatgctaaacatatttataagtagtctgtcaatataataccaactatttttatttttacataattcaattatttcatttgacatgtctggcagactcaagacattaagtaaaaaattggaactatgatttttctttgtcattttttaaaaaagaattattttattaacctgctggcatataatctggagttcttttcacaaccttactttttctgatttgctttattgaatgattgaatactcatttctttctaaaaatatgttgtaaattctcccttggcaagatttctccctatgagggtagttattatttgagtctgccaagtggttaccatggggcaaggtgccatgatgtattcttgggtgcattggttttttgcgcattgtaaatttaagacacttatagtaagtggactcattcatagatgagtttcagaaccttttacgttctcggtagaggcttctgtcggacaggcagaagagtgtattcctcacttttttttttgtcttcaaattccagtaaggcatagcacttttaagaaattagaatttttctatcatctatgcaaatgatatttatgttaatattaaatatcttatgttacactgggagtaatttgaggtgcaattatttttattactactttgaatagaggaccattatccttctttcttcagaaaactaagaagtaagtgtaacttttaaagtaagtatatatcagtgagagtaggcttgttttacaactatttctagccagtgagttgtgttttcatgtctcatcaaaagacaataccacattgcatcattttacaaaatatgttgtcattttcatttcagttgtaacataggaaaatagatatttcctagatgatttctgagtttcttactgcaaagaacagttataaattggtatacatgtgtctctgtaatagggataatattgatatatctgttgctacatatttaagaatcattctatcttatgttgtcttgaggccaagatttaccacgtttgcccagtgtattgaattggtggtagaaggtagttccatgttccatttgtagatctttaagattttatctttgataactttaatagaatgtggctcagttctggtccttcaagcctgtatggtttggattttcagtaggggacagttgatgtggagtcaatctctttggtacacaggaagctttataaaatttcattcacgaatctcttattttgggaagctgttttgcatatgagaagaacactgttgaaataaggaactaaagctttatatattgatcaaggtgattctgaaagttttaatttttaatgttgtaatgttatgttattgttaattgtactttattatgtattcaatagaaaatcatgatttattaataaaagcttaaattctcatctattt

SEQ ID NO: 60401 - DNA, 4107 bp, Artificial Sequence
  derived and/or modified sequence
atgcagggcccccccctgctgaccgccgcccacctgctgtgcgtgtgcaccgccgccctggccgtggcccccggccccagattcctggtgaccgcccccggcatcatcagacccggcggcaacgtgaccatcggcgtggagctgctggagcactgccccagccaggtgaccgtgaaggccgagctgctgaagaccgccagcaacctgaccgtgagcgtgctggaggccgagggcgtgttcgagaagggcagcttcaagaccctgaccctgcccagcgaccccaagagcaacctgatccagcagtggctgagccagcagagcgacctgggcgtgatcagcaagaccttccagctgagcagccaccccatcctgggcgactggagcatccaggtgcaggtgaacgaccagacctactaccagagcttccaggtgagcgagtacgtgctgcccaagttcgaggtgaccctgcagacccccctgtactgcagcatgaacagcaagcacctgaacggcaccatcaccgccaagtacacctacggcaagcccgtgaagggcgacgtgaccctgaccttcctgcccctgagcttctggggcaagaagaagaacatcaccaagaccttcaagatcaacggcagcgccaacttcagcttcaacgacgaggagatgaagaacgtgatggacagcagcaacggcctgagcgagtacctggacctgagcagccccggccccgtggagatcctgaccaccgtgaccgagagcgtgaccggcatcagcagaaacgtgagcaccaacgtgttcttcaagcagcacgactacatcatcgagttcttcgactacaccaccgtgctgaagcccagcctgaacttcaccgccaccgtgaaggtgaccagagccgacggcaaccagctgaccctggaggagagaagaaacaacgtggtgatcaccgtgacccagagaaactacaccgagtactggagcggcagcaacagcggcaaccagaagatggaggccgtgcagaagatcaactacaccgtgccccagagcggcaccttcaagatcgagttccccatcctggaggacagcagcgagctgcagctgaaggcctacttcctgggcagcaagagcagcatggccgtgcacagcctgttcaagagccccagcaagacctacatccagctgaagaccagagacgagaacatcaaggtgggcagccccttcgagctggtggtgagcggcaacaagagactgaaggagctgagctacatggtggtgagcagaggccagctggtggccgtgggcaagcagaacagcaccatgttcagcctgacccccgagaacagctggacccccaaggcctgcgtgatcgtgtactacatcgaggacgacggcgagatcatcagcgacgtgctgaagatccccgtgcagctggtgttcaagaacaagatcaagctgtactggagcaaggtgaaggccgagcccagcgagaaggtgagcctgagaatcagcgtgacccagcccgacagcatcgtgggcatcgtggccgtggacaagagcgtgaacctgatgaacgccagcaacgacatcaccatggagaacgtggtgcacgagctggagctgtacaacaccggctactacctgggcatgttcatgaacagcttcgccgtgttccaggagtgcggcctgtgggtgctgaccgacgccaacctgaccaaggactacatcgacggcgtgtacgacaacgccgagtacgccgagagattcatggaggagaacgagggccacatcgtggacatccacgacttcagcctgggcagcagcccccacgtgagaaagcacttccccgagacctggatctggctggacaccaacatgggctacagaatctaccaggagttcgaggtgaccgtgcccgacagcatcaccagctgggtggccaccggcttcgtgatcagcgaggacctgggcctgggcctgaccaccacccccgtggagctgcaggccttccagcccttcttcatcttcctgaacctgccctacagcgtgatcagaggcgaggagttcgccctggagatcaccatcttcaactacctgaaggacgccaccgaggtgaaggtgatcatcgagaagagcgacaagttcgacatcctgatgaccagcaacgagatcaacgccaccggccaccagcagaccctgctggtgcccagcgaggacggcgccaccgtgctgttccccatcagacccacccacctgggcgagatccccatcaccgtgaccgccctgagccccaccgccagcgacgccgtgacccagatgatcctggtgaaggccgagggcatcgagaagagctacagccagagcatcctgctggacctgaccgacaacagactgcagagcaccctgaagaccctgagcttcagcttcccccccaacaccgtgaccggcagcgagagagtgcagatcaccgccatcggcgacgtgctgggccccagcatcaacggcctggccagcctgatcagaatgccctacggctgcggcgagcagaacatgatcaacttcgcccccaacatctacatcctggactacctgaccaagaagaagcagctgaccgacaacctgaaggagaaggccctgagcttcatgagacagggctaccagagagagctgctgtaccagagagaggacggcagcttcagcgccttcggcaactacgaccccagcggcagcacctggctgagcgccttcgtgctgagatgcttcctggaggccgacccctacatcgacatcgaccagaacgtgctgcacagaacctacacctggctgaagggccaccagaagagcaacggcgagttctgggaccccggcagagtgatccacagcgagctgcagggcggcaacaagagccccgtgaccctgaccgcctacatcgtgaccagcctgctgggctacagaaagtaccagcccaacatcgacgtgcaggagagcatccacttcctggagagcgagttcagcagaggcatcagcgacaactacaccctggccctgatcacctacgccctgagcagcgtgggcagccccaaggccaaggaggccctgaacatgctgacctggagagccgagcaggagggcggcatgcagttctgggtgagcagcgagagcaagctgagcgacagctggcagcccagaagcctggacatcgaggtggccgcctacgccctgctgagccacttcctgcagttccagaccagcgagggcatccccatcatgagatggctgagcagacagagaaacagcctgggcggcttcgccagcacccaggacaccaccgtggccctgaaggccctgagcgagttcgccgccctgatgaacaccgagagaaccaacatccaggtgaccgtgaccggccccagcagccccagccccgtgaagttcctgatcgacacccacaacagactgctgctgcagaccgccgagctggccgtggtgcagcccaccgccgtgaacatcagcgccaacggcttcggcttcgccatctgccagctgaacgtggtgtacaacgtgaaggccagcggcagcagcagaagaagaagaagcatccagaaccaggaggccttcgacctggacgtggccgtgaaggagaacaaggacgacctgaaccacgtggacctgaacgtgtgcaccagcttcagcggccccggcagaagcggcatggccctgatggaggtgaacctgctgagcggcttcatggtgcccagcgaggccatcagcctgagcgagaccgtgaagaaggtggagtacgaccacggcaagctgaacctgtacctggacagcgtgaacgagacccagttctgcgtgaacatccccgccgtgagaaacttcaaggtgagcaacacccaggacgccagcgtgagcatcgtggactactacgagcccagaagacaggccgtgagaagctacaacagcgaggtgaagctgagcagctgcgacctgtgcagcgacgtgcagggctgcagaccctgcgaggacggcgccagcggcagccaccaccacagcagcgtgatcttcatcttctgcttcaagctgctgtacttcatggagctgtggctgtag

SEQ ID NO: 60402 - protein, 281 aa, Artificial Sequence
  derived and/or modified sequence
MGAGNLPPITQEEALHILGFQPPFEDIRFGPFTGNTTLMRWFRQINDHFHVKGCSYVLYKPHGKNKTAGETASGALSKLTRGLKDESLAYIYHCQNHYFCPIGFEATPVKANKAFSRGPLSPQEVEYWILIGESSRKHPAIHCKKWADIVTDLNTQNPEYLDIRHLERGLQYRKTKKPTFFSSQVGGNLHCIIAFQRLNWQRFGLWNFPFGTIRQESQPPTHAQGIAKSESEDNISKKQHGRLGRSFSASFHQDSAWKKMSSIHERRNSGYQGYSDYDGND

SEQ ID NO: 60403 - DNA, 846 bp, Artificial Sequence
  derived and/or modified sequence
atgggcgccggcaacctgccccccatcacccaggaggaggccctgcacatcctgggcttccagccccccttcgaggacatcagattcggccccttcaccggcaacaccaccctgatgagatggttcagacagatcaacgaccacttccacgtgaagggctgcagctacgtgctgtacaagccccacggcaagaacaagaccgccggcgagaccgccagcggcgccctgagcaagctgaccagaggcctgaaggacgagagcctggcctacatctaccactgccagaaccactacttctgccccatcggcttcgaggccacccccgtgaaggccaacaaggccttcagcagaggccccctgagcccccaggaggtggagtactggatcctgatcggcgagagcagcagaaagcaccccgccatccactgcaagaagtgggccgacatcgtgaccgacctgaacacccagaaccccgagtacctggacatcagacacctggagagaggcctgcagtacagaaagaccaagaagcccaccttcttcagcagccaggtgggcggcaacctgcactgcatcatcgccttccagagactgaactggcagagattcggcctgtggaacttccccttcggcaccatcagacaggagagccagccccccacccacgcccagggcatcgccaagagcgagagcgaggacaacatcagcaagaagcagcacggcagactgggcagaagcttcagcgccagcttccaccaggacagcgcctggaagaagatgagcagcatccacgagagaagaaacagcggctaccagggctacagcgactacgacggcaacgactag

SEQ ID NO: 60404 - DNA, 846 bp, Artificial Sequence
  derived and/or modified sequence
atgggagctggtaatctgccacctattactcaggaggaagctcttcatattctcggctttcagcctccattcgaggatattagatttgggcccttcactgggaataccactctcatgcggtggttcagacagattaacgatcacttccacgtgaagggatgttcgtacgtcctgtataaacctcatggcaaaaacaaaacagccggcgagaccgctagtggagctctcagcaaactgactaggggactcaaagatgaaagcctcgcttatatttatcactgtcagaaccactacttctgtcctatcggttttgaggcaactccggtgaaggccaacaaggctttttctcgcggaccattgagcccacaggaagttgagtactggatcctgattggcgaatcctcaagaaaacacccggcaatccactgtaagaaatgggcagatatcgtgacagacctgaatacacagaatccagagtacttagacattcggcatctggagcgtggattgcagtatcgaaagaccaagaaacccacgtttttctcctcccaggtgggaggtaacctgcattgtattatcgcgtttcaacgactgaactggcagcgcttcgggctgtggaatttccccttcgggacaatccgccaggagagccagccgcccactcatgcacagggcattgcaaagagtgaatccgaggataatatatctaaaaaacaacacggcaggctgggtagaagcttctctgcttcattccaccaggattccgcctggaagaagatgtcctctattcacgaacggcgcaactctggctatcagggttacagcgactacgacggaaacgactag

SEQ ID NO: 60405 - DNA, 846 bp, Artificial Sequence
  derived and/or modified sequence
atgggcgccggcaacctgccccccatcacccaggaggaggccctgcacatcctgggcttccagcccccatttgaggacatccgcttcggccccttcaccggcaacaccaccctgatgcgctggttccggcagatcaatgaccacttccacgtgaagggctgcagctatgtgctgtacaagccccacggcaagaacaagacagctggggagacagccagcggggccctgagcaagctgacccggggcctgaaggatgagagcctggcctacatctaccactgccagaaccactacttctgccccatcggctttgaggccacccctgtgaaggccaacaaggccttcagccggggccccctgagcccccaggaggtggagtactggatcctgattggagagagcagcaggaagcacccagccatccactgcaagaagtgggccgacatcgtgacagacctgaacacccagaaccctgagtacctggacatccgccacctggagcggggcctgcagtacaggaagaccaagaagcccaccttcttcagcagccaggtgggcggcaacctgcactgcatcatcgccttccagaggctgaactggcagagatttggcctgtggaacttccccttcggcaccatccggcaggagagccagccccccacccacgcccagggcatcgccaagtctgagagcgaggacaacatcagcaagaagcagcacggccgcctgggccgctccttcagcgccagcttccaccaggacagcgcctggaagaagatgagcagcatccacgagaggagaaattctggctaccagggctacagcgactatgatggaaatgactag

SEQ ID NO: 60406 - DNA, 846 bp, Artificial Sequence
  derived and/or modified sequence
atgggcgccggcaacctgccccccatcacccaggaggaggccctgcacatcctgggatttcaaccaccgttcgaggatataaggttcgggccctttactgggaataccacgcttatgcgatggtttagacagattaatgaccactttcatgttaaaggttgctcatatgttctgtataagccacacggcaagaataagacggccggcgaaacagccagtggagccctctcgaagttgactcggggacttaaggacgagagccttgcctatatctaccattgccagaaccactatttctgccctataggctttgaggctaccccagtgaaggcgaataaggcattttctcgcggacctctctccccacaggaggtggagtactggatcctgatcggcgaaagctctcgaaaacacccagctatacattgcaaaaagtgggctgatatcgtgacagatctgaacacacagaatccagagtatcttgacatccgccacctggagcgcggccttcagtatcgaaagaccaagaagcccacctttttttcctcgcaggtgggtggcaaccttcactgcatcatcgcatttcagagactgaactggcagagatttggcctgtggaacttcccgtttgggacgattcggcaggagagccagccacctactcatgctcaggggattgccaagtcagaaagcgaagataatatttcaaagaagcagcacgggagactgggcagatctttcagcgcatcgttccatcaggactcagcctggaagaagatgagcagtattcacgagagacgtaactccggctaccagggctactcggactacgatgggaatgactag

SEQ ID NO: 60407 - DNA, 846 bp, Artificial Sequence
  derived and/or modified sequence
atgggagctggtaatctgccccctattacacaggaggaagctctgcacatcctcggatttcagccaccgtttgaagacattaggtttggaccttttactggcaacacaacattgatgagatggttccgacaaatcaatgatcacttccacgtcaaaggatgcagttatgttctgtacaaaccacacggcaagaataaaaccgccggagagacagcctccggggctttaagcaaactgaccaggggactgaaagatgaaagtttggcatatatctatcactgccagaatcattacttctgtccaatcgggtttgaagccacgcccgtcaaggccaataaggcgttttcccggggacctctgtctccacaagaggtcgaatactggatcctcatcggggagtcaagcagaaagcaccccgcaattcactgcaaaaagtgggcagacatagtgaccgatctaaatactcagaaccccgaatacctggacatcaggcacctggagaggggtcttcagtacaggaagaccaagaagcccacatttttctcatctcaggtcgggggaaacctccactgtattatcgcttttcagcgcctgaactggcagcgctttgggctgtggaactttccgttcggtaccatacgccaagaaagtcagccaccaacccacgctcaggggatagctaagtccgagagcgaagataacatctccaagaaacaacacggcagactaggtagatccttctcggccagctttcaccaggactctgcctggaaaaagatgagtagcatacatgagagaaggaattccggttaccagggttacagcgattacgacgggaacgactag

SEQ ID NO: 60408 - protein, 323 aa, Artificial Sequence
  derived and/or modified sequence
MNNPIPSNLKSEAKKAAKILREFTEITSRNGPDKIIPAHVIAKAKGLAILSVIKAGFLVTARGGSGIVVARLPDGKWSAPSAIGIAGLGGGFEIGIEVSDLVIILNYDRAVEAFAKGGNLTLGGNLTVAVGPLGRNLEGNVALRSSAAVFTYCKSRGLFAGVSLEGSCLIERKETNRKFYCQDIRAYDILFGDTPRPAQAEDLYEILDSFTEKYENEGQRINARKAAREQRKSSAKELPPKPLSRPQQSSAPVQLNSGSQSNLNQPIEVTALYSFEGQQPGDLNFQAGDRITVISKTDSHFDWWEGKLRGQTGIFPANYVTMN

SEQ ID NO: 60409 - DNA, 972 bp, Artificial Sequence
  derived and/or modified sequence
atgaacaaccccatccccagcaacctgaagagcgaggccaagaaggccgccaagatcctgagagagttcaccgagatcaccagcagaaacggccccgacaagatcatccccgcccacgtgatcgccaaggccaagggcctggccatcctgagcgtgatcaaggccggcttcctggtgaccgccagaggcggcagcggcatcgtggtggccagactgcccgacggcaagtggagcgcccccagcgccatcggcatcgccggcctgggcggcggcttcgagatcggcatcgaggtgagcgacctggtgatcatcctgaactacgacagagccgtggaggccttcgccaagggcggcaacctgaccctgggcggcaacctgaccgtggccgtgggccccctgggcagaaacctggagggcaacgtggccctgagaagcagcgccgccgtgttcacctactgcaagagcagaggcctgttcgccggcgtgagcctggagggcagctgcctgatcgagagaaaggagaccaacagaaagttctactgccaggacatcagagcctacgacatcctgttcggcgacacccccagacccgcccaggccgaggacctgtacgagatcctggacagcttcaccgagaagtacgagaacgagggccagagaatcaacgccagaaaggccgccagagagcagagaaagagcagcgccaaggagctgccccccaagcccctgagcagaccccagcagagcagcgcccccgtgcagctgaacagcggcagccagagcaacctgaaccagcccatcgaggtgaccgccctgtacagcttcgagggccagcagcccggcgacctgaacttccaggccggcgacagaatcaccgtgatcagcaagaccgacagccacttcgactggtgggagggcaagctgagaggccagaccggcatcttccccgccaactacgtgaccatgaactag

SEQ ID NO: 60410 - DNA, 156 bp, Artificial Sequence
  derived and/or modified sequence
atgaacaaccccatccccagcaacctgaagagcgaggccaagaaggccgccaagatcctgagagagttcaccgagatcaccagcagaaacggccccgacaagatcatccccgcccacgtgatcgccaaggccaagggcctggccatcctgagctag

SEQ ID NO: 60411 - DNA, 972 bp, Artificial Sequence
  derived and/or modified sequence
atgaataacccgatccccagtaatcttaagtctgaggcaaagaaggctgcaaagatattaagggagttcacggagatcacaagcaggaacgggccagataagattattccagctcacgtgatcgctaaggccaagggactcgccatcctgagtgtcataaaggcagggttccttgtcaccgcaaggggcggatcaggcattgtcgtggcccgcctaccagatggcaagtggtctgctccatcagccataggaattgcaggactgggaggcggcttcgagatcggcattgaggtgagcgatctggtgataatcctcaattacgaccgggcagtagaggccttcgctaaaggcgggaaccttacacttggtggcaatctcactgttgcggtgggcccgctcggccgcaatctggaagggaacgttgcactgaggagtagcgccgcagtgtttacctactgcaaatcaagaggcttgtttgcaggggtgtccctggaagggtcatgtcttatcgagaggaaagagacaaatcgcaaattctattgccaggacattcgggcgtatgacatcctgtttggagacacacctcgcccagcgcaggctgaagatctgtatgaaatactcgactcttttactgaaaagtacgaaaatgagggccagaggataaatgcgcgcaaagctgcacgcgaacagaggaaaagctctgccaaggaactccctcccaaaccgctttctcggccccagcaatcttcagctccagtgcagctgaacagtggctcacaaagcaacctgaaccagcccattgaggtgactgccctctatagcttcgagggacagcagccaggagacctgaattttcaggcaggcgatcgtataacagttataagcaagaccgacagccactttgattggtgggaaggaaagttgcgcggccaaactgggatcttcccagccaactacgtaactatgaattag

SEQ ID NO: 60412 - DNA, 156 bp, Artificial Sequence
  derived and/or modified sequence
atgaataatcctatcccatcaaacctgaaaagtgaggcaaagaaggccgctaagattcttcgtgaattcacggaaatcactagccgcaatgggcccgataaaattattcccgcccatgtgattgccaaggcgaaaggcctggcgattctgtcttag

SEQ ID NO: 60413 - DNA, 972 bp, Artificial Sequence
  derived and/or modified sequence
atgaacaaccccatccccagcaacctgaagtctgaggccaagaaggccgccaagatcctgcgggagttcacagagatcaccagcagaaatggaccagacaagatcatcccagcccacgtgattgccaaggccaagggcctggccatcctgagcgtcatcaaggccggcttcctggtgacagcccggggcggcagcggcatcgtggtggcccggctgcctgatggcaagtggagcgcccccagcgccatcggcattgctggcctgggcggcggctttgagatcggcatcgaggtgtctgacctggtgatcatcctgaactatgacagagctgtggaggcctttgccaagggcggcaacctgaccctgggcggcaacctgactgtggccgtgggccccctgggcaggaacctggagggcaatgtggccctgcggagcagcgctgctgtgttcacctactgcaagagccggggcctgtttgctggggtgtccctggagggcagctgcctgattgaaaggaaggagaccaacaggaagttctactgccaggacatccgggcctatgacatcctgtttggagacacccccaggcctgcccaggccgaggacctgtatgagatcctggacagcttcacagagaagtatgaaaatgaaggccagaggatcaatgccaggaaggccgcccgggagcagaggaagagcagcgccaaggagctgccccccaagcccctgagccggccccagcagagcagcgcccctgtgcagctgaacagcggcagccagagcaacctgaaccagcccatcgaggtgacagccctgtacagctttgagggccagcagcccggggacctgaacttccaggccggggaccgcatcaccgtcatcagcaagacagacagccactttgactggtgggagggcaagctgcggggccagacaggcatcttccctgccaactacgtgaccatgaactag

SEQ ID NO: 60414 - DNA, 156 bp, Artificial Sequence
  derived and/or modified sequence
atgaacaaccccatccccagcaacctgaagtctgaggccaagaaggccgccaagatcctgcgggagttcacagagatcaccagcagaaatggaccagacaagatcatcccagcccacgtgattgccaaggccaagggcctggccatcctgtcctag

SEQ ID NO: 60415 - DNA, 972 bp, Artificial Sequence
  derived and/or modified sequence
atgaacaaccccatccccagcaacctgaagagcgaggccaagaaggctgcgaagatactgcgggagttcacagaaatcacgagccggaacgggcccgacaagatcatacctgcccacgttattgcgaaagcaaaagggctggcaatcctgagtgtgatcaaggccgggttcctcgtaacagcccgcggaggctctggcatcgtggtggcccgcctgccagacggcaaatggagtgctccttctgcaatcggcatagcaggactagggggcgggttcgaaatcggcattgaggttagtgacctcgtcatcatactgaattacgacagggctgttgaagcattcgccaagggcggcaatctgacactgggtggcaacctaacggttgctgtaggccctcttggccgcaatcttgagggcaatgtcgccctgcgatccagcgcagcggtttttacttactgtaagtccagggggctctttgctggcgtgagtctggaaggttcatgcctcattgaaagaaaagagactaatagaaagttctactgccaggacatccgtgcatatgatatcttattcggggacacgccgcgcccggcgcaggcggaagacctttatgagatcttggattcttttaccgagaaatacgagaacgagggtcagagaatcaacgccagaaaagccgctagagagcagcggaagagtagcgcaaaggagctgccgcccaagcccctaagcaggccacagcagtcatctgcacctgtgcagctcaattccggctcgcaatccaacctaaaccagccaatcgaagtcaccgctctatactccttcgaggggcaacagcctggggacctcaactttcaggctggtgatagaatcactgttatatcaaagacagattctcacttcgattggtgggagggcaagttacgcggtcagacggggattttccccgctaactatgtcactatgaactag

SEQ ID NO: 60416 - DNA, 156 bp, Artificial Sequence
  derived and/or modified sequence
atgaacaaccccatccccagcaacctgaagagcgaggccaagaaggcagcaaaaatactgcgggagttcacagagatcacatcaagaaatggtcccgacaagattatcccggcccatgtcattgcgaaagccaaaggtttggcaattctatcctag

SEQ ID NO: 60417 - DNA, 972 bp, Artificial Sequence
  derived and/or modified sequence
atgaacaaccctattccctcgaatcttaagtccgaggccaagaaagctgccaaaatcctgagggagtttacagagatcacttctaggaatggcccagacaaaatcatcccggcacatgttatcgcgaaggcaaaaggcttggccattctatccgttataaaggcaggctttctggtcactgccaggggtgggtccgggatagtagtggcacgcctgccagacggaaagtggagtgctccctcagctatcgggatcgccggtctcggcggaggctttgagattggcatagaggtctccgatttagtgatcatcctgaactatgatcgcgcagtcgaagccttcgcaaagggtggaaacctgacgctggggggtaacttaaccgttgcagtaggacctctaggcagaaatctcgaaggaaacgtggccctaaggtcatcagccgctgtgttcacctattgtaagtctcgtggactcttcgcgggagtatccctggaagggagttgcctgattgaacgaaaagaaactaaccggaaattttattgtcaggacattcgggcttacgatatcctttttggcgacacccccaggccggctcaggcggaagacctctacgagatcttggattcgtttacagagaaatatgagaacgaagggcagcgcatcaatgcgcgaaaggcagcccgagaacaaagaaaatcttctgcgaaagagttaccgcctaagccactgtcacgacctcaacagagtagcgcccctgtacaacttaattccgggtcgcaatctaacctcaaccagcccattgaggtgacagctctctactcctttgaaggacaacagccaggcgatcttaattttcaggcgggtgacaggattaccgtgattagcaaaacagattcgcactttgactggtgggaggggaaactgcgtggtcagactggcatctttccagctaattacgtgacgatgaactag

SEQ ID NO: 60418 - DNA, 156 bp, Artificial Sequence
  derived and/or modified sequence
atgaacaaccccattccctctaatctcaaaagcgaagcaaagaaagctgctaagatcctgagagagttcactgagataactagtcgaaatgggcctgacaaaatcattccagcacatgtgatagctaaggccaaaggtctggctatcctgtcgtag

SEQ ID NO: 60419 - DNA, 1682 bp, Artificial Sequence
  derived and/or modified sequence
ctcttcctgggcagcctcgggacggggcgccgcggccgggcgggcagcatgaataaccctataccttccaatttgaaatcagaagcaaaaaaggctgccaaaatattaagagaattcacagaaataacttccagaaatggacctgataagatcattcctgctcacgtaattgcgaaggctaaaggccttgcaattctgtctgtgatcaaagccgggttcctggtgactgccagaggaggcagcgggattgtagtggcgcgccttccagatggaaaatggtctgcaccctcagccattgggatagctggccttggtggaggatttgaaataggaattgaggtatcagacttggtgataattctgaattatgaccgtgctgtagaagcttttgcaaaaggcggaaatctgaccctcggagggaacttgactgtggcggttgggcccttgggaaggaacttggaaggaaacgtggccctgagaagctccgctgccgtcttcacgtactgcaagtcaaggggactctttgcaggcgtgtctttagaagggagctgtttgattgaaaggaaagaaactaatagaaaattttattgtcaagatatccgagcttatgacattttatttggagatacaccgcggcctgctcaagccgaagatctttatgaaattcttgattcctttactgaaaagtatgaaaatgaaggacaacgaatcaatgcaagaaaagcagcaagggagcagaggaagtcttctgctaaagaattacctccaaagccattgtcaagaccacagcagtcatctgcaccagtccagctgaactctggctctcaaagcaatttgaatcaacccatagaagtgacagcgctgtattcatttgaaggacagcagcctggggatttgaattttcaagctggagacagaatcacagttatatcaaaaacagattcacattttgattggtgggaaggaaaacttcgaggtcaaactggcatttttccagccaactacgtaaccatgaattaaagcgtatactattttcttctttgagaattacaaaaaaattatttctacactgacaggatttactagttaagcaatgtttaatataaattttaaaaaacttctgttctacaaaatttccattccgtatgtaaaagattttgtttttctatataaaaagagctgactgacatatctttaaatactttgtactaactttatcacacttactgtgtcatagaatatcatacagtttatacgctcatagttctcttgtgaacacttcaaacatcgctaagcatttgatctggccatgtatatggtagctgtgttttaatttgagaatcttgagggtagagccacaaatttcaattcttacatttccatttgcaaagtgactagagaaaaagaaatcagcttaaatgaggtattaagtaatgtttagagtcgtaggtattaactagaatataaatccttagaaattgtctttataccttcaaaaattatactatgcatttatcatagaaatgtgattacaaagaagtctgactaccatgtctttaaacatatggcatctctcaacttttcttccttatggggctacatttgttcatttccagcagtagcataaacttacggtgacatggtagacttgtctctaaataaaatttttaaatgtttactaa

SEQ ID NO: 60420 - DNA, 494 bp, Artificial Sequence
  derived and/or modified sequence
agtgcgcctgcggaggcggtcctatgacgtgtggaactggtctcaatcggttgaccaccttaaggaaataggatttacactgtggacagagatgtgtcctttacacttcatttgaaccaatatgcccatgctcctgtggaggctgagttggaaagtgacacgaagctgcccccccgcaagagagcaggaaaactttattctcaagagatttctcattccgcagaaataaggatctggcatgtcaacacaaacataggaagttgaggcagtcaaagggaaataactgctaccctgactctgctgagagcctcacaagtccctgtgcacgccagcttgtttgccatgaataaccctataccttccaatttgaaatcagaagcaaaaaaggctgccaaaatattaagagaattcacagaaataacttccagaaatggacctgataagatcattcctgctcacgtaattgcgaaggctaaaggccttgcaattctgtc

SEQ ID NO: 60421 - protein, 204 aa, Artificial Sequence
  derived and/or modified sequence
MSDSEEESQDRQLKIVVLGDGASGKTSLTTCFAQETFGKQYKQTIGLDFFLRRITLPGNLNVTLQIWDIGGQTIGGKMLDKYIYGAQGVLLVYDITNYQSFENLEDWYTVVKKVSEESETQPLVALVGNKIDLEHMRTIKPEKHLRFCQENGFSSHFVSAKTGDSVFLCFQKVAAEILGIKLNKAEIEQSQGHFIIFISSTNRE

SEQ ID NO: 60422 - DNA, 615 bp, Artificial Sequence
  derived and/or modified sequence
atgagtgacagtgaagaagaaagccaggaccggcagctgaaaatcgtggttctgggtgacggcgctagcggcaaaaccagtttgaccacatgttttgctcaggaaaccttcgggaagcagtataagcagaccattggactggatttcttccttcgccgcatcaccctgccaggcaatcttaacgtcacactccaaatatgggatattggcggtcagaccatcggaggcaagatgctggataagtacatatatggagcccaaggtgtactactagtatacgacattaccaactatcagtccttcgaaaatctcgaggattggtatacagtggtgaaaaaagtttcggaagaatctgagacccaaccacttgtggctttggttgggaacaagatagatcttgagcacatgaggaccataaaacccgaaaagcacctgcgcttttgccaggagaatggattttccagccattttgtctcggccaagaccggggatagcgtcttcctctgcttccagaaggtcgcagcggaaatcctgggtattaaactgaacaaggccgagattgagcagagccaaggccattttatcatctttatttcatctacaaacagggaatag

SEQ ID NO: 60423 - DNA, 615 bp, Artificial Sequence
  derived and/or modified sequence
atgtctgacagcgaggaggagagccaggaccggcagctgaagatcgtggtgctgggagatggagccagcggcaagaccagcctgaccacctgctttgcccaggagaccttcggcaagcagtacaagcagaccatcggcctggacttcttcctgcggcgcatcaccctgcccggcaacctgaatgtgaccctgcagatctgggacattggaggccagaccatcggcggcaagatgctggacaagtacatctacggggcccagggcgtgctgctggtgtatgacatcaccaactaccagagctttgagaacctggaggactggtacacagtggtgaagaaggtgtctgaggagagcgagacccagcccctggtggccctggtgggcaacaagattgacctggagcacatgaggaccatcaagccagagaagcacctgcgcttctgccaggagaatggcttcagcagccactttgtgtctgccaagacaggagacagcgtcttcctgtgcttccagaaggtggccgctgagatcctgggcatcaagctgaacaaggccgagattgagcagagccagggccacttcatcatcttcatcagcagcaccaaccgggagtag

SEQ ID NO: 60424 - DNA, 615 bp, Artificial Sequence
  derived and/or modified sequence
atgagcgacagcgaggaggagagccaggaccggcagctgaagatcgtcgtgctcggcgacggagcttccggcaagacgtccctaacaacctgtttcgcgcaagaaacctttgggaagcagtacaaacagaccatcgggctagacttctttctgaggcgaatcactctgcctggtaatctcaacgtgactttgcagatttgggacatcggaggccagactatcggaggaaaaatgctggataaatatatctacggcgcccagggcgtcttgctggtgtacgatattacaaattaccagagctttgagaaccttgaagactggtatacagtcgtaaaaaaggtcagcgaggaatccgagacacaacccctagttgccctggtgggtaataagatcgatcttgaacacatgaggaccattaaacccgaaaaacacctacggttttgccaggagaatggtttctccagtcactttgtgtccgcgaagacaggagattctgtgtttctgtgctttcagaaggtggcagctgagatcctgggaattaagctgaacaaggccgagattgaacagagtcaggggcattttatcatcttcatctccagtacgaaccgagagtag

SEQ ID NO: 60425 - DNA, 615 bp, Artificial Sequence
  derived and/or modified sequence
atgtcagattctgaggaagagagccaggatcgacagcttaagatcgtggtactaggcgacggcgctagcggtaagacgtccctcactacatgcttcgcgcaggagaccttcggtaaacaatacaagcaaaccattggcttagacttctttctgagacgtatcacactgcctgggaaccttaacgtaacactacaaatttgggatatcggagggcagacgattggcggaaagatgttagataaatatatttacggcgcacagggggtgctgttggtgtatgacatcacaaactaccaatccttcgaaaacttggaagactggtacactgtcgtcaagaaggtgtctgaagagtctgaaacccagcctctcgtggcgctcgttggcaataaaattgatttagaacatatgaggacgattaagccagaaaaacacctccggttctgtcaagagaatggcttttcttcacacttcgtctcagcaaaaaccggcgatagcgtgtttctgtgctttcaaaaggtggccgctgagatcctgggcatcaagctaaacaaggcggagatcgaacagtctcaagggcatttcattatcttcatttcctctaccaacagagaatag

SEQ ID NO: 60426 - DNA, 1787 bp, Artificial Sequence
  derived and/or modified sequence
gtgcgcgtagggggcggggccgcgcgcagagggcggggaggtgggcaagatggcgcttgccgagtgattctcctcgaatacctcctgccggcgcggagacaccggggcgggggtcctgccgcaactacctcccttcctcctctcccccgcccccggagccttcatccttcccttccccccccacctcgaggggcgggcctggttcccgggacaccatgtcggactctgaggaggagagccaggaccggcaactgaaaatcgtcgtgctgggggacggcgcctccgggaagacctccttaactacgtgttttgctcaagaaacttttgggaaacagtacaaacaaactataggactggatttctttttgagaaggataacattgccaggaaacttgaatgttacccttcaaatttgggatataggagggcagacaataggaggcaaaatgttggataaatatatctatggagcacagggagtcctcttggtatatgatattacaaattatcaaagctttgagaatttagaagattggtatactgtggtgaagaaagtgagcgaggagtcagaaactcagccactggttgccttggtaggcaataaaattgatttggagcatatgcgaacaataaaacctgaaaaacacttacggttttgccaggaaaatggttttagtagccactttgtctcagccaagacaggagactctgtcttcctgtgctttcagaaagttgctgctgaaatccttgggatcaaattaaacaaagcagaaatagaacagtcacagggccatttcattattttcatttcatcaactaatagagaataatcgagtgtgctttgtggctctaaaaataaagagggtggtgaaggcagatattgtaaactacaaccaggaacctatgtcaaggactgttaaccctcctagaagctctatgtgtgcagttcagtgagcgcatttttcttttgtgttgatagttctggctgcccttcacctctgggtgggcccgaggacttctaggaacttgttttatcagtgaccatctctgtagttcagttaacactttactcccaacttgcttcatcattgctattgcctcacagtggcaggcagctccttggatttgaaagaattcaactttgggaccacacactttgaattcaaaatggaaaacccattccctggaattagactgcttcattgcaaaagaatgatgttgtttctttgtatgtccttgcttcttttttcattgatgtaaatttttttaacttaatatgaaaactctccaagtcttgatcatcagccaggattttgccacagcaatttcattctcttatcggaacttgtatgtgtcaaagtatacttcagagtgcaaacattaagcaagtaatatattttacctacagatacttatgaagacattctttcgctatcgtgagtaaaagtatataaagctgtttctaactgaaaatgcttgaaataagcctgtaatagaaatattttttcattttttaaaaaagggcctaaattgtttatattgtagtttgtaactcacaaagtaatatttgatattgtatttttattactgtatcgttgtcgttatgtattgtgtaatactcaggtttgaaggctttctgaattctgataaatgttcagctgatgctccacgtggaatttctcttgcaaactgcataagagtactcccgagaatgagttatgacattgtggatcagactgtacctgatgttcagatgtttttctttcacaaataaacttatttaaatt

SEQ ID NO: 60427 - DNA, 615 bp, Artificial Sequence
  derived and/or modified sequence
atgagcgacagcgaggaggagagccaggacagacagctgaagatcgtggtgctgggcgacggcgccagcggcaagaccagcctgaccacctgcttcgcccaggagaccttcggcaagcagtacaagcagaccatcggcctggacttcttcctgagaagaatcaccctgcccggcaacctgaacgtgaccctgcagatctgggacatcggcggccagaccatcggcggcaagatgctggacaagtacatctacggcgcccagggcgtgctgctggtgtacgacatcaccaactaccagagcttcgagaacctggaggactggtacaccgtggtgaagaaggtgagcgaggagagcgagacccagcccctggtggccctggtgggcaacaagatcgacctggagcacatgagaaccatcaagcccgagaagcacctgagattctgccaggagaacggcttcagcagccacttcgtgagcgccaagaccggcgacagcgtgttcctgtgcttccagaaggtggccgccgagatcctgggcatcaagctgaacaaggccgagatcgagcagagccagggccacttcatcatcttcatcagcagcaccaacagagagtag

SEQ ID NO: 60428 - protein, 567 aa, Artificial Sequence
  derived and/or modified sequence
MLSAIYTVLAGLLFLPLLVNLCCPYFFQDIGYFLKVAAVGRRVRSYGKRRPARTILRAFLEKARQTPHKPFLLFRDETLTYAQVDRRSNQVARALHDHLGLRQGDCVALLMGNEPAYVWLWLGLVKLGCAMACLNYNIRAKSLLHCFQCCGAKVLLVSPELQAAVEEILPSLKKDDVSIYYVSRTSNTDGIDSFLDKVDEVSTEPIPESWRSEVTFSTPALYIYTSGTTGATLALRTKFSASQFWDDCRKYNVTVIQYIGELLRYLCNSPQKPNDRDHKVRLALGNGLRGDVWRQFVKRFGDICIYEFYAATEGNIGFMNYARKVGAVGRVNYLQKKIITYDLIKYDVEKDEPVRDENGYCVRVPKGEVGLLVCKITQLTPFNGYAGAKAQTEKKKLRDVFKKGDLYFNSGDLLMVDHENFIYFHDRVGDTFRWKGENVATTEVADTVGLVDFVQEVNVYGVHVPDHEGRIGMASIKMKENHEFDGKKLFQHIADYLPSYARPRFLRIQDTIEITGTFKHRKMTLVEEGFNPAVIKDALYFLDDTAKMYVPMTEDIYNAISAKTLKL

SEQ ID NO: 60429 - DNA, 759 bp, Artificial Sequence
  derived and/or modified sequence
ggcacagcccagcttcaccagccccagccacagccacacgtaggccggctcgttacccataaggagcgccacgcagtctccctggcgcaggccgaggtggtcgtgcagcgcccgggccacttgattgctgcgccggtccacctgcgcgtaggtgagagtctcgtcgcggaagagcagaaaaggcttgtgtggcgtctggcgcgctttctccaggaacgcccgcaggatggtgcgcgccggccgccgcttcccgtagctgcgcaccctccggcccacggcggccaccttcaagaagtagcctatgtcctggaagaagtatgggcagcagaggttcaccaggagcggcaggaacagcagtcccgccaggactgtgtagatggcggaaagcatgacggctgcggggccctctgtcccagcgagggcagagggttcaccccgggcgtgcagcgcggcgactgggcgggctccgggcggactggcgggctgcgccggggcgcacgcggcgggacgccgggctcgcgtgagatgaaggggaagacagagctcctccgctgcaggtaggccacctgttgagacctggtgaaagatcaggtataataatgttctgcagtgaaaagaaattgcgtgaagtggaacggatagtgaaagccaatgaccgtgaatataatgaaaagttccagtatgcggataatcgtatccacacatcgaaatataatattctcaccttcttgccaattaatttatttgaacagttccaaa

SEQ ID NO: 60430 - DNA, 1704 bp, Artificial Sequence
  derived and/or modified sequence
atgctttcagccatctacactgttctggccggccttctcttccttcctcttctcgttaacttgtgctgcccttattttttccaggacatcgggtatttccttaaagtggctgctgtcggacggcgggtgcgatcttatggtaaacgcaggcccgcaagaacaattctgcgagccttccttgagaaggctcgtcagactccgcacaagccttttcttctgttccgggatgaaacgcttacgtacgcccaggtggacagacggagcaaccaggtggcacgcgccctccacgaccatttaggcctgcgccagggtgactgtgtggcccttctgatgggcaatgagccggcatacgtgtggctctggctcggcctggtgaaactcggctgcgccatggcctgtctcaattataatatccgggccaagtctctgttacactgttttcaatgttgtggggccaaggtattactggtgtcccctgagctgcaggctgcagtggaggagatcctcccctctttgaagaaggatgatgtctccatttactacgtgtcgagaacatccaacaccgacggcatcgactcatttcttgacaaagttgacgaggtctctacagagcccataccagagtcttggcggagtgaggtaacatttagtacccccgccttatacatttacacaagtggcactaccggggccactctggccctccggactaagtttagtgcaagccagttttgggacgattgtcgcaagtacaacgtaactgtcatccagtatattggcgaactccttagatacctgtgtaacagcccccaaaagcccaacgatcgggatcataaggtgcgactcgccctcggcaacggtttgcgcggcgacgtctggaggcaatttgtaaagcggttcggggatatttgtatttatgagttctatgccgctactgagggtaacatcggatttatgaattatgctcgcaaagtcggggccgtgggaagagtgaattacctgcagaaaaagatcattacctacgatctgattaaatatgacgttgaaaaagatgaacccgtccgcgatgagaacgggtattgcgtccgggtgccaaaaggtgaagtgggcctgctggtctgtaagattacccagctcacgcccttcaatgggtatgctggggccaaggctcagacagagaaaaagaaattgcgggacgtttttaaaaagggagacctctactttaactcaggcgatcttctcatggtagatcatgagaacttcatttatttccatgatcgggttggtgatactttcagatggaaaggcgagaacgtcgccaccaccgaggtggctgacacagtggggctggttgacttcgtgcaggaggtaaatgtctacggcgtccacgtgcccgatcatgagggccggatcgggatggcttctatcaaaatgaaagagaaccatgaattcgacgggaagaaactgtttcagcacatcgcagattatctgccttcctatgcccgaccccgctttctgcgcatccaggacactatcgagataacaggcacctttaagcacagaaagatgacccttgtggaggagggtttcaaccccgctgtcattaaagatgcactgtattttctggatgatacagccaaaatgtatgtcccgatgaccgaagatatctacaacgccatctcagcaaaaacactcaagttatag

SEQ ID NO: 60431 - DNA, 1704 bp, Artificial Sequence
  derived and/or modified sequence
atgctgagcgccatctacacagtgctggccggcctgctcttcctgcccctgctggtgaacctgtgctgcccctacttcttccaggacatcggctacttcctgaaggtggccgctgtgggcagaagagtgcgctcctatggcaagagaagacctgcccggaccatcctgcgggccttcctggagaaggcccggcagaccccccacaagcccttcctgctcttcagagatgagaccctgacctacgcccaggtggaccggcgcagcaaccaggtggcccgggccctgcatgaccacctgggcctgcggcagggcgactgtgtggccctgctgatgggaaatgaaccagcctacgtgtggctgtggctgggcctggtgaagctgggctgtgccatggcctgcctgaactacaacatccgggccaagagcctgctgcactgcttccagtgctgcggggccaaggtgctgctggtgtccccagagctgcaggccgctgtggaggagatcctgcccagcctgaagaaggatgatgtgtccatctactacgtgtccaggaccagcaacacagatggcatcgacagcttcctggacaaggtggatgaggtgtccacagagcccatccctgagagctggaggtctgaggtgaccttcagcaccccagccctgtacatctacaccagcggcaccactggagccaccctggccctgcggaccaagttcagcgccagccagttctgggatgactgcaggaagtacaacgtgaccgtcatccagtacatcggggagctgctgcgctacctgtgcaacagcccccagaagcccaatgaccgggaccacaaggtgcggctggccctgggcaatggcctgcggggagatgtgtggaggcagtttgtgaagagatttggagacatctgcatctatgagttctacgccgccacagagggcaacatcggcttcatgaactatgccaggaaggtgggcgctgtgggccgggtgaactacctgcagaagaagatcatcacctatgacctgatcaagtatgatgtggagaaggatgagcctgtgagagatgaaaatggctactgtgtgcgggtgcccaagggggaggtgggcctgctggtgtgcaagatcacccagctgacccccttcaacggctacgccggggccaaggcccagacagagaagaagaagctgagagatgtgttcaagaagggggacctgtacttcaacagcggggacctgctgatggtggaccacgagaacttcatctacttccatgacagagtgggggacaccttccgctggaagggagaaaatgtggccaccacagaggtggccgacacagtgggcctggtggactttgtgcaggaggtgaatgtgtatggagtgcacgtgcctgaccacgagggcagaattggcatggccagcatcaagatgaaggagaaccacgagtttgatggcaagaagctgttccagcacatcgctgactacctgcccagctatgcccggccccgcttcctgcgcatccaggacaccatcgagatcaccggcaccttcaagcacaggaagatgaccctggtggaggagggcttcaacccagctgtgatcaaggatgccctgtacttcctggatgacacagccaagatgtatgtgcccatgacagaggacatctacaatgccatcagcgccaagaccctgaagctgtag

SEQ ID NO: 60432 - DNA, 1704 bp, Artificial Sequence
  derived and/or modified sequence
atgctgagcgccatctacaccgtgctggccggcctgctgttcctgccactgctggttaacctctgctgtccttacttctttcaggatatcggctacttccttaaagttgctgccgtgggtcggcgggtgagatcatatgggaaacgacggccagctcgtaccattttacgggccttcctggagaaagcccgacaaacaccgcacaagcccttcctgctgtttcgggatgagacactgacctatgcacaggtcgatcggaggtctaatcaggtcgcacgtgcgctgcacgatcatctaggactgcgacagggcgattgcgtagcactccttatgggcaatgagcccgcctacgtgtggctgtggttgggtctggtaaagttaggttgtgccatggcgtgcctcaactataatatccgggccaaaagcctcctgcattgcttccaatgttgtggcgccaaggtcctcttggtctcaccggaactccaagctgcagtggaggagatcctaccctcgttgaaaaaggatgacgtgtctatctattacgtgtcaaggacgtcaaacaccgacggaattgactcattcttggacaaagtggatgaagtgagcaccgagcctatccctgaaagctggcggagcgaggtgactttcagcaccccggccctttatatttacacttccggaaccactggagcgacactcgcactgcggaccaagttctctgccagtcaattctgggacgattgtagaaagtataatgtcaccgtaatccagtacatcggcgagctccttcgatacctctgcaactctccccagaaaccaaacgatcgggaccataaggttcggctcgcgcttggcaacggcctacgcggcgatgtgtggcggcagttcgttaaaagattcggtgacatttgtatttatgaattttacgccgcgaccgaggggaacataggattcatgaactatgctcgcaaagttggcgctgtcggcagggtcaattacctccaaaaaaaaattatcacctacgacctgatcaaatatgacgtggagaaagatgagccagtgagagacgaaaatggctactgcgtacgcgtcccaaagggggaggtgggcctcctggtatgcaagattacgcagttaacccccttcaacggctacgccggtgccaaggctcaaaccgagaaaaagaagctgagagatgtcttcaagaagggtgatctttatttcaacagcggtgatctattgatggtcgaccatgaaaacttcatatatttccacgaccgcgtcggagacaccttccgctggaagggcgaaaacgtcgcaaccaccgaagtcgccgatactgtgggcctcgtcgattttgtgcaggaagtcaatgtgtacggcgtccacgtgcctgaccacgaaggcaggatcggaatggcgtctatcaagatgaaagaaaaccacgagtttgatggcaaaaagctgttccagcacattgccgactatcttccctcttatgcacggcctcggtttctgcgtatacaggacaccattgagatcacggggacattcaagcaccgcaagatgacgttggtggaagaaggctttaaccctgctgtaatcaaagatgccttgtattttctggacgacaccgccaaaatgtatgtgccaatgacggaggacatttataacgctatatccgcaaagacgctgaaattgtag

SEQ ID NO: 60433 - DNA, 1704 bp, Artificial Sequence
  derived and/or modified sequence
atgctgtctgccatttatactgtcctggccggacttctctttctgccgctgctcgtgaatctgtgctgtccttactttttccaggacatcggatattttctgaaagtagcagcagttggcaggcgagttcgctcatacggtaagcggagacccgcacgcacgattctgagagccttcttggagaaggcgcgacagactccacacaaacccttcctgttattcagagatgaaacgctcacctacgcccaagtagacaggaggagcaatcaggtcgccagggcattgcatgaccacttgggtttaaggcagggtgattgtgtggcattactcatgggcaatgagccagcttacgtgtggctgtggctcggactggtgaaactagggtgtgccatggcgtgcttaaattacaacatccgagcgaaatctctgctgcactgtttccagtgctgcggggctaaagttttgcttgtctctcctgagctccaggcggcagtggaagagatcctgcctagtctcaaaaaggacgacgtttctatttactatgtgtcacggactagtaacacggacggtattgattcctttctggacaaggtggatgaggtctcaactgagcctatacccgagtcgtggagatcggaggtgacatttagtacccccgctctgtacatttatacctccggcaccacgggtgcgactttggcactcaggactaaattcagcgcgtctcagttctgggacgattgtcgtaagtataatgttacggtgatacagtacattggggaactgttaagatacttgtgcaactcaccccagaagcccaatgacagggaccacaaggtccgccttgcactcgggaacgggcttagaggagatgtgtggcgacaatttgtgaagaggttcggggatatttgtatctatgaattctacgcagccaccgaaggcaacatcggcttcatgaactacgctcggaaggtcggcgctgtgggaagagtaaattatctgcagaaaaaaatcatcacctacgatctgataaagtatgatgtcgaaaaagatgaacctgtccgcgacgaaaacggctattgtgtacgtgtgcctaaaggcgaggtcggactgctggtgtgcaaaattacgcagctgacgccattcaacggatacgctggggctaaggcccagacagaaaagaaaaagttgagagatgtgtttaaaaagggcgatttatattttaattctggggacctcctgatggttgaccacgaaaatttcatctacttccacgatcgtgtcggggacaccttcaggtggaaaggcgagaacgttgccaccaccgaggtggctgatacagtgggcctcgtcgacttcgtgcaggaggttaatgtgtacggggttcatgtccctgatcatgaagggagaatcggtatggcctccattaaaatgaaagagaaccacgaatttgatggcaaaaaactgttccagcatatagcagattatttaccatcttacgcaaggccaaggttcctccggatccaggatacaattgagatcacaggtacattcaaacacagaaagatgacacttgtcgaagaaggtttcaaccccgctgtgatcaaggatgcactgtactttttagatgatacggcaaagatgtatgtgccaatgacagaggacatctacaacgcgatctccgcgaaaactcttaaactctag

SEQ ID NO: 60434 - DNA, 2181 bp, Artificial Sequence
  derived and/or modified sequence
acacctgctccggagcccgcggcggtacctgcagcggaggagctctgtcttccccttcatctcacgcgagcccggcgtcccgccgcgtgcgccccggcgcagcccgccagtccgcccggagcccgcccagtcgccgcgctgcacgcccggggtgaaccctctgccctcgctgggacagagggccccgcagccgtcatgctttccgccatctacacagtcctggcgggactgctgttcctgccgctcctggtgaacctctgctgcccatacttcttccaggacataggctacttcttgaaggtggccgccgtgggccggagggtgcgcagctacgggaagcggcggccggcgcgcaccatcctgcgggcgttcctggagaaagcgcgccagacgccacacaagccttttctgctcttccgcgacgagactctcacctacgcgcaggtggaccggcgcagcaatcaagtggcccgggcgctgcacgaccacctcggcctgcgccagggagactgcgtggcgctccttatgggtaacgagccggcctacgtgtggctgtggctggggctggtgaagctgggctgtgccatggcgtgcctcaattacaacatccgcgcgaagtccctgctgcactgcttccagtgctgcggggcgaaggtgctgctggtgtcgccagaactacaagcagctgtcgaagagatactgccaagccttaaaaaagatgatgtgtccatctattatgtgagcagaacttctaacacagatgggattgactctttcctggacaaagtggatgaagtatcaactgaacctatcccagagtcatggaggtctgaagtcactttttccactcctgccttatacatttatacttctggaaccacaggtgctactcttgccttgcggactaaattttcagccagccagttttgggatgactgcagaaaatacaacgtcactgtcattcagtatatcggtgaactgcttcggtatttatgcaactcaccacagaaaccaaatgaccgtgatcataaagtgagactggcactgggaaatggcttacgaggagatgtgtggagacaatttgtcaagagatttggggacatatgcatctatgagttctatgctgccactgaaggcaatattggatttatgaattatgcgagaaaagttggtgctgttggaagagtaaactacctacagaaaaaaatcataacttatgacctgattaaatatgatgtggagaaagatgaacctgtccgtgatgaaaatggatattgcgtcagagttcccaaaggtgaagttggacttctggtttgcaaaatcacacaacttacaccatttaatggctatgctggagcaaaggctcagacagagaagaaaaaactgagagatgtctttaagaaaggagacctctatttcaacagtggagatctcttaatggttgaccatgaaaatttcatctatttccacgacagagttggagatacattccggtggaaaggggaaaatgtggccaccactgaagttgctgatacagttggactggttgattttgtccaagaagtaaatgtttatggagtgcatgtgccagatcatgagggtcgcattggcatggcctccatcaaaatgaaagaaaaccatgaatttgatggaaagaaactctttcagcacattgctgattacctacctagttatgcaaggccccggtttctaagaatacaggacaccattgagatcactggaacttttaaacaccgcaaaatgaccctggtggaggagggctttaaccctgctgtcatcaaagatgccttgtatttcttggatgacacagcaaaaatgtatgtgcctatgactgaggacatctataatgccataagtgctaaaaccctgaaactctgaatattcccaggaggataactcaacatttccagaaagaaactgaatggacagccacttgatataatccaactttaatttgattgaagattgtgaggaaattttgtaggaaatttgcatacccgtaaagggagacttttttaaataacagttgagtctttgcaagtaaaaagatttagagattattatttttcagtgtgcacctactgtttgtatttgcaaactgagcttgttggagggaaggcattattttttaaaatacttagtaaattaaatgaacaccaa

SEQ ID NO: 60435 - DNA, 1704 bp, Artificial Sequence
  derived and/or modified sequence
atgctgagcgccatctacaccgtgctggccggcctgctgttcctgcccctgctggtgaacctgtgctgcccctacttcttccaggacatcggctacttcctgaaggtggccgccgtgggcagaagagtgagaagctacggcaagagaagacccgccagaaccatcctgagagccttcctggagaaggccagacagaccccccacaagcccttcctgctgttcagagacgagaccctgacctacgcccaggtggacagaagaagcaaccaggtggccagagccctgcacgaccacctgggcctgagacagggcgactgcgtggccctgctgatgggcaacgagcccgcctacgtgtggctgtggctgggcctggtgaagctgggctgcgccatggcctgcctgaactacaacatcagagccaagagcctgctgcactgcttccagtgctgcggcgccaaggtgctgctggtgagccccgagctgcaggccgccgtggaggagatcctgcccagcctgaagaaggacgacgtgagcatctactacgtgagcagaaccagcaacaccgacggcatcgacagcttcctggacaaggtggacgaggtgagcaccgagcccatccccgagagctggagaagcgaggtgaccttcagcacccccgccctgtacatctacaccagcggcaccaccggcgccaccctggccctgagaaccaagttcagcgccagccagttctgggacgactgcagaaagtacaacgtgaccgtgatccagtacatcggcgagctgctgagatacctgtgcaacagcccccagaagcccaacgacagagaccacaaggtgagactggccctgggcaacggcctgagaggcgacgtgtggagacagttcgtgaagagattcggcgacatctgcatctacgagttctacgccgccaccgagggcaacatcggcttcatgaactacgccagaaaggtgggcgccgtgggcagagtgaactacctgcagaagaagatcatcacctacgacctgatcaagtacgacgtggagaaggacgagcccgtgagagacgagaacggctactgcgtgagagtgcccaagggcgaggtgggcctgctggtgtgcaagatcacccagctgacccccttcaacggctacgccggcgccaaggcccagaccgagaagaagaagctgagagacgtgttcaagaagggcgacctgtacttcaacagcggcgacctgctgatggtggaccacgagaacttcatctacttccacgacagagtgggcgacaccttcagatggaagggcgagaacgtggccaccaccgaggtggccgacaccgtgggcctggtggacttcgtgcaggaggtgaacgtgtacggcgtgcacgtgcccgaccacgagggcagaatcggcatggccagcatcaagatgaaggagaaccacgagttcgacggcaagaagctgttccagcacatcgccgactacctgcccagctacgccagacccagattcctgagaatccaggacaccatcgagatcaccggcaccttcaagcacagaaagatgaccctggtggaggagggcttcaaccccgccgtgatcaaggacgccctgtacttcctggacgacaccgccaagatgtacgtgcccatgaccgaggacatctacaacgccatcagcgccaagaccctgaagctgtag

SEQ ID NO: 60436 - protein, 823 aa, Artificial Sequence
  derived and/or modified sequence
MDLDKPSVWGSLKQRTRPLLINLSKKKVKKNPSKPPDLRARHHLDRRLSLSVPDLLEAEALAPEGRPYSGPQSSYTSVPSSLSTAGIFPKSSSSSLKQSEEELDWSQEEASHLHVVETDSEEAYASPAERRRVSSNGIFDLQKTSLGGDAPEEPEKLCGSSDLNASMTSQHFEEQSVPGEASDGLSNLPSPFAYLLTIHLKEGRNLVVRDRCGTSDPYVKFKLNGKTLYKSKVIYKNLNPVWDEIVVLPIQSLDQKLRVKVYDRDLTTSDFMGSAFVILSDLELNRTTEHILKLEDPNSLEDDMGVIVLNLNLVVKQGDFKRHRWSNRKRLSASKSSLIRNLRLSESLKKNQLWNGIISITLLEGKNVSGGSMTEMFVQLKLGDQRYKSKTLCKSANPQWQEQFDFHYFSDRMGILDIEVWGKDNKKHEERLGTCKVDISALPLKQANCLELPLDSCLGALLMLVTLTPCAGVSVSDLCVCPLADLSERKQITQRYCLQNSLKDVKDVGILQVKVLKAADLLAADFSGKSDPFCLLELGNDRLQTHTVYKNLNPEWNKVFTFPIKDIHDVLEVTVFDEDGDKPPDFLGKVAIPLLSIRDGQPNCYVLKNKDLEQAFKGVIYLEMDLIYNPVKASIRTFTPREKRFVEDSRKLSKKILSRDVDRVKRITMAIWNTMQFLKSCFQWESTLRSTIAFAESEKKGLIERIYMVQDIVSTVQNVLEEIASFGERIKNTFNWTVPFLSSLACLILAAATIILYFIPLRYIILIWGINKFTKKLRNPYSIDNNELLDFLSRVPSDVQKVQYAELKLCSSHSPLRKKRSAL

SEQ ID NO: 60437 - DNA, 2472 bp, Artificial Sequence
  derived and/or modified sequence
atggacctggacaagcccagcgtgtggggcagcctgaagcagagaaccagacccctgctgatcaacctgagcaagaagaaggtgaagaagaaccccagcaagccccccgacctgagagccagacaccacctggacagaagactgagcctgagcgtgcccgacctgctggaggccgaggccctggcccccgagggcagaccctacagcggcccccagagcagctacaccagcgtgcccagcagcctgagcaccgccggcatcttccccaagagcagcagcagcagcctgaagcagagcgaggaggagctggactggagccaggaggaggccagccacctgcacgtggtggagaccgacagcgaggaggcctacgccagccccgccgagagaagaagagtgagcagcaacggcatcttcgacctgcagaagaccagcctgggcggcgacgcccccgaggagcccgagaagctgtgcggcagcagcgacctgaacgccagcatgaccagccagcacttcgaggagcagagcgtgcccggcgaggccagcgacggcctgagcaacctgcccagccccttcgcctacctgctgaccatccacctgaaggagggcagaaacctggtggtgagagacagatgcggcaccagcgacccctacgtgaagttcaagctgaacggcaagaccctgtacaagagcaaggtgatctacaagaacctgaaccccgtgtgggacgagatcgtggtgctgcccatccagagcctggaccagaagctgagagtgaaggtgtacgacagagacctgaccaccagcgacttcatgggcagcgccttcgtgatcctgagcgacctggagctgaacagaaccaccgagcacatcctgaagctggaggaccccaacagcctggaggacgacatgggcgtgatcgtgctgaacctgaacctggtggtgaagcagggcgacttcaagagacacagatggagcaacagaaagagactgagcgccagcaagagcagcctgatcagaaacctgagactgagcgagagcctgaagaagaaccagctgtggaacggcatcatcagcatcaccctgctggagggcaagaacgtgagcggcggcagcatgaccgagatgttcgtgcagctgaagctgggcgaccagagatacaagagcaagaccctgtgcaagagcgccaacccccagtggcaggagcagttcgacttccactacttcagcgacagaatgggcatcctggacatcgaggtgtggggcaaggacaacaagaagcacgaggagagactgggcacctgcaaggtggacatcagcgccctgcccctgaagcaggccaactgcctggagctgcccctggacagctgcctgggcgccctgctgatgctggtgaccctgaccccctgcgccggcgtgagcgtgagcgacctgtgcgtgtgccccctggccgacctgagcgagagaaagcagatcacccagagatactgcctgcagaacagcctgaaggacgtgaaggacgtgggcatcctgcaggtgaaggtgctgaaggccgccgacctgctggccgccgacttcagcggcaagagcgaccccttctgcctgctggagctgggcaacgacagactgcagacccacaccgtgtacaagaacctgaaccccgagtggaacaaggtgttcaccttccccatcaaggacatccacgacgtgctggaggtgaccgtgttcgacgaggacggcgacaagccccccgacttcctgggcaaggtggccatccccctgctgagcatcagagacggccagcccaactgctacgtgctgaagaacaaggacctggagcaggccttcaagggcgtgatctacctggagatggacctgatctacaaccccgtgaaggccagcatcagaaccttcacccccagagagaagagattcgtggaggacagcagaaagctgagcaagaagatcctgagcagagacgtggacagagtgaagagaatcaccatggccatctggaacaccatgcagttcctgaagagctgcttccagtgggagagcaccctgagaagcaccatcgccttcgccgagagcgagaagaagggcctgatcgagagaatctacatggtgcaggacatcgtgagcaccgtgcagaacgtgctggaggagatcgccagcttcggcgagagaatcaagaacaccttcaactggaccgtgcccttcctgagcagcctggcctgcctgatcctggccgccgccaccatcatcctgtacttcatccccctgagatacatcatcctgatctggggcatcaacaagttcaccaagaagctgagaaacccctacagcatcgacaacaacgagctgctggacttcctgagcagagtgcccagcgacgtgcagaaggtgcagtacgccgagctgaagctgtgcagcagccacagccccctgagaaagaagagaagcgccctgtag

SEQ ID NO: 60438 - DNA, 2472 bp, Artificial Sequence
  derived and/or modified sequence
atggacttggacaaaccaagtgtctgggggtcactgaagcagcgcacacggcccttgctgataaatctctccaagaagaaagtgaaaaaaaatccctccaaacccccggaccttcgggccaggcaccacctggaccggagactgagcctgagtgtgccagacttactagaagctgaggccctggctcccgaggggcgcccctattccggacctcagtctagctacacgtccgtgcccagctctttatctacagcgggcatttttccaaagtcttcctcctcttctctcaagcagtcagaggaagagctggactggagccaagaggaagcatcccatctgcatgtggtcgagacagattccgaagaagcctatgccagccccgcggagcgccgccgtgtttcaagtaacggaatattcgatctgcagaagaccagtctaggaggcgacgcccccgaggaaccagaaaagctgtgcggttcaagtgacctgaatgccagcatgacctcacagcactttgaggagcagtctgtacccggcgaggcgagcgacggactgtccaacttgcccagcccattcgcctacctactgaccatccaccttaaagagggcagaaatctggtggttagagatcgctgcggcacgagcgacccctacgttaagttcaaactcaacggaaagactttatacaaatcgaaggtgatttacaagaacttaaatcctgtgtgggacgaaatagtcgtgctccctattcaaagcttggatcagaagctgcgcgtcaaggtctacgacagagacctcactacctccgacttcatggggtccgctttcgtgatactttccgatcttgagctcaaccgcactactgaacatatcctcaaactggaggaccctaacagtctggaggacgatatgggcgtcattgtgcttaacctaaacctggtagtgaaacagggggattttaagaggcaccggtggtctaacagaaagcgccttagcgctagtaaaagctccctcatccggaatctgaggttatctgagtcactcaaaaaaaaccagctgtggaatggtataatttcaatcactctcttggaggggaaaaacgtgagtggtggctcaatgacagagatgttcgtgcagttaaagctgggcgaccagcgatacaagagtaagacactttgcaagtctgcaaatccccagtggcaagaacagttcgacttccactatttttccgatcgaatgggaattttagacatagaagtctggggaaaagataacaagaagcacgaagaaaggctcggtacatgtaaggttgatattagcgctctgcccctcaagcaggccaattgcctggagctaccgttggactcgtgtcttggcgctctattaatgctggtgacactcacaccctgcgctggggtctcagtaagtgatctatgtgtgtgtcctctcgccgacctgagcgagaggaagcagatcactcagaggtattgcctgcaaaactcactgaaggacgtgaaggacgtaggaattcttcaagtgaaagtgctgaaagcggccgacctgctggccgcagatttctcaggtaaatcagatcccttttgtctcctggaactgggaaacgaccggctgcaaacgcatactgtgtacaagaacctgaacccagagtggaacaaagtgtttacgttcccgatcaaagacatccatgatgtactggaggtcacggtcttcgacgaggatggagacaagcctcccgactttctgggaaaggtagccatccccctcctgagcattagggatggtcagccaaactgctatgtgttaaaaaataaggaccttgagcaagcctttaagggggtcatctatctcgaaatggaccttatatacaaccctgtgaaggcaagtattcggacttttactcccagagaaaaacgcttcgtggaggactctagaaagctgtcaaagaaaatcttgtcacgagacgtcgatcgcgtgaaaagaattacaatggccatctggaatacaatgcagtttttgaaatcatgcttccagtgggaaagcactttgagaagtaccatagcctttgctgagtctgaaaaaaagggattaatcgagagaatatatatggtgcaagacatagtgtccacggttcagaatgtcttagaggagattgcaagttttggcgaacgcatcaaaaatacgtttaattggactgtgcctttcctaagcagcttggcctgtctaatccttgccgctgcaaccattatactttattttatcccacttcgatacatcattctgatatggggaataaataagtttacgaagaagctgaggaacccttattcgatagataataatgagctcttggactttttatcacgggtcccaagcgatgtgcagaaagtgcagtacgctgaactcaaactctgctcgagccacagcccattaagaaagaagcgatccgctctgtag

SEQ ID NO: 60439 - DNA, 2472 bp, Artificial Sequence
  derived and/or modified sequence
atggacctggacaagcccagcgtgtggggcagcctgaagcagaggacccggcccctgctgatcaacctgagcaagaagaaggtgaagaagaaccccagcaagcccccagacctgcgggcccggcaccacctggaccggcggctgagcctgtctgtgcctgacctgctggaggccgaggccctggcccctgagggccggccctacagcggcccccagagcagctacacctctgtgcccagcagcctgagcacagctggcatcttccccaagagcagcagcagcagcctgaagcagagcgaggaggagctggactggagccaggaggaggccagccacctgcacgtggtggagacagacagcgaggaggcctatgccagccctgctgagaggagaagagtgagcagcaatggcatctttgacctgcagaagaccagcctgggcggagatgcccctgaggagcctgagaagctgtgtggcagcagtgacctgaatgcctccatgaccagccagcactttgaggagcagagcgtgcctggagaggccagtgatggcctgagcaacctgcccagcccctttgcctacctgctgaccatccacctgaaggagggcaggaacctggtggtgcgggacagatgtggcaccagtgacccctacgtgaagttcaagctgaatggcaagaccctgtacaagagcaaggtgatctacaagaacctgaaccctgtgtgggatgaaattgtggtgctgcccatccagagcctggaccagaagctgcgggtgaaggtgtatgaccgggacctgaccaccagtgacttcatgggcagcgccttcgtcatcctgagtgacctggagctgaacagaaccacagagcacatcctgaagctggaggaccccaacagcctggaggatgacatgggcgtgattgtgctgaacctgaacctggtggtgaagcagggcgacttcaagaggcaccgctggagcaacaggaagaggctgagcgccagcaagagcagcctcatccggaacctgcggctgtctgagagcctgaagaagaaccagctgtggaatggcatcatcagcatcaccctgctggagggcaagaatgtgtctgggggctccatgacagagatgtttgtgcagctgaagctgggggaccagcgctacaagagcaagaccctgtgcaagagcgccaacccccagtggcaggagcagtttgacttccactacttcagtgacaggatgggcatcctggacatcgaggtgtggggcaaggacaacaagaagcatgaggagcggctgggcacctgcaaggtggacatcagcgccctgcccctgaagcaggccaactgcctggagctgcccctggacagctgcctgggcgccctgctgatgctggtgaccctgaccccctgtgccggcgtgtctgtgtctgacctgtgtgtgtgccccctggccgacctgtctgagaggaagcagatcacccagcgctactgcctgcagaacagcctgaaggatgtgaaggatgtgggcatcctgcaggtgaaggtgctgaaggctgctgacctgctggccgctgacttcagcggcaagagtgaccccttctgcctgctggagctgggcaatgaccggctgcagacccacacagtgtacaagaacctgaaccctgagtggaacaaggtgttcaccttccccatcaaggacatccatgatgtgctggaggtgacagtgtttgatgaagatggagacaagcccccagacttcctgggcaaggtggccatccccctgctgagcatcagagatggccagcccaactgctacgtgctgaagaacaaggacctggagcaggccttcaagggcgtcatctacctggagatggacctgatctacaaccctgtgaaggccagcatccgcaccttcaccccccgggagaagagatttgtggaggacagcaggaagctgagcaagaagatcctgagcagagatgtggacagagtgaagaggatcaccatggccatctggaacaccatgcagttcctgaagagctgcttccagtgggagagcaccctgcggagcaccatcgcctttgctgagagcgagaagaagggcctgattgagcgcatctacatggtgcaggacatcgtgtccacagtgcagaatgtgctggaggagatcgccagctttggagagcgcatcaagaacaccttcaactggacagtgcccttcctgagcagcctggcctgcctgatcctggccgccgccaccatcatcctgtacttcatccccctgcgctacatcatcctgatctggggcatcaacaagttcaccaagaagctgaggaacccctacagcattgacaacaatgagctgctggacttcctgagccgggtgcccagtgatgtgcagaaggtgcagtatgcagagctgaagctgtgcagcagccacagccccctgaggaagaagaggtctgccctgtag

SEQ ID NO: 60440 - DNA, 7454 bp, Artificial Sequence
  derived and/or modified sequence
gagtcattgcagttttcagtagaggtgtacttctgagaagtggcttcttgggtcttcatgcagccatggatctggataaaccatctgtttggggctcattaaaacagcggaccaggccattgttgatcaacttgagcaagaagaaggtgaaaaagaacccaagtaagcccccagatctacgggcaaggcatcacttggaccgccgtctcagcctctctgtgcctgatctcctggaggctgaggccttggccccagagggccggccttactccgggccacagtcttcctacacctcggtgcccagcagtctgtccactgcagggatctttcccaagagcagcagtagctccttgaaacagtctgaagaagaattggattggagccaggaagaagccagtcacctccatgtggtggaaacagactcagaggaggcctatgcctctcctgctgagcggagacgggtgtccagcaacggcatctttgatcttcagaaaacttcccttggaggggatgcaccagaagagccagagaagctatgtggaagcagtgacctgaatgcttctatgacatctcaacattttgaagaacaatctgtaccgggggaagccagtgatggcttgagtaacctccccagcccttttgcgtacctcctcaccatacacctgaaggaaggccggaacctggttgtccgagatcgctgtggcacaagtgatccttatgtgaaatttaagctgaatgggaagacgctgtacaaaagtaaagtcatatataagaacttgaacccagtatgggatgagatagttgtattgccaatccaaagccttgatcaaaagctacgtgtgaaggtatatgatcgagatttaaccacatctgatttcatgggttctgcatttgtcattctcagtgatcttgagcttaacagaacaactgaacatattttaaaactggaagatccaaacagtttagaagatgacatgggagtgatcgtgttaaatttgaacctagtggtaaaacagggtgatttcaagagacaccgttggtcaaatcggaagcgattaagtgccagcaagtcctctttgatacgcaacctacggctctctgagtccttgaaaaagaaccaactctggaacgggattataagtataactttgttggaagggaagaatgtctcaggaggaagcatgacagagatgtttgtccagttaaaactgggagatcagaggtataaaagtaagacactgtgtaagagtgcaaatccgcagtggcaggaacagtttgactttcactacttctctgacaggatgggcattttggacattgaagtgtggggaaaggacaacaaaaagcatgaggaacgtctgggcacgtgtaaagtggatatctcggcactccctctgaagcaagccaactgcctggagctgccactggacagctgtctgggggctctccttatgttggtcacacttacaccctgtgcgggggtctccgtctctgatctgtgtgtctgccccttagcagacctcagcgaaagaaagcagattacccagcgatattgcttacagaactccctgaaagatgtgaaagacgtcggcattctacaagtgaaggttttaaaggcagcagatctcttagcggcagatttctcagggaagagtgacccattttgcttgttggagttaggcaatgaccgacttcagacgcataccgtctacaaaaacctcaaccctgaatggaacaaagtttttacatttcccattaaagatatccatgatgttttggaagtgacagtgtttgatgaagatggagataaacccccagattttcttggaaaagttgccattcccttgctgtccattagagatggacaaccgaattgttatgtactaaagaataaagatttagaacaagcttttaaaggagttatttacttagagatggaccttatatataatccggtgaaagcaagtattaggacttttactccccgggaaaagcgctttgttgaagacagccgcaagctgtccaaaaagatcttatcaagagatgtggaccgtgtgaaaagaatcactatggcaatatggaatacaatgcagttccttaaaagctgcttccagtgggaatccacattaagaagtacaatagcattcgcggaatctgagaaaaaggggttgattgaaagaatctatatggtacaggatattgtttcaactgttcaaaacgtcttggaggaaatagcttcttttggagaaaggattaagaacacatttaactggacggtccccttcctttcatctctggcctgtttgattctggcagcagccaccatcattttgtatttcattccactgcggtacatcattttaatctggggcataaataaatttactaagaagcttcgaaatccctattccatcgacaataatgagctactagacttcctctctagggtaccgtctgatgttcaaaaggtgcagtatgcagaattgaaactctgcagcagccacagccccctgcggaagaagcgcagcgctctctagggcacacaccgactttggacagcagcacccaatattgtgtttggttgagtagaccaatgttatggctgtttcagtggtacccaaggtgtccttctgaaatgcatgccctgtggcaccctctgtatacttcctcctccttcacgtgcacagacatacacacatgtgcacacaccctcatgcatgggtgtcctagttgcgtagagggtcagcccagcgaaaagcaacaaccccaagactgtgaaagactaacatccattctgaaataggagataacaaggctgccatggatctgaacaccaccttccttgagaacagccaggagcccacttggattcaagagtgactttgaacttgttttcacacctccaacagactctcattaagattcagttatttccgctccccagccccacactcctttcagattatcgttcatgggcgtaagtctcttctcagagttaacaagtctttggtagtcatcctctgtccaaatattgtatattattaaaaggcatttttaataattaccagaattagctcaaacctttagggatctttcagccatgattattaaggatatgtatgtgaatttttgggaaacctctcggtgctggatgccagcctacagcagggtccattgctggcaatggatggcccaggaaggtccctagagatcactcacttgaaaaatgagggtcccatgaaagtatttggttgccttctgatgccacttcttctcactttactttttgcttattttcaaaatattataaaatgtcaacatataatttcagaaaggcaggtgggggtaggggagaaatgaatgaataaattctctaggtatttagaaagataagaaactgaagaccgagagactaataaggctgcttacctaattattataatcatttcatttgcctgaatgttttaagcaggaagtagaaatactttggctgcccaaatgtatcttttgttcctcttagaagtaaaataagctacatacaataaaaatttatttcagaaccccatttctagaaaataccaccccagagtcctcatttgatagcatctgtctcctgcagacctcatcattccacagtatttccctgccatgtaaaaatcctgactttgtgcgtatataaaatgtatgcaattaagtctgtttaaatgatatttaagttttaaagactgtattttgttgacacatactttgtgcagtttttatgtatgtatgtattataaaaaaagttaaggttaaaaagatctcatttaatagtgagttcactatttttttttttttgtctctgggttgtaatttaataatcttcaaacaaaatgtttacgaaaaatgccaaagattctaaatcttatcatcccgtgtctgtttttcttcatgttgtatctcactgggttgctttctggctgagccagaattctgcatgatttgatttacttcaagttaatgaagctggctggaaaagagccttgcagaaattataaaagctccagtaaatctcgtagttgtacatacaatagatacccaagaacctcttttgttaaaccagttactcaatcttctgtgtaaacaatgcctcattgtcttgcttctaactatcatctagtttatcatagtctgtcattttgtaacgacctaagtcagacatttttaaacagacatgtgagatctgatcagtcatttgaatgaaaactttcagcagcaaaataaccccttatttatttaaaagtggaaccaatactttattgttgttcttttgctatagaatttcaaaatgaaattatttgcccgacaagaaggcatcattagttagacttgtttcctctgtagcccgattgaaattctcagtgttaagtttaggacccaaacaccagctgggacgtaagagcaggaccgaatcaaccttgaataaactgtatatagaaaacaattgttagttgattaagtagacattggatgtttgttagaaaggaatgttagttgtaagtgacatgttaagatttatacaattgtcaaaaacttttaggaaagattccagaatgcttttgataaaatttatcgattgtggattcacagtgtgataattaagtagggatgttgaagtcttgccaagttttcctggttcccttctcaaactttatcttcccatttctagccctgtctctctatcttacaggcatctacacctcagcaagtcagaaactaaacatcatctgtctctccctgtcttcagaaccccaaccctcataatctccttccagcttccttatttcccttaccaggactggcattttctgggcttggaatttctcggtcatcctctttttttttgttcctcgtgctgttgtcctcgtctcccaacccctaaagcctagtaggtccagtgtcaatgcattaaccacttctgttctgatttccaccacccaagtggaggccttcataacctctcagacgtcacggccatgatgccagttacattatgcctagttaatcttcattcagactggaaggacctgcccccagttgtttctttctgaatagattctactctccttcaacacttccaaagtctcctgccccaaagaggcttagttagtcctgtggctggatgtgactccaacttccttttttgtaccatcacatctttcatatctttctggcatctgccatacatcataagaggctttgaccactgtcctccactgaatagcccattacagctagcacctaatagttactcaggaaataaatacatgtttaacaggccaggtcgtagagattatttttctttctctgccttttcatgtgctgctttcagaacagagggctggattggatagattagtatgatctatcctggagattcatttcttgcattaagagcttattttgtgtgatattatttataatccctgactatgtcaattataaacttttaaattatgtcttatatttgaagttcttacctacatatcagaggaaaatataatgtttatttctaggtggtaaaacaatcttctggattcttttttctttacttgtaaattatcatttaacaagtctatattgaatgccgataattttctggaacaaaacagactacattcccttggtaaagccagacattaaacagatactttcaagcaacagcatgccatgctcagatttaagtttgaaaaatattctagctgcaatggatagcctagcaattttcaaagtttagagaagttattaatattagccctttgtagtactcctgataaatgaataacaccctggactttcaaatagtggcactgggaaaaaagtaagtagaattgagagatggtgaagagataaagtgagcaggacttaacaattgctggactatgggatgagggagcgtagagtcaaggatggctctcagtccctaggtctccaggtctaggaagatggtgttacctttcactaagggagagaactgtaagaactgctgtgagaggaccacaggagtccagttttagcgctgaatctcaggtgactgaaaagcatccaaataggaatgtcagcaaggtaatggaatatatagttctcagagaagtaacacactgtacttgagatgtacacaagttaaaggcaaacattgtatatgaaaagtgatcaaaactacatgcttcaagaaattaaaccttgaagaactcaacagttaatgtcatatatagaaaggcaagtcagttaagagtgtaaatagaaacgggtaaatacagaggagaaaaacagtaagcatggactgtcctagaattcagtggcagagcatactgcaagaaagctgatgtggtcaataatatcaaatgccgctgagatcacataagtacagaatcatgaccttaatggtttgacagtttggaagcaccctggcaacaagccatttcagtggaatggtagaaatggaaaccacgctgggttgagaagtgagtggatgtgaaaatatggggcctctgaatggaggtaacccttgaaaaattccactgtggagaagaaaggagagagagagggctggaatttggaatgaaaggagatatttgggattattttagtaagaaaacagaggtgtcatgacctcagtgtaaccctattagctgcaaaaaattcttcatgggcttgagatggagttagccatattcattattgaaaactatgttctgcacttatacattgttggttggagtgtaaattagttcaaccgctgtggaagacagggtgggtgtttcctcaaaaacctaaagacagaaataccatttgacccagcaatcccataactgggtatgtacccaaaggaatataaattgttctactataaaaacacatgcacacacatgttcactgcaacactatttacaatagcaaagacactggatcagtctaaatgcccatcattgatagaatggataaagaaaatgtggtagaggtacaccatggaatactatgcagccataaaaaagaatgagatcatgtccttttgcaggaacttggatacagctggaggccattatccttagcaaactaatgcagcaacagaaaaccaaataccacatgttctcatttataggtaggagttaaatgatgagaacacatggacatgtagaagggaacaaaatacactgggggctattggagggtgaagggtgaaaggaggaagaggatcaggaaaaataatgagtaccaggcttaatacatgggcgatgaaataatctgtatgacaagcctctctgacacagtttacctatgtaacaaacctgcacagttacccctgaactttaaaaaaaactatgttctatcaaaacctgcctctcatttatgtattaggaatcttgtgacaacggaacagttgaaaaattaaaataaaaattgcctgaaaatgc

SEQ ID NO: 60441 - DNA, 2472 bp, Artificial Sequence
  derived and/or modified sequence
atggacctggacaagcccagcgtgtggggcagcctgaagcagcggactcgccctcttctgattaatctcagcaagaagaaagtcaagaaaaatcccagcaaaccaccggatctgagggcccgtcaccacctcgatcggcgactgtccctctccgtgcccgatctcctggaagccgaagcactggctccggagggaaggccttactccgggcctcagtctagctatacaagcgtaccaagttcactcagcacggctgggattttcccaaagtcctctagtagctctttaaaacagtctgaggaggaactggactggagccaagaggaagcaagccacctgcatgtggtggagaccgactccgaggaggcttatgcttcccccgccgaacgacgacgtgtgagctcaaatgggatcttcgacctgcagaagaccagcctgggaggtgatgcgccagaggagcccgaaaagctttgcggctccagcgacttaaatgcctctatgacgtcccaacatttcgaggagcagtcggtcccaggagaggctagtgacggcctgtcaaatttgccatccccttttgcatatctcctgacgatccacctcaaagagggtcggaatctggttgtgagagatcggtgtgggacctctgacccttatgtaaaatttaagctaaacggcaaaaccctgtacaagagcaaagtgatatacaaaaatctgaatccagtgtgggacgagatcgtggttctacctattcagagcttggaccagaagctccgggtcaaggtgtatgaccgtgatctcacaacatctgactttatgggctcagcgtttgtgattctctctgatttggaactgaaccggacaacagaacacatactcaaactggaagatccgaattcattggaagacgatatgggcgttatcgtattgaacctgaacctcgtggtgaagcagggcgattttaagaggcacagatggtccaataggaaacgattatcagcctcaaaatcgtctctgatcagaaatctgcggttgagcgagtccctgaaaaagaatcagctgtggaacgggattatcagtattaccttgttggagggcaaaaacgtgagcggcgggtccatgacagagatgtttgtgcagctgaaactgggcgaccagcgttataagtctaaaactttgtgcaaatccgccaacccgcaatggcaagagcagtttgactttcattacttctcggaccggatggggattctggatatcgaggtttggggtaaagacaataagaagcatgaagagcggctggggacctgtaaggtagatatctctgcgcttcctctcaaacaagccaactgtctggaattaccactggacagttgcttaggtgcactcctgatgctggtgaccttaaccccctgcgcaggggtatctgtctccgacctgtgtgtgtgtcccctagccgacttatcagaacgcaaacagataacacagcgctactgcctgcagaacagcctgaaagatgtaaaagacgtgggaattcttcaggtgaaggtgctaaaagcagccgacttactcgcagccgactttagcgggaaaagtgatcctttctgccttctggagctgggcaatgaccgcctccagacccacacggtgtataaaaatctgaaccctgagtggaataaggtgtttacctttcccattaaagatatccatgatgtgcttgaggtgaccgtgtttgatgaggacggagataagccacccgatttcctgggaaaggtggctatccctctcttgtctattcgcgacggacagcccaactgctatgtactgaagaacaaggacctggagcaggccttcaagggcgtcatatatctagagatggatctcatatataaccccgttaaggcatccatcagaactttcactccacgcgagaaaaggttcgtggaggattcaagaaaactgagtaagaaaattctgagtagggacgtggatcgggtaaaacgcatcacaatggctatatggaataccatgcagttcctgaaatcatgttttcagtgggaaagcactctgaggagtacgatcgcctttgcggaaagtgaaaaaaagggcctcattgaaaggatctatatggttcaggatatcgtgtccaccgtacagaatgtgctggaagagattgcaagctttggcgagaggattaaaaacacattcaactggaccgtgcctttccttagtagtctggcctgtctcatactggccgcagctaccatcatcctgtactttatacctctccggtacatcatactgatttggggtatcaacaaattcacaaaaaaactgagaaatccctattctatagataataatgagctgcttgatttcctgtcccgagtgcctagcgacgtgcaaaaggtgcagtatgcagagctgaagctctgcagctcccattctcccctgaggaaaaaacgttcagcgctgtag

SEQ ID NO: 60442 - DNA, 2472 bp, Artificial Sequence
  derived and/or modified sequence
atggacttggacaaaccctctgtgtggggtagcctgaagcagcgtacgcggcctttactgatcaacctgtctaagaagaaagtaaagaagaatccgtctaaacccccagaccttcgtgctcggcaccatttagaccggagactcagcctcagtgtacctgacctcctagaggctgaagccttggcacccgaaggtcggccatactccggcccacagtcgtcgtatacatccgtcccgtccagtctgagcaccgccggtatctttcctaagtccagttcgagtagtttgaaacagagcgaagaggaactcgactggtcccaagaggaggcgtcacatctccacgttgttgagaccgattcggaggaggcgtacgccagccccgctgagcgacgacgcgtctcttcaaacggaatttttgacctgcagaaaacttctttgggcggagatgcccctgaggagcctgagaagctgtgcgggtcatccgatcttaatgcaagtatgactagtcagcactttgaggagcagtccgtgccaggagaagcctctgacggcctgagtaacctccctagccctttcgcctacctgctgacaatacaccttaaggagggtcggaatctggttgtgagggatcggtgtggcacttctgatccttatgtgaaattcaaactgaatggaaaaacgttgtataagtccaaggtaatttataaaaacctgaaccctgtgtgggacgagattgtcgtccttcccattcagagtctggatcagaaactgcgggttaaagtgtatgatcgggacctgactacttctgatttcatgggcagcgctttcgtcattctatccgatctggaactcaatcgaaccactgagcacatcctgaaattagaggatccgaactccttggaagacgacatgggagtgattgtcctcaacttgaacttggtggtgaagcaaggagacttcaagagacaccgctggagtaacagaaaacgcctgagcgccagtaaatcctcactcatccgcaatctcaggctgtccgagtccctcaagaagaatcagctttggaatggaattatctccattaccttactggaaggcaagaatgtgtctggcggttccatgactgagatgtttgttcagctcaagctcggggatcagagatacaaatccaaaaccttgtgtaaaagtgccaatccccagtggcaggaacagtttgactttcactacttcagtgatagaatggggatcctggacatcgaggtgtgggggaaggacaataaaaaacacgaggaacgcctgggcacctgtaaagtagacatcagcgccctgcctctgaagcaggccaactgtttggagctgcctctggactcctgcctgggagccttgctcatgttggttacgctgacaccctgtgccggtgtctccgtttctgatctgtgcgtgtgtccgctggcggatttatccgaaagaaaacaaatcacccaaagatactgcttgcaaaactccctcaaggacgttaaggatgtcggcatccttcaagtgaaagttttgaaagcagcagatcttctcgcagcggattttagtgggaaatccgatccgttctgccttctggaattaggcaatgacagactgcaaacccatactgtctataaaaacctgaatcccgaatggaacaaggtgtttacttttccgatcaaggacatccatgacgtgctggaagtgaccgttttcgacgaggacggggataagccccctgacttcctcgggaaggttgcaatcccattactcagtataagggacggccagcccaattgctatgtgctgaagaacaaggacctggaacaggcatttaagggagtcatctatctagagatggacttgatttacaatcccgtgaaggcctcgatccgaacatttacgcctagagaaaagcgattcgtggaggatagcaggaagttatccaaaaaaattctgtctagagacgtggaccgagtaaaacgcatcaccatggcaatctggaatacaatgcaatttctcaaaagttgcttccagtgggagtccacccttcgatccaccatagctttcgccgaatcagagaaaaagggtctgatagagaggatctatatggtgcaggacatcgtgagtaccgtccagaatgtactggaggagatcgcttctttcggcgaacgaataaagaacacctttaattggacagtccccttcctttcatcactggcttgtctgattctcgccgctgccaccatcattctgtacttcattccattacgctacattatactgatctggggaatcaataagttcaccaagaaactgcgcaatccgtactctatcgacaacaatgagctcctggactttttgtcccgggtgcctagcgacgtgcagaaggtgcagtacgcagagctgaagctctgttccagccactcccccctgaggaagaaacgctcagcactgtag

SEQ ID NO: 60443 - DNA, 921 bp, Artificial Sequence
  derived and/or modified sequence
atgggcatcctggacatcgaggtgtggggcaaggacaacaagaagcacgaggagagactgggcacctgcaaggtggacatcagcgccctgcccctgaagcaggccaactgcctggagctgcccctggacagctgcctgggcgccctgctgatgctggtgaccctgaccccctgcgccggcgtgagcgtgagcgacctgtgcgtgtgccccctggccgacctgagcgagagaaagcagatcacccagagatactgcctgcagaacagcctgaaggacgtgaaggacgtgggcatcctgcaggtgaaggtgctgaaggccgccgacctgctggccgccgacttcagcggcaagagcgaccccttctgcctgctggagctgggcaacgacagactgcagacccacaccgtgtacaagaacctgaaccccgagtggaacaaggtgttcaccttccccatcaaggacatccacgacgtgctggaggtgaccgtgttcgacgaggacggcgacaagccccccgacttcctgggcaaggtggccatccccctgctgagcatcagagacggccagcccaactgctacgtgctgaagaacaaggacctggagcaggccttcaagggcgtgatctacctggagatggacctgatctacaaccccgtgaaggccagcatcagaaccttcacccccagagagaagagattcgtggaggacagcagaaagctgagcaagaagatcctgagcagagacgtggacagagtgaagagaatcaccatggccatctggaacaccatgcagttcctgaagagctgcttccagtgggagagcaccctgagaagcaccatcgccttcgcccacagaaaggaggagccccccctgagcatgaagtgcaccctgttcagcggcgacatcggccccagcctgtag

SEQ ID NO: 60444 - DNA, 921 bp, Artificial Sequence
  derived and/or modified sequence
atgggaatcttggacatagaagtttggggaaaggataacaaaaaacacgaggagcggctggggacttgtaaggtggacatttcagccctgcctctgaaacaggcgaattgtttggaactgccactcgatagctgcttgggtgccctgctaatgttagtgactctcacaccttgcgccggcgtatcggtgagcgacctttgtgtgtgtccattagctgacctctccgagcggaaacagataacgcaaagatattgtctccaaaactctttaaaagatgtgaaggacgtgggcatattacaggtcaaagtgttgaaagctgcagatcttctggccgcagacttcagtggtaaaagtgacccgttctgtttactggaattagggaatgatcggctacaaacacatactgtgtataagaacctcaaccctgaatggaataaggtctttacttttcccatcaaggacatccatgatgtgctggaggtgaccgtcttcgatgaagacggcgataagccgccggatttcctgggcaaagtcgctataccccttctgtctataagagatggccagccaaactgttatgttctcaagaataaagacctcgagcaggccttcaagggtgtgatatacctggagatggatctgatctacaatccagtaaaagcaagtattaggacctttacccctagagaaaagcgtttcgtggaagattctcgcaaactaagtaaaaaaattctgagtcgggatgtggatagagtgaagcgcatcacaatggctatttggaatacaatgcaattcctgaaatcctgtttccagtgggagtcgaccctgaggagtacaatagcttttgcacatcgaaaagaggagcctcctctgtccatgaaatgtacactgttttcaggtgacatcggtccctccctgtag

SEQ ID NO: 60445 - DNA, 921 bp, Artificial Sequence
  derived and/or modified sequence
atggggattttggatatcgaggtctgggggaaggacaacaaaaagcatgaagagaggttggggacttgtaaagtcgacatctccgcacttcctctaaagcaggccaattgtcttgaattgccactggacagctgtctgggagctttactcatgctagtgaccctcacgccttgcgccggcgtgagcgtgtccgacctctgcgtctgtcctctcgcagatctgtccgagagaaaacagatcacccagcgctactgcctccagaactctctcaaggacgtgaaggatgtgggaatcctccaggttaaagtgctgaaggccgcggacctcttggctgccgatttctcgggcaaaagcgaccctttctgtctgttagagttgggaaatgatcgcctccagactcataccgtctacaagaacttgaatccagaatggaacaaagtcttcacattccctatcaaagatattcatgatgttctcgaggtgaccgtattcgacgaggacggtgataagccccctgattttctcggcaaggtagccatccccctgctcagtataagagatggtcagccgaactgttatgttctgaaaaataaagatctcgagcaggcttttaaaggcgtgatttatttagagatggatctcatctataaccccgtgaaggccagcattcggacttttaccccgagagagaaaagattcgtcgaggattctaggaagctgagtaagaaaatcctgagccgcgacgttgatcgcgtcaaacggattacaatggcaatttggaacacgatgcaattcctaaagtcatgtttccagtgggagagcacgctgcgctcgacaattgcctttgcacatcgcaaggaggagccccccttgagtatgaaatgcacactgttttcaggcgacatcgggcctagcttgtag

SEQ ID NO: 60446 - DNA, 921 bp, Artificial Sequence
  derived and/or modified sequence
atgggcatcctggacatcgaggtgtggggcaaggacaacaagaagcatgaggagcggctgggcacctgcaaggtggacatcagcgccctgcccctgaagcaggccaactgcctggagctgcccctggacagctgcctgggcgccctgctgatgctggtgaccctgaccccctgtgccggcgtgtctgtgtctgacctgtgtgtgtgccccctggccgacctgtctgagaggaagcagatcacccagcgctactgcctgcagaacagcctgaaggatgtgaaggatgtgggcatcctgcaggtgaaggtgctgaaggctgctgacctgctggccgctgacttcagcggcaagagtgaccccttctgcctgctggagctgggcaatgaccggctgcagacccacacagtgtacaagaacctgaaccctgagtggaacaaggtgttcaccttccccatcaaggacatccatgatgtgctggaggtgacagtgtttgatgaagatggagacaagcccccagacttcctgggcaaggtggccatccccctgctgagcatcagagatggccagcccaactgctacgtgctgaagaacaaggacctggagcaggccttcaagggcgtcatctacctggagatggacctgatctacaaccctgtgaaggccagcatccgcaccttcaccccccgggagaagagatttgtggaggacagcaggaagctgagcaagaagatcctgagcagagatgtggacagagtgaagaggatcaccatggccatctggaacaccatgcagttcctgaagagctgcttccagtgggagagcaccctgcggagcaccatcgcctttgcccacaggaaggaggagccccccctgtccatgaagtgcaccctcttcagcggggacatcggccccagcctgtag

SEQ ID NO: 60447 - DNA, 1957 bp, Artificial Sequence
  derived and/or modified sequence
ctgtgacagcaggtttgcaaaaccaatgaaaaaaacagttttccccaggcagggaggaattttttttataattaaatactgaaagttggaattcctatgatcatcaaagtcactctcaggaattagaagcaagtttacatgtcatctttattttttgctttagtcctctttgatacgcaacctacggctctctgagtccttgaaaaagaaccaactctggaacgggattataagtataactttgttggaagggaagaatgtctcaggaggaagcatgacagagatgtttgtccagttaaaactgggagatcagaggtataaaagtaaggatgggcattttggacattgaagtgtggggaaaggacaacaaaaagcatgaggaacgtctgggcacgtgtaaagtggatatctcggcactccctctgaagcaagccaactgcctggagctgccactggacagctgtctgggggctctccttatgttggtcacacttacaccctgtgcgggggtctccgtctctgatctgtgtgtctgccccttagcagacctcagcgaaagaaagcagattacccagcgatattgcttacagaactccctgaaagatgtgaaagacgtcggcattctacaagtgaaggttttaaaggcagcagatctcttagcggcagatttctcagggaagagtgacccattttgcttgttggagttaggcaatgaccgacttcagacgcataccgtctacaaaaacctcaaccctgaatggaacaaagtttttacatttcccattaaagatatccatgatgttttggaagtgacagtgtttgatgaagatggagataaacccccagattttcttggaaaagttgccattcccttgctgtccattagagatggacaaccgaattgttatgtactaaagaataaagatttagaacaagcttttaaaggagttatttacttagagatggaccttatatataatccggtgaaagcaagtattaggacttttactccccgggaaaagcgctttgttgaagacagccgcaagctgtccaaaaagatcttatcaagagatgtggaccgtgtgaaaagaatcactatggcaatatggaatacaatgcagttccttaaaagctgcttccagtgggaatccacattaagaagtacaatagcattcgcgcaccgcaaagaggaaccacccctgtctatgaaatgtacccttttctctggtgacattggcccatccttatgagcataataaaatcgcagaatcaaagcgctgcaagagatcttaaaaccacctaagtctaccactgagagcccaagaatcttggaaggacttcacagctggcctcatgccttcactttatatctcagggcattttctctcatttgtaaagggacttgtccttgatcaaattggtaatgtcagccatgggaggagaaatcaagtctcccgactgcaaatctttgtatatttggtatcatgccattcatttctgtcctgtgcaaagatcactataaaaactaatacgaggtatgagtggtctaagagtgtgaatatcagtcatgatcattggtgaatctgatttctgaatgttatgtggttctgcttctgttttctactgccaatatatgctgaatgttctctcttagccaacaggcatagcctcatataaaaaatgggggaaaaaaaacatttattagcccaagaagccaatgggttcaaggtcactcccaacatttttatgccatcaagtatatcagctccaaaagaggcttttcctttgccattggggggtattttgtttgctgtcgtttattttagttctccactgcttcggtgtagaggacctatgctgcctgtaggcttgacctttcctatactttttctgctgtctgaagttgctaaaacatttggccttaataaaaacactaataaaggttttattaatctgt

SEQ ID NO: 60448 - DNA, 921 bp, Artificial Sequence
  derived and/or modified sequence
atgggcatcctggacatcgaggtgtggggcaaggacaacaagaagcacgaggagcgactaggtacttgcaaagtagacatttcagcactccccctaaagcaggctaattgcctggaactccccctcgatagttgtctcggcgcactccttatgcttgtgactctcaccccatgcgcaggggtcagcgtgagtgacctctgcgtttgcccacttgccgacctgagtgaacggaagcagatcacacagcgctactgtttgcagaactcgctgaaggatgtgaaagatgtgggcatcttgcaggtgaaggtcctgaaggcagcagaccttctggccgccgatttcagtggaaaatctgatccattctgcttgctcgagctgggcaacgatcgcctgcaaacacacacggtatacaagaatctgaaccccgaatggaataaagtctttacgtttcccattaaagacatccacgacgtcctcgaagtgaccgtgtttgacgaggacggggataagccacccgattttctgggaaaagtagccattccgctgctgtctattcgcgacggccagccgaactgttacgtgcttaagaacaaggatttggagcaggcttttaagggggtgatctaccttgaaatggaccttatttacaatcctgtgaaggcatctattcgcactttcacccctagagagaaaaggttcgttgaggatagccggaagttgagcaagaagatcctgtcacgggacgtcgacagggtgaagaggataaccatggcaatctggaacaccatgcaattcctaaagagctgtttccaatgggaaagcacccttcgcagcacgatcgcgttcgcacaccggaaagaggagcctccactgagcatgaagtgtaccttatttagcggtgatataggccctagcttgtag

SEQ ID NO: 60449 - DNA, 921 bp, Artificial Sequence
  derived and/or modified sequence
atgggcatcctggacatcgaggtgtggggcaaggacaacaagaagcatgaggagcggttgggaacctgcaaagtggatatcagtgcgctcccgcttaaacaggccaactgcctggaactcccgctggacagctgcctgggcgccctcttaatgctggtgactctgactccgtgtgctggcgtgtcagtctcggacctctgtgtgtgtccgctggcagatctgagcgaaagaaaacaaattactcaacggtactgcctgcaaaacagtttgaaggacgtcaaagacgtaggtatcctccaggttaaggtgttgaaagcagcagatctgctggccgcagactttagcggcaagagtgatcctttttgcctacttgagctagggaatgatcggctacaaactcataccgtctacaaaaatctcaacccggagtggaacaaagtgttcacttttcctatcaaggatatccatgacgtgctcgaagtaactgtctttgatgaggacggcgacaaacccccagatttcctggggaaagtggcgattccattgctaagtatccgggacggacagcctaactgctacgttcttaaaaataaggatctggagcaggcttttaagggggtaatttatctcgagatggatctcatatataatccagtgaaggcatctatccggacgttcacacccagagagaagcggttcgtggaggattctcgaaagctgagtaaaaagatcctgagtcgggatgtggaccgcgtgaagcgtatcacaatggcaatttggaacactatgcagtttctaaaatcgtgttttcagtgggagagtaccttaagatcaacgattgcctttgcccaccgaaaagaagagccacctctgagtatgaagtgtactctgttctccggtgacatcggaccctctctctag

SEQ ID NO: 60450 - DNA, 921 bp, Artificial Sequence
  derived and/or modified sequence
atgggcattcttgatatcgaggtctggggcaaagacaataaaaaacatgaggagcgcctcgggacctgcaaggtcgatatctcagcactgcccctgaaacaagctaattgcctggaactgccactcgactcatgtctgggggcactgttgatgctggtcactctgacaccatgtgctggcgtttcagtcagtgacttgtgcgtatgcccccttgcggatttgtctgagcgaaagcagatcactcagaggtactgcttgcagaatagtctcaaagacgtgaaggacgtgggaattttacaggtcaaagtgctgaaggcggctgacctcctcgccgcagatttctccggaaagtcagaccctttttgcctgctggagttggggaacgatcgcctgcagacacacaccgtttataaaaatttgaatcctgagtggaataaagtgtttacatttccgatcaaggacattcatgacgttttggaagtcaccgtattcgatgaggatggagataagccacctgacttccttgggaaggtagccatccccctgctctccattcgcgacgggcagccaaattgttacgttctcaagaacaaggacctggaacaggccttcaagggcgtcatctatcttgagatggatctgatctataatccagttaaagcctcaataaggaccttcacccctagagaaaaacggtttgttgaagatagccgaaagttatccaaaaagattctttcgcgagacgtcgatcgcgtcaaaaggatcacaatggcaatctggaataccatgcagttcttgaaaagctgtttccaatgggagtctacactgaggtctacaattgcatttgcccatcgaaaagaggaaccaccactgtccatgaaatgcacacttttctctggagacatcggtccatccttgtag

SEQ ID NO: 60451 - DNA, 921 bp, Artificial Sequence
  derived and/or modified sequence
atgggaattctggacatcgaggtgtggggaaaagacaacaagaaacatgaagaacgtcttggtacatgcaaagtcgatatctctgccctccccctgaagcaagcaaactgcttggagttaccactggatagttgtcttggggctttgctgatgctggtcaccctcaccccctgcgctggggtttctgtatcagatttgtgcgtttgtcccttggctgacctctctgagcgcaagcagatcacgcagcgatattgtctccagaactccctgaaggacgtcaaggatgtcgggatactgcaggttaaagtactaaaagccgcagatctgctggccgctgatttttcagggaagagtgaccctttctgcctcctggaactgggcaatgaccggctgcagactcatactgtttacaagaatctgaaccctgagtggaacaaggttttcacgtttccaattaaggatattcatgacgtccttgaggtgactgtgttcgatgaagatggcgacaaacccccagacttcctgggcaaagttgccatccctctcctgagcatccgcgatggacagcccaattgctatgtactcaagaataaggacctggagcaagctttcaagggggtcatctatcttgagatggacttaatttacaatccggtgaaggcatcaatccggacattcacacctagggaaaaacgctttgtggaggattccaggaagctgagtaagaagattctctcaagagacgtggatcgagtcaaaagaattactatggccatctggaatactatgcagtttttgaagtcctgttttcagtgggagagcaccctgcgatccactatcgctttcgcccataggaaggaggaaccacccctcagcatgaagtgtaccctgttttccggggacattgggccatccctctag

SEQ ID NO: 60452 - DNA, 558 bp, Artificial Sequence
  derived and/or modified sequence
atggccaccgagcacgtgaacggcaacggcaccgaggagcccatggacaccaccagcgccgtgatccacagcgagaacttccagaccctgctggacgccggcctgccccagaaggtggccgagaagctggacgagatctacgtggccggcctggtggcccacagcgacctggacgagagagccatcgaggccctgaaggagttcaacgaggacggcgccctggccgtgctgcagcagttcaaggacagcgacctgagccacgtgcagaacaagagcgccttcctgtgcggcgtgatgaagacctacagacagagagagaagcagggcaccaaggtggccgacagcagcaagggccccgacgaggccaagatcaaggccctgctggagagaaccggctacaccctggacgtgaccaccggccagagaaagtacggcggccccccccccgacagcgtgtacagcggccagcagcccagcgtgggcaccgagatcttcgtgggcaagatccccagagacctgttcgaggacgagctggtgcccctgttcgagaaggcctag

SEQ ID NO: 60453 - DNA, 558 bp, Artificial Sequence
  derived and/or modified sequence
atggccaccgagcatgtgaatggaaatggtactgaggagcctatggacaccaccagcgcagtaattcattccgagaattttcaaacgttgctggacgccggcttgccacaaaaagtagccgagaagctcgacgagatctacgttgccggtctcgtggcccattccgatctcgatgaacgggctatcgaggccctgaaagaattcaatgaagatggggcactcgcggtcttgcagcaattcaaagatagcgatctttcccatgtccagaacaaaagtgctttcctctgtggagttatgaagacatatcgccagcgagaaaagcagggcactaaagtggctgactcctcaaaggggccagacgaggctaagatcaaggccctgctagaaagaaccgggtatactttggatgtgaccactggacagagaaagtatgggggacctcctcccgatagcgtgtattcaggccagcagccttccgttggcaccgagatcttcgtcggtaaaatacctagggacttgttcgaagatgagttagttcccctgttcgagaaagcttag

SEQ ID NO: 60454 - DNA, 558 bp, Artificial Sequence
  derived and/or modified sequence
atggccacagaacatgtgaatggaaatggaacagaggagcccatggacaccaccagcgctgtgatccacagcgagaacttccagaccctgctggatgctggcctgccccagaaggtggccgagaagctggatgagatctacgtggccggcctggtggcccacagcgacctggatgagcgggccatcgaggccctgaaggagttcaatgaagatggagccctggccgtgctgcagcagttcaaggacagcgacctgagccacgtgcagaacaagagcgccttcctgtgtggggtgatgaagacctaccggcagcgggagaagcagggcaccaaggtggccgacagcagcaaaggaccagatgaggccaagatcaaggccctgctggagaggacaggctacaccctggatgtgaccaccggccagaggaaatatggaggccccccaccagattctgtgtacagcggccagcagcccagcgtgggcacagagatctttgtgggcaagatcccccgggacctgtttgaagatgagctggtgcccctgtttgagaaggcctag

SEQ ID NO: 60455 - DNA, 558 bp, Artificial Sequence
  derived and/or modified sequence
atggccaccgagcacgtgaacggcaacggcaccgaggagcccatggatacaacaagcgccgtcattcattctgagaacttccaaacattgctagacgctgggctgcctcaaaaagtggcggaaaaactcgacgagatctacgtggccggcctcgtcgcacactccgatctggacgagcgcgccatcgaggctttgaaggaatttaacgaagacggcgccctcgccgtcctgcagcaattcaaagattccgacctgagccatgtgcagaataagagcgcctttttatgcggtgtcatgaaaacttacagacagagggagaagcagggaacaaaggtggccgactcttccaaaggcccagacgaagcgaaaatcaaggcactgctggagagaaccggatacactctcgacgttaccactggacaacgcaagtacgggggtcccccgcctgactcagtgtacagcgggcagcagccaagcgtcggtacggagatctttgttggaaagatcccccgcgacttgtttgaggatgagcttgtcccgctcttcgaaaaggcctag

SEQ ID NO: 60456 - DNA, 558 bp, Artificial Sequence
  derived and/or modified sequence
atggcaacagaacacgtgaacgggaacggtacagaggaacctatggataccactagtgccgtgattcacagcgaaaattttcagacgctcttagacgccggactccctcaaaaagtagcggaaaagctggacgagatctatgtggccggtctagtggcacactcagatttagatgagcgggctatagaggcactcaaagagttcaacgaagacggggcactggctgtgctgcaacaattcaaggactcagacctgagccacgtgcagaataagtccgcgttcctgtgtggagtgatgaagacgtatagacaacgagagaaacagggaacaaaagtggccgattcctcaaagggtcccgacgaagcaaagattaaagcactgctcgaaagaacaggttataccttggacgtgacaactggtcagcgtaagtacggcggaccacctcctgactctgtgtactcagggcagcagccctccgttggcactgaaatttttgtgggcaaaatcccaagggatctgttcgaggacgagctggtccctttatttgaaaaggcgtag

SEQ ID NO: 60457 - DNA, 610 bp, Artificial Sequence
  derived and/or modified sequence
gcggccgcggagccgggggcgggggccgggcgcgcacagaccgatctctggaaacatggctacagaacatgttaatggaaatggtactgaagagcccatggatactacttctgcagttatccattcagaaaattttcagacattgcttgatgctggtttaccacagaaagttgctgaaaaactagatgaaatttacgttgcagggctagttgcacatagtgatttagatgaaagagctattgaagctttaaaagaattcaatgaagacggtgcattggcagttcttcaacagtttaaagacagtgatctctctcatgttcagaacaaaagtgcctttttatgtggagtcatgaagacttacaggcagagagaaaaacaagggaccaaagtagcagattctagtaaaggaccagatgaggcaaaaattaaggcactcttggaaagaacaggctacacacttgatgtgaccactggacagaggaagtatggaggaccacctccagattccgtttattcaggtcagcagccttctgttggcactgagatatttgtgggaaagatcccaagagatctatttgaggatgaacttgttccattatttgagaaagct

SEQ ID NO: 60458 - DNA, 1689 bp, Artificial Sequence
  derived and/or modified sequence
atggccaccgagcacgtgaacggcaacggcaccgaggagcccatggacaccaccagcgccgtgatccacagcgagaacttccagaccctgctggacgccggcctgccccagaaggtggccgagaagctggacgagatctacgtggccggcctggtggcccacagcgacctggacgagagagccatcgaggccctgaaggagttcaacgaggacggcgccctggccgtgctgcagcagttcaaggacagcgacctgagccacgtgcagaacaagagcgccttcctgtgcggcgtgatgaagacctacagacagagagagaagcagggcaccaaggtggccgacagcagcaagggccccgacgaggccaagatcaaggccctgctggagagaaccggctacaccctggacgtgaccaccggccagagaaagtacggcggccccccccccgacagcgtgtacagcggccagcagcccagcgtgggcaccgagatcttcgtgggcaagatccccagagacctgttcgaggacgagctggtgcccctgttcgagaaggccggccccatctgggacctgagactgatgatggaccccctgaccggcctgaacagaggctacgccttcgtgaccttctgcaccaaggaggccgcccaggaggccgtgaagctgtacaacaaccacgagatcagaagcggcaagcacatcggcgtgtgcatcagcgtggccaacaacagactgttcgtgggcagcatccccaagagcaagaccaaggagcagatcctggaggagttcagcaaggtgaccgagggcctgaccgacgtgatcctgtaccaccagcccgacgacaagaagaagaacagaggcttctgcttcctggagtacgaggaccacaagaccgccgcccaggccagaagaagactgatgagcggcaaggtgaaggtgtggggcaacgtgggcaccgtggagtgggccgaccccatcgaggaccccgaccccgaggtgatggccaaggtgaaggtgctgttcgtgagaaacctggccaacaccgtgaccgaggagatcctggagaaggccttcagccagttcggcaagctggagagagtgaagaagctgaaggactacgccttcatccacttcgacgagagagacggcgccgtgaaggccatggaggagatgaacggcaaggacctggagggcgagaacatcgagatcgtgttcgccaagccccccgaccagaagagaaaggagagaaaggcccagagacaggccgccaagaaccagatgtacgacgactactactactacggccccccccacatgcccccccccaccagaggcagaggcagaggcggcagaggcggctacggctacccccccgactactacggctacgaggactactacgactactacggctacgactaccacaactacagaggcggctacgaggacccctactacggctacgaggacttccaggtgggcgccagaggcagaggcggcagaggcgccagaggcgccgcccccagcagaggcagaggcgccgccccccccagaggcagagccggctacagccagagaggcggccccggcagcgccagaggcgtgagaggcgccagaggcggcgcccagcagcagagaggcagaggccagggcaagggcgtggaggccggccccgacctgctgcagtag

SEQ ID NO: 60459 - DNA, 1872 bp, Artificial Sequence
  derived and/or modified sequence
atggccaccgagcacgtgaacggcaacggcaccgaggagcccatggacaccaccagcgccgtgatccacagcgagaacttccagaccctgctggacgccggcctgccccagaaggtggccgagaagctggacgagatctacgtggccggcctggtggcccacagcgacctggacgagagagccatcgaggccctgaaggagttcaacgaggacggcgccctggccgtgctgcagcagttcaaggacagcgacctgagccacgtgcagaacaagagcgccttcctgtgcggcgtgatgaagacctacagacagagagagaagcagggcaccaaggtggccgacagcagcaagggccccgacgaggccaagatcaaggccctgctggagagaaccggctacaccctggacgtgaccaccggccagagaaagtacggcggccccccccccgacagcgtgtacagcggccagcagcccagcgtgggcaccgagatcttcgtgggcaagatccccagagacctgttcgaggacgagctggtgcccctgttcgagaaggccggccccatctgggacctgagactgatgatggaccccctgaccggcctgaacagaggctacgccttcgtgaccttctgcaccaaggaggccgcccaggaggccgtgaagctgtacaacaaccacgagatcagaagcggcaagcacatcggcgtgtgcatcagcgtggccaacaacagactgttcgtgggcagcatccccaagagcaagaccaaggagcagatcctggaggagttcagcaaggtgaccgagggcctgaccgacgtgatcctgtaccaccagcccgacgacaagaagaagaacagaggcttctgcttcctggagtacgaggaccacaagaccgccgcccaggccagaagaagactgatgagcggcaaggtgaaggtgtggggcaacgtgggcaccgtggagtgggccgaccccatcgaggaccccgaccccgaggtgatggccaaggtgaaggtgctgttcgtgagaaacctggccaacaccgtgaccgaggagatcctggagaaggccttcagccagttcggcaagctggagagagtgaagaagctgaaggactacgccttcatccacttcgacgagagagacggcgccgtgaaggccatggaggagatgaacggcaaggacctggagggcgagaacatcgagatcgtgttcgccaagccccccgaccagaagagaaaggagagaaaggcccagagacaggccgccaagaaccagatgtacgacgactactactactacggccccccccacatgcccccccccaccagaggcagaggcagaggcggcagaggcggctacggctacccccccgactactacggctacgaggactactacgactactacggctacgactaccacaactacagaggcggctacgaggacccctactacggctacgaggacttccaggtgggcgccagaggcagaggcggcagaggcgccagaggcgccgcccccagcagaggcagaggcgccgccccccccagaggcagagccggctacagccagagaggcggccccggcagcgccagaggcgtgagaggcgccagaggcggcgcccagcagcagagaggcagaggcgtgagaggcgccagaggcggcagaggcggcaacgtgggcggcaagagaaaggccgacggctacaaccagcccgacagcaagagaagacagaccaacaaccagaactggggcagccagcccatcgcccagcagcccctgcagggcggcgaccacagcggcaactacggctacaagagcgagaaccaggagttctaccaggacaccttcggccagcagtggaagtag

SEQ ID NO: 60460 - DNA, 1689 bp, Artificial Sequence
  derived and/or modified sequence
atggcaactgaacacgtgaacgggaacgggacagaagagcccatggatacgacttcagccgttatccattccgaaaactttcaaactcttctggatgctggcctccctcagaaagttgctgagaaattggatgagatctacgtggcgggcttggttgctcactcagaccttgacgagcgcgcaatcgaggctctcaaggaatttaacgaagatggagcactggctgttctgcagcagtttaaggacagcgacctgtcacatgtgcaaaacaaaagtgcttttctctgtggggtgatgaaaacatacagacagcgtgagaagcaggggacaaaggtcgccgacagcagtaaaggaccggacgaggccaagattaaggctttgctggagcggacagggtacacactggatgtgacaactggccaaagaaaatatggaggaccacctcccgactcagtgtactccggtcagcagccctcagtgggcacagaaatcttcgtcggcaagatcccgagagaccttttcgaggacgagctggtccccctcttcgagaaggccggtccaatttgggatctgaggctcatgatggatccattgacgggccttaataggggatatgcgttcgtgaccttctgcacgaaggaggccgcacaggaggctgtgaaactgtacaataaccatgaaatacgctccggcaaacacattggcgtatgtatcagcgtcgccaacaacagattgtttgtcggatctatccctaagtctaaaaccaaggagcagattctggaagaattctctaaagttaccgaggggctaactgatgtgattctataccatcagccggacgataaaaaaaaaaaccgcggtttctgtttcctagagtacgaggaccacaagaccgcagcccaggctcggagacgattaatgtctggtaaggtcaaggtttggggaaacgtcgggacggtggaatgggcagaccctatcgaggaccctgaccctgaggtgatggctaaagttaaagtgttgttcgtgagaaacctggccaacacagttaccgaagaaatcctggaaaaggcgttcagccagtttgggaaattggagcgcgtcaagaaactgaaggactacgccttcatccatttcgatgagagagatggcgctgtgaaagctatggaggagatgaatggaaaggacctggagggggagaatatagagatcgtctttgccaaaccccctgaccagaaacgaaaagagagaaaggcccagagacaggccgctaaaaaccagatgtatgacgactactattattacgggccgccccacatgcctcctcctacacggggacgaggcaggggaggacgaggtgggtatgggtaccctcctgattactacggttatgaagattactacgactactatgggtatgactaccacaattacaggggcggttatgaggacccctactacggatacgaggatttccaggtgggcgcacggggacgaggagggagaggcgctaggggggcagcaccaagccgtggaagaggggctgcgcctccaagaggcagggctgggtacagccagcgcggcgggccgggatcggctaggggcgtgcgcggcgctcgcggcggcgcccagcaacaaaggggccgcggccagggtaaaggagtggaggccggccccgatcttctccagtag

SEQ ID NO: 60461 - DNA, 1872 bp, Artificial Sequence
  derived and/or modified sequence
atggccaccgagcatgtgaatgggaacggtaccgaggaacctatggatactactagtgcagtcatacactctgagaatttccagactctgctagacgccggactacctcagaaagttgccgaaaaactggacgaaatatatgtcgcgggtctggtggcgcactccgatctcgacgagagggccatcgaggcattgaaggaattcaacgaggacggagctctggctgtgctgcaacaattcaaagactccgatctcagtcacgtgcagaataaatcagcatttctgtgtggcgtgatgaagacctacaggcagcgggagaagcagggtacaaaggtcgccgacagcagcaaaggtccggacgaagccaagatcaaggctctgcttgagcgaactggctacacattggacgtcacaaccggccagagaaagtatggcgggccacctccggactctgtgtactctggacagcagccgtcagtggggactgagatcttcgtcggaaaaataccaagagacctgttcgaggatgagctggtgcccctgtttgaaaaagccgggcctatatgggatttacggctcatgatggaccccttgaccggtcttaatcgcggctatgcatttgttaccttttgtacaaaggaggcagcgcaggaggcagtcaagttgtataataatcatgagatcaggtccggaaaacacatcggggtgtgtataagcgttgctaataaccggctgtttgtaggatctataccaaaatccaagaccaaggagcagattttggaagagttctccaaggttacggagggattgacggacgtgattctctaccaccagcccgacgacaagaagaagaatcgcggcttctgctttctggaatacgaagatcacaagaccgccgctcaggcccgtagaagactcatgtccggaaaggtgaaggtttggggcaatgtaggcaccgtggagtgggccgatccgattgaagatcccgaccctgaggtgatggctaaagtcaaggttctattcgtgaggaatctcgcaaatactgtgaccgaggaaattctggagaaagcttttagtcagtttgggaaactcgaacgggtgaaaaagctgaaggactacgcgttcattcattttgatgaacgggatggcgccgtcaaggcgatggaggagatgaatggaaaagatctggagggagagaatatagagatagttttcgctaagcctcctgaccagaaacgcaaggaacggaaagcacaaagacaggccgccaagaatcagatgtacgatgactactattactacggccctccccacatgcccccaccaactcggggacgcggccggggagggcgaggaggttatggctatcccccagattattacggctacgaagattattacgattattatggatatgactaccacaattaccgcggaggatacgaggacccatattacggctacgaggattttcaagttggagccaggggaaggggaggcaggggcgctcgtggagcggcaccctctaggggacggggagccgcaccaccacgtgggcgcgcagggtacagccaacgtggtggacccgggagcgcacgaggcgtacgtggtgcacgcgggggggcgcagcagcaaagggggaggggggtgcggggcgctcggggcggccgcggaggaaacgtgggcggcaagcgtaaggccgacggctacaatcagccagattctaaacggcgccaaactaacaaccagaactggggaagtcaaccaatagcacagcaaccccttcaaggaggcgatcactctggtaattacggatataaatcagagaatcaggaattctatcaggacacatttggacagcagtggaagtag

SEQ ID NO: 60462 - DNA, 1689 bp, Artificial Sequence
  derived and/or modified sequence
atggccacagaacatgtgaatggaaatggaacagaggagcccatggacaccaccagcgctgtgatccacagcgagaacttccagaccctgctggatgctggcctgccccagaaggtggccgagaagctggatgagatctacgtggccggcctggtggcccacagcgacctggatgagcgggccatcgaggccctgaaggagttcaatgaagatggagccctggccgtgctgcagcagttcaaggacagcgacctgagccacgtgcagaacaagagcgccttcctgtgtggggtgatgaagacctaccggcagcgggagaagcagggcaccaaggtggccgacagcagcaaaggaccagatgaggccaagatcaaggccctgctggagaggacaggctacaccctggatgtgaccaccggccagaggaaatatggaggccccccaccagattctgtgtacagcggccagcagcccagcgtgggcacagagatctttgtgggcaagatcccccgggacctgtttgaagatgagctggtgcccctgtttgagaaggccggccccatctgggacctgcggctgatgatggaccccctgaccggcctgaacagaggctacgcctttgtgaccttctgcaccaaggaggccgcccaggaggccgtgaagctgtacaacaaccacgagatccgcagcggcaagcacatcggcgtgtgcatctctgtggccaacaacagactctttgtgggcagcatccccaagagcaagaccaaggagcagatcctggaggagttcagcaaggtgacagagggcctgacagatgtgatcctgtaccaccagccagatgacaagaagaagaacagaggcttctgcttcctggagtatgaggaccacaagacagctgcccaggcccggcggcggctgatgtctgggaaggtgaaggtgtggggcaatgtgggcaccgtggagtgggccgaccccattgaagatcctgaccctgaggtgatggccaaggtgaaggtgctgtttgtgaggaacctggccaacacagtgacagaggagatcctggagaaggccttcagccagtttgggaagctggagcgggtgaagaagctgaaggactatgccttcatccactttgatgaaagagatggagctgtgaaggccatggaggagatgaatggcaaggacctggagggagaaaatattgaaattgtgtttgccaagcccccagaccagaagaggaaggagaggaaggcccagaggcaggccgccaagaaccagatgtatgatgactactactactacggccccccccacatgcccccacccacccggggccggggccggggcggccggggcggctacggctaccccccagactactacggctatgaggactactatgactactacggctatgactaccacaactacagaggaggctatgaggacccctactacggctatgaggacttccaggtgggcgcccggggccggggcggccgcggggcccggggggccgcccccagccggggccgcggggccgccccaccccggggccgggccggctacagccagagaggaggccctggcagcgcccggggcgtgcggggggcccggggcggggcccagcagcagaggggccggggccagggcaagggcgtggaggccggccctgacctgctgcagtag

SEQ ID NO: 60463 - DNA, 1872 bp, Artificial Sequence
  derived and/or modified sequence
atggccacagaacatgtgaatggaaatggaacagaggagcccatggacaccaccagcgctgtgatccacagcgagaacttccagaccctgctggatgctggcctgccccagaaggtggccgagaagctggatgagatctacgtggccggcctggtggcccacagcgacctggatgagcgggccatcgaggccctgaaggagttcaatgaagatggagccctggccgtgctgcagcagttcaaggacagcgacctgagccacgtgcagaacaagagcgccttcctgtgtggggtgatgaagacctaccggcagcgggagaagcagggcaccaaggtggccgacagcagcaaaggaccagatgaggccaagatcaaggccctgctggagaggacaggctacaccctggatgtgaccaccggccagaggaaatatggaggccccccaccagattctgtgtacagcggccagcagcccagcgtgggcacagagatctttgtgggcaagatcccccgggacctgtttgaagatgagctggtgcccctgtttgagaaggccggccccatctgggacctgcggctgatgatggaccccctgaccggcctgaacagaggctacgcctttgtgaccttctgcaccaaggaggccgcccaggaggccgtgaagctgtacaacaaccacgagatccgcagcggcaagcacatcggcgtgtgcatctctgtggccaacaacagactctttgtgggcagcatccccaagagcaagaccaaggagcagatcctggaggagttcagcaaggtgacagagggcctgacagatgtgatcctgtaccaccagccagatgacaagaagaagaacagaggcttctgcttcctggagtatgaggaccacaagacagctgcccaggcccggcggcggctgatgtctgggaaggtgaaggtgtggggcaatgtgggcaccgtggagtgggccgaccccattgaagatcctgaccctgaggtgatggccaaggtgaaggtgctgtttgtgaggaacctggccaacacagtgacagaggagatcctggagaaggccttcagccagtttgggaagctggagcgggtgaagaagctgaaggactatgccttcatccactttgatgaaagagatggagctgtgaaggccatggaggagatgaatggcaaggacctggagggagaaaatattgaaattgtgtttgccaagcccccagaccagaagaggaaggagaggaaggcccagaggcaggccgccaagaaccagatgtatgatgactactactactacggccccccccacatgcccccacccacccggggccggggccggggcggccggggcggctacggctaccccccagactactacggctatgaggactactatgactactacggctatgactaccacaactacagaggaggctatgaggacccctactacggctatgaggacttccaggtgggcgcccggggccggggcggccgcggggcccggggggccgcccccagccggggccgcggggccgccccaccccggggccgggccggctacagccagagaggaggccctggcagcgcccggggcgtgcggggggcccggggcggggcccagcagcagaggggccggggcgtgcggggggcccggggcggccggggcggcaatgtgggcggcaagaggaaggcagatggctacaaccagcctgacagcaagaggcggcagaccaacaaccagaactggggcagccagcccatcgcccagcagcccctgcagggcggggaccacagcggcaactacggctacaagtctgagaaccaggagttctaccaggacaccttcggccagcagtggaagtag

SEQ ID NO: 60464 - DNA, 1689 bp, Artificial Sequence
  derived and/or modified sequence
atggccaccgagcacgtgaacggcaacggcaccgaggagcccatggacactacttccgcagttattcatagtgagaatttccagactttactggatgctgggttgccccaaaaggtggctgagaagcttgatgaaatctacgtggccggcttggtcgcacattccgacttggatgagcgagctatcgaagctctgaaagaattcaatgaagatggagccttagccgttctgcagcagtttaaagacagcgacctgtcccacgtccagaataaaagcgcgtttttgtgcggggttatgaagacttataggcagcgagaaaagcaaggcactaaagtggccgacagctccaagggcccagatgaagcaaagataaaagcgctcttggagcgcacgggctacaccctggacgtcacaactggccagagaaagtacggagggccccctcctgatagtgtttacagtggacagcaaccatctgtcggtacggagatctttgtcggcaagatccctagagacctctttgaggacgagctggtgccactgttcgagaaggcgggccccatttgggaccttagactcatgatggacccgctgaccggtcttaatcggggctacgcattcgtgactttctgcaccaaggaagccgcgcaagaggccgttaaattgtacaacaaccacgagatacgatctggcaaacacattggagtatgtatctccgttgcaaacaatcgtctctttgtgggatcaatcccgaaaagcaagaccaaggaacagatcttggaggagtttagcaaagtgactgaaggactgacagacgttatcttgtaccaccagccggacgataagaagaaaaatcgaggcttttgttttctggagtatgaggaccataagactgcggcacaggctcgccggcgcctgatgtccggaaaagtgaaagtgtggggcaacgtggggaccgtagaatgggcggatcccatcgaggatccggaccctgaggtgatggctaaagtgaaagtgttgtttgttcggaacttagcaaacactgtgacagaagaaattctagaaaaggctttttcccagtttggaaagctggaacgagttaaaaagctaaaggactatgcctttatccacttcgacgaacgggacggcgctgttaaggcaatggaggagatgaatggtaaagacctggaaggggagaatatcgagatcgtgtttgccaaacccccggaccagaagcgaaaggagcgtaaggcacagcgacaagctgccaaaaaccagatgtatgacgattattattattacggtccgcctcatatgccccccccaaccagaggacgtggcagaggcggcaggggaggatatgggtatccacccgattattacggatatgaagactattacgattactatgggtacgattaccataactatcgtgggggatatgaagatccctactatggctacgaagacttccaggtgggcgctagaggcagaggggggcggggagctagaggggccgccccatctcgggggagaggggccgccccacctagggggcgagctggatactcacagcgtggcggtccagggtccgctcggggagtgcgtggcgcgcggggaggggctcagcaacagaggggcagagggcagggcaaaggggtggaggctgggccggacctcctccaatag

SEQ ID NO: 60465 - DNA, 1872 bp, Artificial Sequence
  derived and/or modified sequence
atggccaccgagcacgtgaacggcaacggcaccgaggagcccatggacacaacttccgctgtcatacattcagagaatttccagaccctgctagatgccgggttgcctcagaaagttgccgaaaagctggacgaaatttacgtcgcaggtctcgtcgcgcactccgacttagatgagcgggccatcgaggcattgaaggagttcaatgaggatggagctctggcagtcctgcaacagtttaaagacagcgatctgagtcatgtgcagaacaaatccgccttcctgtgtggcgtgatgaaaacctacagacaaagggagaagcagggtaccaaggtcgctgacagctctaaggggcctgacgaagctaagattaaggcgctgctggaaaggacaggctacacactcgatgtgacaactggccagagaaaatacgggggtccaccacccgacagcgtgtatagcgggcagcagccctcagtgggcacggagatcttcgtgggtaagattccaagagatctgtttgaggacgagttagtccccttgttcgagaaggcgggtcccatctgggaccttaggctcatgatggaccctctgactggccttaatcggggttacgcgttcgtaacgttttgcacaaaggaggctgcacaagaggccgtcaaactgtataataatcacgagattcggagcggcaaacacattggggtatgtatatctgtggctaacaacaggctgtttgtcggttccattccgaagtctaagacaaaagagcagatcctcgaagaattcagcaaagtgacagagggcttgaccgacgtgattctttatcatcaacccgacgacaagaagaagaaccgcgggttctgttttctcgagtatgaggatcataagactgccgctcaggccaggaggagactgatgagcggcaaggtgaaagtatggggcaatgtaggtacggttgaatgggccgacccaattgaggatcccgatccagaggtcatggctaaagttaaagtcttgttcgtgcggaacttagcaaataccgtgactgaagagatactggagaaggcattcagtcaatttggaaagttggagcgtgtgaagaagctgaaagactacgctttcattcatttcgacgaaagagatggcgcagtgaaagccatggaagaaatgaacggcaaggatttagagggagaaaatatcgaaattgtgttcgcaaagcctcccgatcagaagcgaaaagaacggaaggcacagcgtcaggctgccaaaaaccagatgtatgacgactactattactatgggcccccccacatgccgcccccaacgcgcggacgggggcggggaggcagaggcgggtacggatatcctcccgattactatggatatgaagattattacgattactatggttacgattaccacaattaccgaggcggatatgaagatccatactatgggtatgaggattttcaggtaggcgcccgaggacgaggaggcaggggagcaagaggagccgctccctcccgaggcaggggggcagccccaccacgcggaagagccggttactcccaaaggggcggaccaggctctgcgaggggcgtgcgcggggcaaggggcggcgcccagcaacagagaggcaggggcgtccgaggcgccagagggggtcgggggggtaatgtcggtggtaaaaggaaagctgacggttataatcagcccgattccaaacgacgccagactaacaaccagaactgggggagtcaacctatcgcacaacagcccctgcagggcggtgaccactctggcaattacggctataagtctgaaaatcaagagttttaccaggatacttttggacagcagtggaagtag

SEQ ID NO: 60466 - DNA, 1689 bp, Artificial Sequence
  derived and/or modified sequence
atggcaaccgagcatgtcaacgggaatggcacggaggagccaatggatacaacatccgccgtgattcattctgaaaacttccagaccctgctggacgctggtttgccacagaaggtcgcagagaagctcgacgaaatctacgtagcagggcttgtagcgcatagtgatctagacgagcgggcaatcgaggccttgaaagaatttaacgaggatggcgcactggccgtccttcagcagttcaaggacagcgatttgtcccatgtgcagaacaagtctgcttttctttgcggcgtaatgaagacctataggcagcgagaaaagcagggtacaaaggtggcagactcttctaaaggccctgacgaagcaaagattaaggccctcctggagaggaccggttacactttggacgtgaccaccggccagcgcaaatatggcggacctcctccagatagtgtttattcaggacagcagccttccgtgggaacagagatctttgtagggaaaatcccgcgtgatcttttcgaggacgagctggtgcccttatttgagaaagctggaccaatctgggacctcagattgatgatggatccccttacagggctaaacagaggatacgccttcgttacgttctgcacgaaggaagcggcacaagaggctgtaaaactgtataacaatcacgagattcgttccgggaagcacatcggcgtgtgtatcagcgtcgcgaataatagattgtttgtggggtccatcccaaagtccaagactaaagaacaaattctggaggaattctctaaagtcacagagggtttgacagacgtcatcctctatcaccaacctgacgacaagaagaaaaacagggggttttgcttcctcgaatatgaggatcacaaaacagccgcacaagcacgccgacgcctcatgtcaggcaaagtcaaggtctggggcaatgtgggcacagtggaatgggctgatccaatagaagatccagaccccgaggtaatggccaaggtgaaggttctgtttgtgagaaatctggcgaatacagtcactgaagaaatactcgaaaaggcttttagccagttcgggaaattagagcgagtgaagaagcttaaggattacgcgttcatccacttcgatgaacgggatggcgcagtgaaggccatggaggagatgaatgggaaggacttggagggcgaaaatatcgagattgtcttcgccaaacctcctgaccaaaagcgcaaagagcgcaaggcacagcgacaggcagctaagaatcagatgtacgatgactattattattacggccctccacatatgccgcctccaaccaggggcagaggcaggggaggtaggggcggttacggctacccgcctgattactacggatacgaagactactacgactactatgggtacgattaccacaactaccgaggcggatacgaggacccttactatggctatgaagatttccaggtcggcgcacgcggacgagggggaaggggcgctagaggagcagccccatccagaggccgaggggcagccccacctagggggagggccggatactctcaacggggtgggccaggaagcgctcgtggagtccgtggcgcacgtggtggggctcagcagcagcgaggcaggggtcaggggaagggggtggaagctgggccagacctgctccagtag

SEQ ID NO: 60467 - DNA, 1872 bp, Artificial Sequence
  derived and/or modified sequence
atggcgactgagcatgttaacggaaatggtactgaagaacctatggatactacatccgccgtgatccacagtgagaatttccaaacactgcttgatgctggtttaccccaaaaggtcgcggaaaagctggatgaaatctacgtcgccggtcttgtggcccacagcgacctggatgaaagggcgatcgaggccttaaaggagtttaatgaggacggcgctctcgcagtgttgcagcaattcaaagatagtgatttgagtcatgtgcagaataagtcagcattcttgtgcggggttatgaagacctatcgacagcgggagaagcaggggacaaaggttgctgatagctcgaaggggcctgatgaggccaaaatcaaagcacttcttgaacgaaccggatataccctggatgtaactaccggacagagaaagtacggtgggcctcctccagatagcgtttatagcggtcagcaaccctctgtaggaaccgaaatttttgtgggaaaaatcccccgagatctttttgaagacgagctggtaccgttattcgagaaagcaggacctatttgggacctgaggttgatgatggatccactcactggattgaaccgcggttatgctttcgttacattttgtaccaaagaagcagcccaggaggcagtgaaactgtataataatcacgaaattagatccggtaaacacataggtgtctgtatctccgtggctaataacaggctgtttgtgggttccattcccaagagcaagaccaaggagcagattctcgaagagttcagcaaggtcactgaaggactaaccgacgttatcctctaccaccagcctgatgataaaaagaagaataggggattctgttttctggaatacgaggatcacaaaacagcagctcaagcgaggagaagattaatgtctggcaaagttaaagtgtggggcaacgtggggactgtggagtgggcagatcctatcgaggatcccgaccctgaggtgatggctaaagtgaaggtgctgttcgtacgtaatctggccaatactgtcaccgaagaaatcctggaaaaagctttcagccagtttggaaaactcgaaagggttaagaagctgaaagattatgcctttatccatttcgatgaacgtgacggagcagtgaaagctatggaggaaatgaacggtaaggacttagaaggtgaaaatattgaaatagtgttcgcaaaacccccagaccagaagcggaaggagaggaaagctcagcgccaggccgctaagaatcaaatgtatgatgactattactactacggacctcctcacatgccgccacccactcgcggacgaggcaggggcggtaggggtggatatggttaccctccagactactatggctacgaggattactacgattattatggctacgattaccacaactatcggggtgggtatgaagacccctattatggctatgaggatttccaggtcggtgcacgcggaagggggggtcgaggagctcgtggggctgctccctcacgtggaagaggggcagctccccctcggggacgtgctggctactcccaacgcggtggtcctggcagtgcgagaggcgtccggggtgcaagaggaggcgcacagcagcagcggggtcgcggagtgcggggagccagggggggtagggggggtaatgtcggtggcaaacgcaaagccgacggctacaatcagccagactccaagcgccgacagactaataaccagaactggggaagtcaacctatcgcacagcagccgctgcagggaggggaccatagcggaaattacggatataagagtgaaaaccaggaattctatcaggatacatttgggcagcagtggaagtag

SEQ ID NO: 60468 - DNA, 6443 bp, Artificial Sequence
  derived and/or modified sequence
cgcgggggcgcgcgcgcgcaccgggagcgcgctcggaggcgagtggaactggatcgggtttgctgccagcggcgtgagcttcggccgccattttacaacagctccactcgcgccggacacagggagcagcgagcacgcgtttcccgcaacccgataccatcggacaggatttctccgcctcagcccaacggggagatctctggaaacatggctacagaacatgttaatggaaatggtactgaagagcccatggatactacttctgcagttatccattcagaaaattttcagacattgcttgatgctggtttaccacagaaagttgctgaaaaactagatgaaatttacgttgcagggctagttgcacatagtgatttagatgaaagagctattgaagctttaaaagaattcaatgaagacggtgcattggcagttcttcaacagtttaaagacagtgatctctctcatgttcagaacaaaagtgcctttttatgtggagtcatgaagacttacaggcagagagaaaaacaagggaccaaagtagcagattctagtaaaggaccagatgaggcaaaaattaaggcactcttggaaagaacaggctacacacttgatgtgaccactggacagaggaagtatggaggaccacctccagattccgtttattcaggtcagcagccttctgttggcactgagatatttgtgggaaagatcccaagagatctatttgaggatgaacttgttccattatttgagaaagctggacctatatgggatcttcgtctaatgatggatccactcactggtctcaatagaggttatgcgtttgtcactttttgtacaaaagaagcagctcaggaggctgttaaactgtataataatcatgaaattcgttctggaaaacatattggtgtctgcatctcagttgccaacaataggctttttgtgggctctattcctaagagtaaaaccaaggaacagattcttgaagaatttagcaaagtaacagagggtcttacagacgtcattttataccaccaaccggatgacaagaaaaaaaacagaggcttttgctttcttgaatatgaagatcacaaaacagctgcccaggcaaggcgtaggttaatgagtggtaaagtcaaggtctgggggaatgttggaactgttgaatgggctgatcctatagaagatcctgatcctgaggttatggcaaaggtaaaagtgctgtttgtacgcaaccttgccaatactgtaacagaagagattttagaaaaggcatttagtcagtttgggaaactggaacgagtgaagaagttaaaagattatgcgttcattcattttgatgagcgagatggtgctgtcaaggctatggaagaaatgaatggcaaagacttggagggagaaaatattgaaattgtttttgccaagccaccagatcagaaaaggaaagaaagaaaagctcagaggcaagcagcaaaaaatcaaatgtatgacgattactactattatggtccacctcatatgccccctccaacaagaggtcgagggcgtggaggtagaggtggttatggatatcctccagattattatggatatgaagattattatgattattatggttatgattaccataactatcgtggtggatatgaagatccatactatggttatgaagattttcaagttggagctagaggaaggggtggtagaggagcaaggggtgctgctccatccagaggtcgtggggctgctcctccccgcggtagagccggttattcacagagaggaggtcctggatcagcaagaggcgttcgaggtgcgagaggaggtgcccaacaacaaagaggccgcgggcagggaaaaggggtcgaggccggtcctgacctgttacaatgaagactgacttgctatgtgggattacaccagaagcttgcagtggagtaatggtaaggaaatcaagcaaccttaaatatgtcggctgtataggagcatattctattgcagaagaccttcctatgaagatcatggaatcaaatacgggacattgaactaatacttggactttgatatgaatttctttaacaattttctctgcagtgcaagttattaaactaaagctactctattttcaaaatgtgttccaacagaaatccttcataactcctagcatggtatcttaataaagaataaagttcttttaaaaatctgctctaagtagatttttccccttttttaaattaaggatcccaacagtggtattttgaaatattctcttgaatttgtgcatttaaattttattgcagtggtatagatgaatgccactgatggtatccttaaattttatttctgctcaccaaggttaatcatgattgtctatatcttttttatagtgatcacttttgaattgtgttcagatatgcagtttcaggtgtaatcatcagagctggttagtcaggcattccagatagtggttcttttcagaacctttttaaaagggttggttaactacctcagtagcagaggattgaactataccctgtctgtactgtacatagaaaatctttgtagataaaagcaaggcttgttaaatatgatatgagggtaagattttaatataccaaatgtaacattcttagttgcctttagtttcagaggcttgtaagacttcctcatgaccatcataacaggccttgcttttgtcgtattttgtggctgaaaaagcagccttgcttcttcagatattgtagttatttggatgtataatagtttagcaagatgttacttttgtaagacatcagatgttcaaaaaagtgcatccgaacttgtactaaatactgcagtgtccctttataaaaagtcagactaaaactgacaattgtacagcgaagcctgacatttggatattttgaagttttttcataaatcatagaaattagtatatggctgtagtttagctttttaggtaaaaggtatgtttcattagtgcatttcttcctgctgatcactgtaaacatgtgaatcagctttccatttcttatgcaggtcatgataacttgtagagtagagtacaatcatttgtgctatgtttttaattttctaaagcaccttgatgacagtgagtgtccagtggtgaagcatcctctattgaaccaccctcaaaaatttttttgccaagtcctaagttgatagcttaaagtaaaaagtgaaaattatagtttcattaggacttggtgtaaagaaatcccctccccccttccccaaagggatactgcagttatatcacatacccaataggcaccacgatgaagatcagagcttatacttaattaaggttttatacacaccagttccccagtaaatgcaaatttaacaagaaaatcagacatgtcatatgttcaaaatgctcatggcaaacaatcattttgcattcctgcaaataaaattgttttatactgtaagctggaggcgagtgtaacttatttttgtaataaagtttttattttttttatgtgtcattaatataaatgtgtgttagtgtagaaatcttctggtttaaaaacttagaattgcacacatttcagtatgtttatttgtacttacataattttagaatagtggttgccaatagcctgtatgtttcacattaattggttttttgttatctaaataaatcattttagtatgttgtatgtcagttactgggatagctgggacatagagtgtaatttaaaatttgtcaataagtattcattggaatatatgtaaatgtgccttgccggttattgaaacttatctacaaaatgagtatggggtgacaaaaattagttcctggtgcttaatgaaactttctgccactgattttatatattaccccgtgcttttttaaagtacatctctctcaaaacttagtgtaagtttgagggctacacaaaacatttacatttcattctaacataatgaatataataggttgtggaaagtgggtaaactaaatgtagccttcagtaaaattgaatctcagtgtaatccttggtgctggcatttctcagttccgaggagttaaatgatcccatctaagaggtcattgccatgcctattggcactttactgtcatagcatttttaagggacactgtcaaggtgtttaagttctcagaattacttgttgggattttaggacaggtttgtttacttaaagtaagaactgcattgtcaaagttgaaagaggaacacttttgtgagttcacaaatgtgttcttaagaaaacattaaaatatggagctctgggttttcaagactatttggcattcttaatttggggacttgggagggaaactgataaaaagaaattgaagaattgatggttatacttaaagaagggtaatgtaaacagtggtgatgaaatatatacacatcaagtgaaattacttgacagtgttcatttgaatgactttgaattcaagccattataattacttttaaaattaaatatcatttgcactgttctgataatgggtgcagtttttgagcaatataatcagagctaaatatgcatgtagtgattagtgatgtgaacaattaacgttctgagaagaaatactaactgtggtattttcaaacttaaatttctgtagtaaaatcagtatcaaagtcttatcagatcaaggaaaaacaggcaatgcatataaacatacttttgaatgttgtgtggcctataaagcaataatgcaatttatatggaatgtcatgggatatgagaaatggaaatgcaaaaataactaatcctttagtaaaaatgtcaacatgttaaagggggaatgttaactaatgtaggttattgctatttgtgatttgtttatgggttcttggctttgacagcttcaaagaatggacagtgataagttaaaagaaattttgtatattgtcaaggaaagggtcttaaatccgagtcaagtcccttccttggggtaaaaaatgtattcttaaagcattctgatgttaaaaagaaaacttaagttatctaaccaaaacagacgcaagattttgtttctgcagactacttggcaatcaaaagtgatcataaatttaggttatcagttttcagaaagttgctttgtgagaaaattttgttagatatattctcccaagcatgctttttgtggaaggttttcagccattgccactgaatcagatgttaaaaatgaagggaaaattgagtgtgcacacacacaactgttgtacactcatgattgcagtttttagcttaagaaacttttctaccagttactgtgaatctgacttaaaatgtaaagtttcctcatgataaaataggaacaacatagaaatggattgatggggtgatctgagttattgtatataaaagtttttaaagaatagaatgaacatcaagctagataggcaaaaattgacacattcagaacagcttttttgactgcgaagccaaaagttgtcagaaacagcaaaagatcccttattattacagagtattttacgtagtctctattttaaggagagaaattaaatagaagggcttcatgcatttaggggagggtgctaaaacttctcaagttcgtcaaacttacaggaatacccaccatgatcattttctctctaattatgtataccacaaaattttcatctggccataggaattcactggtgggtgtaaaattaatgactaaagaaattaagtgacaaatacataaaagaaacagacttgtggggatattgttttaaggtgtattaattactcagtgatgataccactcaatagggcatgccactacttttcttaagatgctaattatgaagcagtgctcacaggcattttttaactagcaaattagtagatggacttttggggtctgtcactttttaaaagtatttaagacttaaattctattagcaccacagtctgccttcagtaatacacctaaaatatttttcaggaccagaagcattcagtttgaaaatttgcagatgcaaaccagtattattactaacgctctgggtcaaagattaggtttttaatattaacagtagtctggtaaatatttagaagtctggcattgagaaacaaaagcttgtacctgactagtatttttatttaaaaaaattagttctgttagcttatttaaattgtgttttatttatccgtagaatttatatttatttcattcctttcatctcactgaaaactgtctgcaggccctttgatttggattagatgtgtgaagtactgtcttttgccaaaaacctcaaattacctgttcttttcaacgtagtgggtttgtgcttgtttggagatcagttcaaaaactatctgtactatctgtactgcctctgatgttaagattttatgtatagcataaggaagctagctctgactatattttcctaagaataaagacctatttttgtagc

SEQ ID NO: 60469 - DNA, 3023 bp, Artificial Sequence
  derived and/or modified sequence
ctgggggaccgggccgagagtgcgagcgagcgagggagggagtgagggagcgtgcgagccagaaggggaaaggcggccactcgtgcctgagcgaccgcagaggggagtgggagcagtggggtaaaggagcggggggcgggaataagaaaggccgagagaaggcggacagaggctagtggtggtggtggtggtagggggagaaggaggagctggaggagggcaggggctgagggagtgagtgaagcggacgcgcgagggaggggagggaagggaagggaagggaagggggggtcacgcgggggcgcgcgcgcgcaccgggagcgcgctcggaggcgagtggaactggatcgggtttgctgccagcggcgtgagcttcggccgccattttacaacagctccactcgcgccggacacagggagcagcgagcacgcgtttcccgcaacccgataccatcggacaggatttctccgcctcagcccaacggggagatctctggaaacatggctacagaacatgttaatggaaatggtactgaagagcccatggatactacttctgcagttatccattcagaaaattttcagacattgcttgatgctggtttaccacagaaagttgctgaaaaactagatgaaatttacgttgcagggctagttgcacatagtgatttagatgaaagagctattgaagctttaaaagaattcaatgaagacggtgcattggcagttcttcaacagtttaaagacagtgatctctctcatgttcagaacaaaagtgcctttttatgtggagtcatgaagacttacaggcagagagaaaaacaagggaccaaagtagcagattctagtaaaggaccagatgaggcaaaaattaaggcactcttggaaagaacaggctacacacttgatgtgaccactggacagaggaagtatggaggaccacctccagattccgtttattcaggtcagcagccttctgttggcactgagatatttgtgggaaagatcccaagagatctatttgaggatgaacttgttccattatttgagaaagctggacctatatgggatcttcgtctaatgatggatccactcactggtctcaatagaggttatgcgtttgtcactttttgtacaaaagaagcagctcaggaggctgttaaactgtataataatcatgaaattcgttctggaaaacatattggtgtctgcatctcagttgccaacaataggctttttgtgggctctattcctaagagtaaaaccaaggaacagattcttgaagaatttagcaaagtaacagagggtcttacagacgtcattttataccaccaaccggatgacaagaaaaaaaacagaggcttttgctttcttgaatatgaagatcacaaaacagctgcccaggcaaggcgtaggttaatgagtggtaaagtcaaggtctgggggaatgttggaactgttgaatgggctgatcctatagaagatcctgatcctgaggttatggcaaaggtaaaagtgctgtttgtacgcaaccttgccaatactgtaacagaagagattttagaaaaggcatttagtcagtttgggaaactggaacgagtgaagaagttaaaagattatgcgttcattcattttgatgagcgagatggtgctgtcaaggctatggaagaaatgaatggcaaagacttggagggagaaaatattgaaattgtttttgccaagccaccagatcagaaaaggaaagaaagaaaagctcagaggcaagcagcaaaaaatcaaatgtatgacgattactactattatggtccacctcatatgccccctccaacaagaggtcgagggcgtggaggtagaggtggttatggatatcctccagattattatggatatgaagattattatgattattatggttatgattaccataactatcgtggtggatatgaagatccatactatggttatgaagattttcaagttggagctagaggaaggggtggtagaggagcaaggggtgctgctccatccagaggtcgtggggctgctcctccccgcggtagagccggttattcacagagaggaggtcctggatcagcaagaggcgttcgaggtgcgagaggaggtgcccaacaacaaagaggccgcggggtacgtggtgcgaggggtggccgcggtggaaatgtaggaggaaagcgcaaagctgatgggtacaaccagccagattccaagcggcgccagaccaataatcagaactggggctcccaacccattgctcagcaaccgctccaaggtggtgatcattctggtaactatggttacaaatctgaaaaccaggagttttatcaggatacttttgggcaacagtggaagtagaaacagtagggcctctgtaaaattggagactgataggttgatcagaaactcaccctaaatctgaacgggtgccgctataatttgtgacatctggcaagatttccctttatgtatatattttaacaatccgcttggacacgaacaaagccacacttctaactgcttctggcgaactgattttatttttaatttttttcaataaagatattcttagatactgaaagaaatagttaatgagtttgcatttgtgcttgagaaaatttggctcaagtccatttggctgtagtgtcaacgatgtttccagtagtgtttagatttggtgtcttcaaaggtagttgattaaaaccaagtgtgtctttaatatcttgtatcagaataactttgtatgttaccaacttaaattgctagaataaggtaaattgatacacaactgctatttttaatttagaactttgacctaatttgggttttcaaaaccattttggctacttgtattctttatgctgttgtttatttcaataaaaaattcacacctaaatgtatacttactaaaattgtgtttacaattcgtttttcacaaaatttcctgcaaatttggttcaaattgtatagcatgtcaaggccaattaaagggttttgtgccttgttaa

SEQ ID NO: 60470 - protein, 562 aa, Artificial Sequence
  derived and/or modified sequence
MATEHVNGNGTEEPMDTTSAVIHSENFQTLLDAGLPQKVAEKLDEIYVAGLVAHSDLDERAIEALKEFNEDGALAVLQQFKDSDLSHVQNKSAFLCGVMKTYRQREKQGTKVADSSKGPDEAKIKALLERTGYTLDVTTGQRKYGGPPPDSVYSGQQPSVGTEIFVGKIPRDLFEDELVPLFEKAGPIWDLRLMMDPLTGLNRGYAFVTFCTKEAAQEAVKLYNNHEIRSGKHIGVCISVANNRLFVGSIPKSKTKEQILEEFSKVTEGLTDVILYHQPDDKKKNRGFCFLEYEDHKTAAQARRRLMSGKVKVWGNVGTVEWADPIEDPDPEVMAKVKVLFVRNLANTVTEEILEKAFSQFGKLERVKKLKDYAFIHFDERDGAVKAMEEMNGKDLEGENIEIVFAKPPDQKRKERKAQRQAAKNQMYDDYYYYGPPHMPPPTRGRGRGGRGGYGYPPDYYGYEDYYDYYGYDYHNYRGGYEDPYYGYEDFQVGARGRGGRGARGAAPSRGRGAAPPRGRAGYSQRGGPGSARGVRGARGGAQQQRGRGQGKGVEAGPDLLQ

SEQ ID NO: 60471 - protein, 248 aa, Artificial Sequence
  derived and/or modified sequence
MELLQVTILFLLPSICSSNSTGVLEAANNSLVVTTTKPSITTPNTESLQKNVVTPTTGTTPKGTITNELLKMSLMSTATFLTSKDEGLKATTTDVRKNDSIISNVTVTSVTLPNAVSTLQSSKPKSSVLQPDASPSKTGTLTSIPVTIPENTSQSQVIGTEGGKNASTSATSRSYSSIILPVVIALIVITLSVFVLVGLYRMCWKADPGTPENGNDQPQSDKESVKLLTVKTISHESGEHSAQGKTKN

SEQ ID NO: 60472 - DNA, 537 bp, Artificial Sequence
  derived and/or modified sequence
atggaattgctccaggtgacaattctgttcctgctgccctcaatctgttcgtctaactcaaccggagtgctggaagcagcgaataatagtttggttgtcactacaaccaagccgtcgatcacgacacctaatacggaatcactgcaaaaaaatgtggtcacccctactaccggtacgacacccaagggcacgattacaaatgagctgcttaagatgtccctgatgtcaactgccacgtttcttacatccaaggacgaggggcttaaagccaccactactgatgtccgaaagaacgattcaataataagcaacgtaaccgttacttccgttacattaccgaacgccgtctccactctccagagcagtaagcccaagactgagacgcagtccagcatcaagactaccgaaattccgggtacaccagagaacggcaatgatcagccccagagcgataaagaatctgttaagttgttgaccgtgaagactatctcacacgagtctggtgaacactcagcacagggcaagactaaaaattag

SEQ ID NO: 60473 - DNA, 747 bp, Artificial Sequence
  derived and/or modified sequence
atggagctgctccaagtcaccattttattcctccttcctagcatctgctcatccaattccacaggggtgctggaggcagccaacaacagcctggtcgtaactaccaccaaaccctctattactaccccaaacacagagagccttcagaagaatgtagtcactccaactaccgggaccactcccaaaggaacaataacgaacgagctcctaaagatgagcctcatgtctaccgcaaccttcctgacgagtaaggatgagggcctcaaagcaacgactaccgacgttaggaagaatgactctattatttcaaatgtcaccgtcacttccgtgacattgccaaacgccgtgtctacgttacaaagctccaaacccaagtcgtcggtactgcaacctgacgcttcccccagtaagacgggcacccttaccagtattcccgtcactattccggagaataccagccagtcccaggtgatcggcaccgagggtggtaaaaatgcaagtactagtgcaacatcgcggagctactcaagcatcatcctgccggttgttatcgccctgatagttatcacattgtccgtgtttgtccttgttggactgtaccgaatgtgctggaaggccgaccccggtacacccgaaaacgggaacgatcagccgcagtccgacaaggaaagcgtcaaactactgacggtgaaaactatctctcatgagtcaggggaacattcagcccagggtaagaccaaaaactag

SEQ ID NO: 60474 - DNA, 537 bp, Artificial Sequence
  derived and/or modified sequence
atggagctcctccaggtaactattctttttctcctcccctccatttgctcctccaattccaccggcgtgctagaagccgccaataatagcctggtcgtgaccacgacaaagccttcgatcacgacaccaaataccgaaagcttgcagaagaatgtggtaaccccgacaactgggacaactcccaagggtaccataacaaacgagttgctgaaaatgtcactgatgagtactgctactttcctgacaagtaaggatgagggattaaaggccacaacaactgatgtccgaaaaaatgactccattataagcaatgttaccgtaaccagcgtgaccttaccaaatgccgtatcaaccttgcaaagctccaagcctaaaactgagactcagtcttccatcaagacaactgagatccctggaacccctgaaaacggcaatgatcagccacagtccgataaagaaagcgtgaagctactgaccgttaagacaatctctcacgaaagcggcgaacatagcgcacaaggtaagactaaaaattag

SEQ ID NO: 60475 - DNA, 747 bp, Artificial Sequence
  derived and/or modified sequence
atggagctgctgcaagtgaccatcctgttccttctgccgagcatttgcagcagcaacagcaccggagtgttagaagcagctaataacagcctggttgtcactaccaccaagccctccatcacaaccccaaatactgaatccctgcaaaagaacgttgtaacgcccactacaggtactaccccaaagggtactatcactaacgagttactgaagatgtccctaatgagcaccgctaccttcctgacctctaaagatgaaggcttgaaagccaccactactgatgtacgcaaaaacgatagcattatatcaaatgtcaccgttacttcggttacacttccaaacgcagtaagcacgctacaaagttcaaaacccaaaagctccgtgctccaacccgatgcttctccatctaaaacaggcacactcactagcatcccagtgaccattccagagaataccagccaatcacaagttatcggcaccgaaggtggtaagaatgcctctactagtgcaacctcacggtcctactcctccatcatcctgcccgttgtgatcgctcttatcgttatcacactgtcagtgttcgtgctggtcggattgtatcgaatgtgctggaaggctgaccctgggacaccagaaaacggtaatgaccaacctcaatcagataaggagagtgtgaagttactgactgtcaaaactatttcacatgaatcaggcgaacattccgcccaaggcaaaactaaaaactag

SEQ ID NO: 60476 - DNA, 537 bp, Artificial Sequence
  derived and/or modified sequence
atggagctgctgcaggtgaccattttgttcctactgccttctatctgttcctccaacagcaccggagtgctcgaggccgccaataactcactcgttgtgaccacaactaaacccagtatcactacgcctaatacagagtccctccagaaaaatgttgttacccccaccaccggaaccacacctaaaggtaccataacgaacgagctgctgaagatgtcccttatgtctactgccacctttctcacgtccaaagacgagggcttaaaggccaccaccaccgatgtgcgcaaaaacgatagcattataagcaatgttaccgtaaccagcgtgaccttaccaaatgccgtatcaaccttgcaaagctccaagcctaaaactgagactcagtcttccatcaagacaactgagatccctggaacccctgaaaacggcaatgatcagccacagtccgataaagaaagcgtgaagctactgaccgttaagacaatctctcacgaaagcggcgaacatagcgcacaaggtaagactaaaaattag

SEQ ID NO: 60477 - DNA, 747 bp, Artificial Sequence
  derived and/or modified sequence
atggaattactccaagtgaccatactgttcctgcttccctcgatttgtagttccaactcaactggcgttctggaggcagccaataacagtttagtcgtgaccactacaaaaccttcaattactactcccaatacggaaagtctgcagaagaacgtcgtcactcccaccaccggtaccacccctaagggaactatcacaaatgagctgctgaaaatgtctctcatgtccactgccactttcttgaccagtaaggatgaaggtctcaaagctaccacaaccgatgtgagaaaaaatgacagcattatatcaaatgtcaccgttacttcggttacacttccaaacgcagtaagcacgctacaaagttcaaaacccaaaagctccgtgctccaacccgatgcttctccatctaaaacaggcacactcactagcatcccagtgaccattccagagaataccagccaatcacaagttatcggcaccgaaggtggtaagaatgcctctactagtgcaacctcacggtcctactcctccatcatcctgcccgttgtgatcgctcttatcgttatcacactgtcagtgttcgtgctggtcggattgtatagaatgtgttggaaggcagacccaggaacacccgaaaatggcaacgaccaacctcagtcagataaggaatccgtgaagctgctgacagttaaaaccatttctcacgagagcggagaacacagtgcccaaggaaagaccaaaaactag

SEQ ID NO: 60478 - DNA, 1377 bp, Artificial Sequence
  derived and/or modified sequence
tttgctaataaggccctgccaggctgggagggaattgtccctgcctgcttctggagaaagaagatattgacaccatctacgggcaccatggaactgcttcaagtgaccattctttttcttctgcccagtatttgcagcagtaacagcacaggtgttttagaggcagctaataattcacttgttgttactacaacaaaaccatctataacaacaccaaacacagaatcattacagaaaaatgttgtcacaccaacaactggaacaactcctaaaggaacaatcaccaatgaattacttaaaatgtctctgatgtcaacagctacttttttaacaagtaaagatgaaggattgaaagccacaaccactgatgtcaggaagaatgactccatcatttcaaacgtaacagtaacaagtgttacacttccaaatgctgtttcaacattacaaagttccaaacccaagagtagtgttctacaaccagatgcatcaccttctaaaactggtacattaacctcaataccagttacaattccagaaaacacctcacagtctcaagtaataggcactgagggtggaaaaaatgcaagcacttcagcaaccagccggtcttattccagtattattttgccggtggttattgctttgattgtaataacactttcagtatttgttctggtgggtttgtaccgaatgtgctggaaggcagatccgggcacaccagaaaatggaaatgatcaacctcagtctgataaagagagcgtgaagcttcttaccgttaagacaatttctcatgagtctggtgagcactctgcacaaggaaaaaccaagaactgacagcttgaggaattctctccacacctaggcaataattacgcttaatcttcagcttctatgcaccaagcgtggaaaaggagaaagtcctgcagaatcaatcccgacttccatacctgctgctggactgtaccagacgtctgtcccagtaaagtgatgtccagctgacatgcaataatttgatggaatcaaaaagaaccccggggctctcctgttctctcacatttaaaaattccattactccatttacaggagcgttcctaggaaaaggaattttaggaggagaatttgtgagcagtgaatctgacagcccaggaggtgggctcgctgataggcatgactttccttaatgtttaaagttttccgggccaagaatttttatccatgaagactttcctacttttctcagtgttcttatattacctactgttagtatttattgtttaccactatgttaatgcagggaaaagttgcacgtgtattattaaatattaggtagaaatcataccatgctactttgtacatataagtattttattcctgctt

SEQ ID NO: 60479 - DNA, 537 bp, Artificial Sequence
  derived and/or modified sequence
atggagctgctgcaggtgaccatcctgttcctgctgcccagcatctgcagcagcaacagcaccggcgtgctggaggccgccaacaacagcctggtggtgaccaccaccaagcccagcatcaccacccccaacaccgagagcctgcagaagaacgtggtgacccccaccaccggcaccacccccaagggcaccatcaccaacgagctgctgaagatgagcctgatgagcaccgccaccttcctgaccagcaaggacgagggcctgaaggccaccaccaccgacgtgagaaagaacgacagcatcatcagcaacgtgaccgtgaccagcgtgaccctgcccaacgccgtgagcaccctgcagagcagcaagcccaagaccgagacccagagcagcatcaagaccaccgagatccccggcacccccgagaacggcaacgaccagccccagagcgacaaggagagcgtgaagctgctgaccgtgaagaccatcagccacgagagcggcgagcacagcgcccagggcaagaccaagaactag

SEQ ID NO: 60480 - DNA, 1575 bp, Artificial Sequence
  derived and/or modified sequence
catttgctaataaggccctgccaggctgggagggaattgtccctgcctgcttctggagaaagaagatattgacaccatctacgggcaccatggaactgcttcaagtgaccattctttttcttctgcccagtatttgcagcagtaacagcacaggtgttttagaggcagctaataattcacttgttgttactacaacaaaaccatctataacaacaccaaacacagaatcattacagaaaaatgttgtcacaccaacaactggaacaactcctaaaggaacaatcaccaatgaattacttaaaatgtctctgatgtcaacagctacttttttaacaagtaaagatgaaggattgaaagccacaaccactgatgtcaggaagaatgactccatcatttcaaacgtaacagtaacaagtgttacacttccaaatgctgtttcaacattacaaagttccaaacccaagactgaaactcagagttcaattaaaacaacagaaataccaggcacaccagaaaatggaaatgatcaacctcagtctgataaagagagcgtgaagcttcttaccgttaagacaatttctcatgagtctggtgagcactctgcacaaggaaaaaccaagaactgacagcttgaggaattctctccacacctaggcaataattacgcttaatcttcagcttctatgcaccaagcgtggaaaaggagaaagtcctgcagaatcaatcccgacttccatacctgctgctggactgtaccagacgtctgtcccagtaaagtgatgtccagctgacatgcaataatttgatggaatcaaaaagaaccccggggctctcctgttctctcacatttaaaaattccattactccatttacaggagcgttcctaggaaaaggaattttaggaggagaatttgtgagcagtgaatctgacagcccaggaggtgggctcgctgataggcatgactttccttaatgtttaaagttttccgggccaagaatttttatccatgaagactttcctacttttctcagtgttcttatattacctactgttagtatttattgtttaccactatgttaatgcagggaaaagttgcacgtgtattattaaatattaggtagaaatcataccatgctactttgtacatataagtattttattcctgctttcgtgttacttttaataaataactactgtactcaatactctaaaaatactataacatgactgtgaaaatggcaatgttattgtcttcctataattatgaatatttttggatggattattagaatacatgaactcactaatgaaaggcatttgtaataagtcagaaagggacatacgattcacatatcagactgttagggggagagtaatttatcagttctttggtctttctatttgtcattcatactatgtgatgaagatgtaagtgcaagggcatttataacactatactgcattcattaagataataggatcatgatttttcattaactcatttgattgatattatctccatgcattttttatttcttttagaaatgtaattatttgctctagcaatcattgct

SEQ ID NO: 60481 - DNA, 747 bp, Artificial Sequence
  derived and/or modified sequence
atggagctgctgcaggtgaccatcctgttcctgctgcccagcatctgcagcagcaacagcaccggcgtgctggaggccgccaacaacagcctggtggtgaccaccaccaagcccagcatcaccacccccaacaccgagagcctgcagaagaacgtggtgacccccaccaccggcaccacccccaagggcaccatcaccaacgagctgctgaagatgagcctgatgagcaccgccaccttcctgaccagcaaggacgagggcctgaaggccaccaccaccgacgtgagaaagaacgacagcatcatcagcaacgtgaccgtgaccagcgtgaccctgcccaacgccgtgagcaccctgcagagcagcaagcccaagagcagcgtgctgcagcccgacgccagccccagcaagaccggcaccctgaccagcatccccgtgaccatccccgagaacaccagccagagccaggtgatcggcaccgagggcggcaagaacgccagcaccagcgccaccagcagaagctacagcagcatcatcctgcccgtggtgatcgccctgatcgtgatcaccctgagcgtgttcgtgctggtgggcctgtacagaatgtgctggaaggccgaccccggcacccccgagaacggcaacgaccagccccagagcgacaaggagagcgtgaagctgctgaccgtgaagaccatcagccacgagagcggcgagcacagcgcccagggcaagaccaagaactag

SEQ ID NO: 60482 - DNA, 537 bp, Artificial Sequence
  derived and/or modified sequence
atggagcttctgcaggtaactattctcttcctattgccttctatctgctcatccaattcgaccggagtgctggaggccgccaacaactcccttgtggtgactactactaagccgagtattacgacacccaatactgaaagcctgcagaaaaatgtagtgactcctactacaggcaccactccaaagggcaccatcaccaatgaacttctgaagatgagtttaatgagcactgccacctttttaaccagcaaagacgagggcctcaaggctacgacaactgatgttcgcaagaacgactccatcattagcaatgtgacggtgacttctgtgacactccccaatgctgtatccacactccagagctctaaaccgaagacagagacccagtcatcgatcaaaaccacagagataccgggaacgcctgagaatgggaatgaccaaccacagtctgacaaggaaagtgtcaaactgctcactgtgaagaccatttctcatgagtctggcgagcactcagcacaggggaaaaccaaaaactag

SEQ ID NO: 60483 - DNA, 747 bp, Artificial Sequence
  derived and/or modified sequence
atggagctgctacaagtgacaatattgttcctattgccatccatctgctcctcaaattctactggtgttcttgaagctgctaacaattctctagtagtgacaaccaccaaaccttctattactaccccaaacacagaatcattgcagaagaatgtggtgacccctactactggcacgacccctaagggtacgattaccaacgagctgttgaagatgtccctgatgagcacagcgaccttcttgactagtaaggacgaagggcttaaggctacaacaaccgatgtgagaaagaacgacagcattatttcaaacgttaccgtgaccagtgtgactctgcccaacgccgtctcaactctgcagtccagcaagccgaagtcttccgtgttacagccagacgcctctccgtcaaaaactggtaccctcaccagcattccagttacgatccccgagaacacctcccaaagccaggtgattggaacggaaggaggcaagaatgcctccacctctgctaccagcaggagctatagctcaatcatactgcccgtcgtcatcgccctgatcgtaataacactctcagtctttgtgctggtcggcctgtaccggatgtgctggaaagccgatcccgggacgcctgagaacgggaacgatcagccacagtcagataaggagagtgttaagcttcttaccgtgaagacgattagtcatgagtccggagagcattccgcccagggtaagaccaagaattag

SEQ ID NO: 60484 - DNA, 537 bp, Artificial Sequence
  derived and/or modified sequence
atggagctgctgcaggtgaccatcctcttcctgctgcccagcatctgcagcagcaacagcactggagtgctggaggccgccaacaacagcctggtggtgaccaccaccaagcccagcatcaccacccccaacacagagagcctgcagaagaatgtggtgacccccaccaccggcaccacccccaagggcaccatcaccaatgagctgctgaagatgagcctgatgagcacagccaccttcctgaccagcaaggatgagggcctgaaggccaccaccacagatgtgaggaagaatgacagcatcatcagcaatgtgacagtgacctctgtgaccctgcccaatgctgtgtccaccctgcagagcagcaagcccaagacagagacccagagcagcatcaagaccacagagatccctggcaccccagaaaatggaaatgaccagccccagagcgacaaggagagcgtgaagctgctgactgtgaagaccatcagccatgaaagtggagagcacagcgcccagggcaagaccaagaactag

SEQ ID NO: 60485 - DNA, 747 bp, Artificial Sequence
  derived and/or modified sequence
atggagctgctgcaggtgaccatcctcttcctgctgcccagcatctgcagcagcaacagcactggagtgctggaggccgccaacaacagcctggtggtgaccaccaccaagcccagcatcaccacccccaacacagagagcctgcagaagaatgtggtgacccccaccaccggcaccacccccaagggcaccatcaccaatgagctgctgaagatgagcctgatgagcacagccaccttcctgaccagcaaggatgagggcctgaaggccaccaccacagatgtgaggaagaatgacagcatcatcagcaatgtgacagtgacctctgtgaccctgcccaatgctgtgtccaccctgcagagcagcaagcccaagagctctgtgctgcagccagatgccagccccagcaagacaggcaccctgaccagcatccctgtgaccatccctgagaacaccagccagagccaggtgattggaacagagggcggcaagaatgccagcaccagcgccaccagccgcagctacagcagcatcatcctgcctgtggtgattgccctgattgtcatcaccctgtctgtgtttgtgctggtgggcctgtacaggatgtgctggaaggctgaccccggcaccccagaaaatggaaatgaccagccccagagcgacaaggagagcgtgaagctgctgactgtgaagaccatcagccatgaaagtggagagcacagcgcccagggcaagaccaagaactag

SEQ ID NO: 60486 - DNA, 537 bp, Artificial Sequence
  derived and/or modified sequence
atggagctgctgcaggtgaccatcctgttcctgctgcccagcatctgctccagtaacagcactggcgtgttggaggctgccaataatagcctcgtggttactaccacaaaaccgtccattactacgccgaataccgaaagtcttcaaaaaaatgtagtcactccaaccaccgggaccactccaaaaggcaccataaccaatgagctgctcaagatgtcattaatgtcaaccgcaacgttcctgacatccaaggacgagggtctgaaggccacgacaactgatgtacggaaaaatgatagtatcatctctaatgtcaccgtgactagcgtgacattacccaatgctgttagcaccttacaaagttccaagcctaaaactgaaacccagtcgtcaatcaagactacagagatcccgggaacccctgagaacggaaatgatcagccgcagagcgataaggagtctgtgaagctgctcaccgtgaaaaccatctcccatgagtctggagaacatagcgctcagggaaaaaccaagaactag

SEQ ID NO: 60487 - DNA, 747 bp, Artificial Sequence
  derived and/or modified sequence
atggagctgctgcaggtgaccatcctgttcctgctgcccagcatctgtagttccaactctactggcgttctggaggcggcaaacaactctttggtggtcaccaccaccaaaccgagtatcacaacaccaaacactgaaagcttgcagaagaacgtggtgacaccgacaacgggtactacgccgaaggggaccataacaaatgagcttctgaagatgagcctcatgtccaccgcaacttttctcacctcgaaggacgaaggcctcaaggccacaactaccgatgtgcgcaagaacgattccatcatctcaaatgtgaccgtgacctccgtcaccctgcccaatgcagtgtctacacttcagagcagcaagcccaaatcctctgttctgcagcctgacgcgtcacccagtaagactggaacgctaacttccattcccgtcacaatcccagagaacactagccagagccaggtgatcggcactgaaggcgggaagaacgcaagtaccagtgccacaagtcggtcctatagttccataatcctgcccgtcgtgatcgcgttgatcgtcattacactgtccgtatttgttttggtgggcctctaccggatgtgctggaaggctgaccccggcacaccagaaaacgggaatgatcaacctcagtcagacaaggagagcgtcaaattactcacagtgaaaaccatctctcacgagagcggcgagcactctgcacaagggaaaactaagaactag

SEQ ID NO: 60488 - RNA, 537 nt, Artificial Sequence
  derived and/or modified sequence
auggagcuccuccagguaacuauucuuuuucuccuccccuccauuugcuccuccaauuccaccggcgugcuagaagccgccaauaauagccuggucgugaccacgacaaagccuucgaucacgacaccaaauaccgaaagcuugcagaagaaugugguaaccccgacaacugggacaacucccaaggguaccauaacaaacgaguugcugaaaaugucacugaugaguacugcuacuuuccugacaaguaaggaugagggauuaaaggccacaacaacugauguccgaaaaaaugacuccauuauaagcaauguuaccguaaccagcgugaccuuaccaaaugccguaucaaccuugcaaagcuccaagccuaaaacugagacucagucuuccaucaagacaacugagaucccuggaaccccugaaaacggcaaugaucagccacaguccgauaaagaaagcgugaagcuacugaccguuaagacaaucucucacgaaagcggcgaacauagcgcacaagguaagacuaaaaauuag

SEQ ID NO: 60489 - RNA, 747 nt, Artificial Sequence
  derived and/or modified sequence
auggagcugcugcaagugaccauccuguuccuucugccgagcauuugcagcagcaacagcaccggaguguuagaagcagcuaauaacagccugguugucacuaccaccaagcccuccaucacaaccccaaauacugaaucccugcaaaagaacguuguaacgcccacuacagguacuaccccaaaggguacuaucacuaacgaguuacugaagaugucccuaaugagcaccgcuaccuuccugaccucuaaagaugaaggcuugaaagccaccacuacugauguacgcaaaaacgauagcauuauaucaaaugucaccguuacuucgguuacacuuccaaacgcaguaagcacgcuacaaaguucaaaacccaaaagcuccgugcuccaacccgaugcuucuccaucuaaaacaggcacacucacuagcaucccagugaccauuccagagaauaccagccaaucacaaguuaucggcaccgaaggugguaagaaugccucuacuagugcaaccucacgguccuacuccuccaucauccugcccguugugaucgcucuuaucguuaucacacugucaguguucgugcuggucggauuguaucgaaugugcuggaaggcugacccugggacaccagaaaacgguaaugaccaaccucaaucagauaaggagagugugaaguuacugacugucaaaacuauuucacaugaaucaggcgaacauuccgcccaaggcaaaacuaaaaacuag

SEQ ID NO: 60490 - RNA, 537 nt, Artificial Sequence
  derived and/or modified sequence
auggagcugcugcaggugaccauuuuguuccuacugccuucuaucuguuccuccaacagcaccggagugcucgaggccgccaauaacucacucguugugaccacaacuaaacccaguaucacuacgccuaauacagagucccuccagaaaaauguuguuacccccaccaccggaaccacaccuaaagguaccauaacgaacgagcugcugaagaugucccuuaugucuacugccaccuuucucacguccaaagacgagggcuuaaaggccaccaccaccgaugugcgcaaaaacgauagcauuauaagcaauguuaccguaaccagcgugaccuuaccaaaugccguaucaaccuugcaaagcuccaagccuaaaacugagacucagucuuccaucaagacaacugagaucccuggaaccccugaaaacggcaaugaucagccacaguccgauaaagaaagcgugaagcuacugaccguuaagacaaucucucacgaaagcggcgaacauagcgcacaagguaagacuaaaaauuag

SEQ ID NO: 60491 - RNA, 747 nt, Artificial Sequence
  derived and/or modified sequence
auggaauuacuccaagugaccauacuguuccugcuucccucgauuuguaguuccaacucaacuggcguucuggaggcagccaauaacaguuuagucgugaccacuacaaaaccuucaauuacuacucccaauacggaaagucugcagaagaacgucgucacucccaccaccgguaccaccccuaagggaacuaucacaaaugagcugcugaaaaugucucucauguccacugccacuuucuugaccaguaaggaugaaggucucaaagcuaccacaaccgaugugagaaaaaaugacagcauuauaucaaaugucaccguuacuucgguuacacuuccaaacgcaguaagcacgcuacaaaguucaaaacccaaaagcuccgugcuccaacccgaugcuucuccaucuaaaacaggcacacucacuagcaucccagugaccauuccagagaauaccagccaaucacaaguuaucggcaccgaaggugguaagaaugccucuacuagugcaaccucacgguccuacuccuccaucauccugcccguugugaucgcucuuaucguuaucacacugucaguguucgugcuggucggauuguauagaauguguuggaaggcagacccaggaacacccgaaaauggcaacgaccaaccucagucagauaaggaauccgugaagcugcugacaguuaaaaccauuucucacgagagcggagaacacagugcccaaggaaagaccaaaaacuag

SEQ ID NO: 60492 - protein, 296 aa, Artificial Sequence
  derived and/or modified sequence
MASHRHSGPSSYKVGTMAEKFDCHYCRDPLQGKKYVQKDGHHCCLKCFDKFCANTCVECRKPIGADSKEVHYKNRFWHDTCFRCAKCLHPLANETFVAKDNKILCNKCTTREDSPKCKGCFKAIVAGDQNVEYKGTVWHKDCFTCSNCKQVIGTGSFFPKGEDFYCVTCHETKFAKHCVKCNKAITSGGITYQDQPWHADCFVCVTCSKKLAGQRFTAVEDQYYCVDCYKNFVAKKCAGCKNPITGFGKGSSVVAYEGQSWHDYCFHCKKCSVNLANKRFVFHQEQVYCPDCAKKL

SEQ ID NO: 60493 - protein, 320 aa, Artificial Sequence
  derived and/or modified sequence
MSHFILRHLGSCFQPYPAFAEYILSATHPASGPSSYKVGTMAEKFDCHYCRDPLQGKKYVQKDGHHCCLKCFDKFCANTCVECRKPIGADSKEVHYKNRFWHDTCFRCAKCLHPLANETFVAKDNKILCNKCTTREDSPKCKGCFKAIVAGDQNVEYKGTVWHKDCFTCSNCKQVIGTGSFFPKGEDFYCVTCHETKFAKHCVKCNKAITSGGITYQDQPWHADCFVCVTCSKKLAGQRFTAVEDQYYCVDCYKNFVAKKCAGCKNPITGFGKGSSVVAYEGQSWHDYCFHCKKCSVNLANKRFVFHQEQVYCPDCAKKL

SEQ ID NO: 60494 - protein, 275 aa, Artificial Sequence
  derived and/or modified sequence
MASHRHSGPSSYKVGTMAEKFDCHYCRDPLQGKKYVQKDGHHCCLKCFDKFCANTCVECRKPIGADSKEVHYKNRFWHDTCFRCAKCTTREDSPKCKGCFKAIVAGDQNVEYKGTVWHKDCFTCSNCKQVIGTGSFFPKGEDFYCVTCHETKFAKHCVKCNKAITSGGITYQDQPWHADCFVCVTCSKKLAGQRFTAVEDQYYCVDCYKNFVAKKCAGCKNPITGFGKGSSVVAYEGQSWHDYCFHCKKCSVNLANKRFVFHQEQVYCPDCAKKL

SEQ ID NO: 60495 - DNA, 2524 bp, Artificial Sequence
  derived and/or modified sequence
cccgcccctggctagccgcgcccgcccccgcgctcctgcttcctcccctctttccctccccgcctcccaggcgcgcacccctcccctcgcgcccctcccgcgccctacatccaccgcccggcggagggggctcagtccgcagccgccgccgccaccgccgcgcctcggcctcggtgcaggcagcggccgccgccgccgagacagctgcgcgggcgagcatccccacgcagcaccttggaagttgttttcaaccatatccagcctttgccgaatacatcctatctgccacacatccagcgtgaggtccctccagctacaaggtgggcaccatggcggagaagtttgactgccactactgcagggatcccttgcaggggaagaagtatgtgcaaaaggatggccaccactgctgcctgaaatgctttgacaagttctgtgccaacacctgtgtggaatgccgcaagcccatcggtgcggactccaaggaggtgcactataagaaccgcttctggcatgacacctgcttccgctgtgccaagtgccttcaccccttggccaatgagacctttgtggccaaggacaacaagatcctgtgcaacaagtgcaccactcgggaggactcccccaagtgcaaggggtgcttcaaggccattgtggcaggagatcaaaacgtggagtacaaggggaccgtctggcacaaagactgcttcacctgtagtaactgcaagcaagtcatcgggactggaagcttcttccctaaaggggaggacttctactgcgtgacttgccatgagaccaagtttgccaagcattgcgtgaagtgcaacaaggccatcacatctggaggaatcacttaccaggatcagccctggcatgccgattgctttgtgtgtgttacctgctctaagaagctggctgggcagcgtttcaccgctgtggaggaccagtattactgcgtggattgctacaagaactttgtggccaagaagtgtgctggatgcaagaaccccatcactgggtttggtaaaggctccagtgtggtggcctatgaaggacaatcctggcacgactactgcttccactgcaaaaaatgctccgtgaatctggccaacaagcgctttgttttccaccaggagcaagtgtattgtcccgactgtgccaaaaagctgtaaactgacaggggctcctgtcctgtaaaatggcatttgaatctcgttctttgtgtccttactttctgccctataccatcaataggggaagagtggtccttcccttctttaaagttctccttccgtcttttctcccattttacagtattactcaaataagggcacacagtgatcatattagcatttagcaaaaagcaaccctgcagcaaagtgaatttctgtccggctgcaatttaaaaatgaaaacttaggtagattgactcttctgcatgtttctcatagagcagaaaagtgctaatcatttagccacttagtgatgtaagcaagaagcataggagataaaacccccactgagatgcctctcatgcctcagctgggacccaccgtgtagacacacgacatgcaagagttgcagcggctgctccaactcactgctcaccctcttctgtgagcaggaaaagaaccctactgacatgcatggtttaacttcctcatcagaactctgcccttccttctgttcttttgtgctttcaaataactaacacgaacttccagaaaattaacatttgaacttagctgtaattctaaactgacctttccccgtactaacgtttggtttccccgtgtggcatgttttctgagcgttcctactttaaagcatggaacatgcaggtgatttgggaagtgtagaaagacctgagaaaacgagcctgtttcagaggaacatcgtcacaacgaatacttctggaagcttaacaaaactaaccctgctgtcctttttattgtttttaattaatatttttgttttaattgatagcaaaatagtttatgggtttggaaacttgcatgaaaatattttagccccctcagatgttcctgcagtgctgaaattcatcctacggaagtaaccgcaaaactctagagggggagttgagcaggcgccagggctgtcatcaacatggatatgacatttcacaacagtgactagttgaatcccttgtaacgtagtagttgtctgctctttgtccatgtgttaatgaggactgcaaagtcccttctgttgtgattcctaggacttttcctcaagaggaaatctggatttccacctaccgcttacctgaaatgcaggatcacctacttactgtattctacattattatatgacatagtataatgagacaatatcaaaagtaaacatgtaatgacaatacatactaacattcttgtaggagtggttagagaagctgatgcctcatttctacattctgtcattagctattatcatctaacgtttcagtgtatccttacagaaataaagcagcatatgaataacctgcaaaaaaaaaaaaaaaaaa

SEQ ID NO: 60496 - DNA, 1017 bp, Artificial Sequence
  derived and/or modified sequence
atttcctttgtttggaggcttggttctgagtgagagttcaacagcctttgcccaggcggcttctcaaacacagggtgtggtttccttagctcactctctgctgtttggttgctcatggcaacaagatccaaataacttggacatgtgtttgtataaaaaaaacctgggaatggaacccaaagtgagactttggggctttcagttagtggaagagctgcggtccctccagctacaaggtgggcaccatggcggagaagtttgactgccactactgcagggatcccttgcaggggaagaagtatgtgcaaaaggatggccaccactgctgcctgaaatgctttgacaagttctgtgccaacacctgtgtggaatgccgcaagcccatcggtgcggactccaaggaggtgcactataagaaccgcttctggcatgacacctgcttccgctgtgccaagtgccttcaccccttggccaatgagacctttgtggccaaggacaacaagatcctgtgcaacaagtgcaccactcgggaggactcccccaagtgcaaggggtgcttcaaggccattgtggcaggagatcaaaacgtggagtacaaggggaccgtctggcacaaagactgcttcacctgtagtaactgcaagcaagtcatcgggactggaagcttcttccctaaaggggaggacttctactgcgtgacttgccatgagaccaagtttgccaagcattgcgtgaagtgcaacaaggccatcacatctggaggaatcacttaccaggatcagccctggcatgccgattgctttgtgtgtgttacctgctctaagaagctggctgggcagcgtttcaccgctgtggaggaccagtattactgcgtggattgctacaagaactttgtggccaagaagtgtgctggatgcaagaaccccatcactgggtttggtaaaggctccagtgtggtggcctatgaaggacaatcctggcacgactactgcttccactgcaaaaaatgctccgtga

SEQ ID NO: 60497 - DNA, 2565 bp, Artificial Sequence
  derived and/or modified sequence
gccgagtccaaattttattccggtacagggatgactttctatgtggcctctctggctctggagctaatttggatgctgagtagccccgcaggtatttatatgtagcgtttggtatttttactgggtcctattcttctcccttggatcacctaaaatggttaagaattttctagtgggattaaggttgtgatctctggggaggggtgggacatctgctctcggttatttttgtgttagccgcttccccttaaatgtatgttcacaaatgagccacagccttatcagctggggttgagggaagactggtctaggtgctgctcctgaacttggtctctgagccatggcttcccatagacactcaggtccctccagctacaaggtgggcaccatggcggagaagtttgactgccactactgcagggatcccttgcaggggaagaagtatgtgcaaaaggatggccaccactgctgcctgaaatgctttgacaagttctgtgccaacacctgtgtggaatgccgcaagcccatcggtgcggactccaaggaggtgcactataagaaccgcttctggcatgacacctgcttccgctgtgccaagtgccttcaccccttggccaatgagacctttgtggccaaggacaacaagatcctgtgcaacaagtgcaccactcgggaggactcccccaagtgcaaggggtgcttcaaggccattgtggcaggagatcaaaacgtggagtacaaggggaccgtctggcacaaagactgcttcacctgtagtaactgcaagcaagtcatcgggactggaagcttcttccctaaaggggaggacttctactgcgtgacttgccatgagaccaagtttgccaagcattgcgtgaagtgcaacaaggccatcacatctggaggaatcacttaccaggatcagccctggcatgccgattgctttgtgtgtgttacctgctctaagaagctggctgggcagcgtttcaccgctgtggaggaccagtattactgcgtggattgctacaagaactttgtggccaagaagtgtgctggatgcaagaaccccatcactgggtttggtaaaggctccagtgtggtggcctatgaaggacaatcctggcacgactactgcttccactgcaaaaaatgctccgtgaatctggccaacaagcgctttgttttccaccaggagcaagtgtattgtcccgactgtgccaaaaagctgtaaactgacaggggctcctgtcctgtaaaatggcatttgaatctcgttctttgtgtccttactttctgccctataccatcaataggggaagagtggtccttcccttctttaaagttctccttccgtcttttctcccattttacagtattactcaaataagggcacacagtgatcatattagcatttagcaaaaagcaaccctgcagcaaagtgaatttctgtccggctgcaatttaaaaatgaaaacttaggtagattgactcttctgcatgtttctcatagagcagaaaagtgctaatcatttagccacttagtgatgtaagcaagaagcataggagataaaacccccactgagatgcctctcatgcctcagctgggacccaccgtgtagacacacgacatgcaagagttgcagcggctgctccaactcactgctcaccctcttctgtgagcaggaaaagaaccctactgacatgcatggtttaacttcctcatcagaactctgcccttccttctgttcttttgtgctttcaaataactaacacgaacttccagaaaattaacatttgaacttagctgtaattctaaactgacctttccccgtactaacgtttggtttccccgtgtggcatgttttctgagcgttcctactttaaagcatggaacatgcaggtgatttgggaagtgtagaaagacctgagaaaacgagcctgtttcagaggaacatcgtcacaacgaatacttctggaagcttaacaaaactaaccctgctgtcctttttattgtttttaattaatatttttgttttaattgatagcaaaatagtttatgggtttggaaacttgcatgaaaatattttagccccctcagatgttcctgcagtgctgaaattcatcctacggaagtaaccgcaaaactctagagggggagttgagcaggcgccagggctgtcatcaacatggatatgacatttcacaacagtgactagttgaatcccttgtaacgtagtagttgtctgctctttgtccatgtgttaatgaggactgcaaagtcccttctgttgtgattcctaggacttttcctcaagaggaaatctggatttccacctaccgcttacctgaaatgcaggatcacctacttactgtattctacattattatatgacatagtataatgagacaatatcaaaagtaaacatgtaatgacaatacatactaacattcttgtaggagtggttagagaagctgatgcctcatttctacattctgtcattagctattatcatctaacgtttcagtgtatccttacagaaataaagcagcatatgaataacctgc

SEQ ID NO: 60498 - DNA, 2441 bp, Artificial Sequence
  derived and/or modified sequence
cccaggcgcgcacccctcccctcgcgcccctcccgcgccctacatccaccgcccggcggagggggctcagtccgcagccgccgccgccaccgccgcgcctcggcctcggtgcaggcagcggccgccgccgccgagacagctgcgcgggcgagcatccccacgcagcaccttggaagttgttttcaaccatatccagcctttgccgaatacatcctatctgccacacatccagcgtgaggtccctccagctacaaggtgggcaccatggcggagaagtttgactgccactactgcagggatcccttgcaggggaagaagtatgtgcaaaaggatggccaccactgctgcctgaaatgctttgacaagttctgtgccaacacctgtgtggaatgccgcaagcccatcggtgcggactccaaggaggtgcactataagaaccgcttctggcatgacacctgcttccgctgtgccaagtgccttcaccccttggccaatgagacctttgtggccaaggacaacaagatcctgtgcaacaagtgcaccactcgggaggactcccccaagtgcaaggggtgcttcaaggccattgtggcaggagatcaaaacgtggagtacaaggggaccgtctggcacaaagactgcttcacctgtagtaactgcaagcaagtcatcgggactggaagcttcttccctaaaggggaggacttctactgcgtgacttgccatgagaccaagtttgccaagcattgcgtgaagtgcaacaaggccatcacatctggaggaatcacttaccaggatcagccctggcatgccgattgctttgtgtgtgttacctgctctaagaagctggctgggcagcgtttcaccgctgtggaggaccagtattactgcgtggattgctacaagaactttgtggccaagaagtgtgctggatgcaagaaccccatcactgggtttggtaaaggctccagtgtggtggcctatgaaggacaatcctggcacgactactgcttccactgcaaaaaatgctccgtgaatctggccaacaagcgctttgttttccaccaggagcaagtgtattgtcccgactgtgccaaaaagctgtaaactgacaggggctcctgtcctgtaaaatggcatttgaatctcgttctttgtgtccttactttctgccctataccatcaataggggaagagtggtccttcccttctttaaagttctccttccgtcttttctcccattttacagtattactcaaataagggcacacagtgatcatattagcatttagcaaaaagcaaccctgcagcaaagtgaatttctgtccggctgcaatttaaaaatgaaaacttaggtagattgactcttctgcatgtttctcatagagcagaaaagtgctaatcatttagccacttagtgatgtaagcaagaagcataggagataaaacccccactgagatgcctctcatgcctcagctgggacccaccgtgtagacacacgacatgcaagagttgcagcggctgctccaactcactgctcaccctcttctgtgagcaggaaaagaaccctactgacatgcatggtttaacttcctcatcagaactctgcccttccttctgttcttttgtgctttcaaataactaacacgaacttccagaaaattaacatttgaacttagctgtaattctaaactgacctttccccgtactaacgtttggtttccccgtgtggcatgttttctgagcgttcctactttaaagcatggaacatgcaggtgatttgggaagtgtagaaagacctgagaaaacgagcctgtttcagaggaacatcgtcacaacgaatacttctggaagcttaacaaaactaaccctgctgtcctttttattgtttttaattaatatttttgttttaattgatagcaaaatagtttatgggtttggaaacttgcatgaaaatattttagccccctcagatgttcctgcagtgctgaaattcatcctacggaagtaaccgcaaaactctagagggggagttgagcaggcgccagggctgtcatcaacatggatatgacatttcacaacagtgactagttgaatcccttgtaacgtagtagttgtctgctctttgtccatgtgttaatgaggactgcaaagtcccttctgttgtgattcctaggacttttcctcaagaggaaatctggatttccacctaccgcttacctgaaatgcaggatcacctacttactgtattctacattattatatgacatagtataatgagacaatatcaaaagtaaacatgtaatgacaatacatactaacattcttgtaggagtggttagagaagctgatgcctcatttctacattctgtcattagctattatcatctaacgtttcagtgtatccttacagaaataaagcagcatatgaataacctgc

SEQ ID NO: 60499 - DNA, 2374 bp, Artificial Sequence
  derived and/or modified sequence
taacaatgctgagtgtttgagctaatacggcttgataatgagggagccagatccactgccagtgctcatgttatatgataaacagacatttggagaagcaccttggaagttgttttcaaccatatccagcctttgccgaatacatcctatctgccacacatccagcgtgaggtccctccagctacaaggtgggcaccatggcggagaagtttgactgccactactgcagggatcccttgcaggggaagaagtatgtgcaaaaggatggccaccactgctgcctgaaatgctttgacaagttctgtgccaacacctgtgtggaatgccgcaagcccatcggtgcggactccaaggaggtgcactataagaaccgcttctggcatgacacctgcttccgctgtgccaagtgccttcaccccttggccaatgagacctttgtggccaaggacaacaagatcctgtgcaacaagtgcaccactcgggaggactcccccaagtgcaaggggtgcttcaaggccattgtggcaggagatcaaaacgtggagtacaaggggaccgtctggcacaaagactgcttcacctgtagtaactgcaagcaagtcatcgggactggaagcttcttccctaaaggggaggacttctactgcgtgacttgccatgagaccaagtttgccaagcattgcgtgaagtgcaacaaggccatcacatctggaggaatcacttaccaggatcagccctggcatgccgattgctttgtgtgtgttacctgctctaagaagctggctgggcagcgtttcaccgctgtggaggaccagtattactgcgtggattgctacaagaactttgtggccaagaagtgtgctggatgcaagaaccccatcactgggtttggtaaaggctccagtgtggtggcctatgaaggacaatcctggcacgactactgcttccactgcaaaaaatgctccgtgaatctggccaacaagcgctttgttttccaccaggagcaagtgtattgtcccgactgtgccaaaaagctgtaaactgacaggggctcctgtcctgtaaaatggcatttgaatctcgttctttgtgtccttactttctgccctataccatcaataggggaagagtggtccttcccttctttaaagttctccttccgtcttttctcccattttacagtattactcaaataagggcacacagtgatcatattagcatttagcaaaaagcaaccctgcagcaaagtgaatttctgtccggctgcaatttaaaaatgaaaacttaggtagattgactcttctgcatgtttctcatagagcagaaaagtgctaatcatttagccacttagtgatgtaagcaagaagcataggagataaaacccccactgagatgcctctcatgcctcagctgggacccaccgtgtagacacacgacatgcaagagttgcagcggctgctccaactcactgctcaccctcttctgtgagcaggaaaagaaccctactgacatgcatggtttaacttcctcatcagaactctgcccttccttctgttcttttgtgctttcaaataactaacacgaacttccagaaaattaacatttgaacttagctgtaattctaaactgacctttccccgtactaacgtttggtttccccgtgtggcatgttttctgagcgttcctactttaaagcatggaacatgcaggtgatttgggaagtgtagaaagacctgagaaaacgagcctgtttcagaggaacatcgtcacaacgaatacttctggaagcttaacaaaactaaccctgctgtcctttttattgtttttaattaatatttttgttttaattgatagcaaaatagtttatgggtttggaaacttgcatgaaaatattttagccccctcagatgttcctgcagtgctgaaattcatcctacggaagtaaccgcaaaactctagagggggagttgagcaggcgccagggctgtcatcaacatggatatgacatttcacaacagtgactagttgaatcccttgtaacgtagtagttgtctgctctttgtccatgtgttaatgaggactgcaaagtcccttctgttgtgattcctaggacttttcctcaagaggaaatctggatttccacctaccgcttacctgaaatgcaggatcacctacttactgtattctacattattatatgacatagtataatgagacaatatcaaaagtaaacatgtaatgacaatacatactaacattcttgtaggagtggttagagaagctgatgcctcatttctacattctgtcattagctattatcatctaacgtttcagtgtatccttacagaaataaagcagcatatgaataacctgc

SEQ ID NO: 60500 - DNA, 926 bp, Artificial Sequence
  derived and/or modified sequence
gcctcccgcccgccggcgtcctgggtcccgggggagcggctgcccttctgccccgccgccgccgccgctcggggctggtccctgcggtcccggctgcctggccttccagggctgggtactgcggcttcggcggcctcgctgaggccgggggccaggggccgtcccgggctgcggggtgcgggacgagggactgcgagtgcgaggtcccccctggcaccttggaagttgttttcaaccatatccagcctttgccgaatacatcctatctgccacacatccagcgtgaggtccctccagctacaaggtgggcaccatggcggagaagtttgactgccactactgcagggatcccttgcaggggaagaagtatgtgcaaaaggatggccaccactgctgcctgaaatgctttgacaagttctgtgccaacacctgtgtggaatgccgcaagcccatcggtgcggactccaaggaggtgcactataagaaccgcttctggcatgacacctgcttccgctgtgccaagtgccttcaccccttggccaatgagacctttgtggccaaggacaacaagatcctgtgcaacaagtgcaccactcgggaggactcccccaagtgcaaggggtgcttcaaggccattgtggcaggagatcaaaacgtggagtacaaggggaccgtctggcacaaagactgcttcacctgtagtaactgcaagcaagtcatcgggactggaagcttcttccctaaaggggaggacttctactgcgtgacttgccatgagaccaagtttgccaagcattgcgtgaagtgcaacaaggccatcacatctggaggaatcacttaccaggatcagccctggcatgccgattgctttgtgtgtgttacctgctctaagaagctggctgggcagcgtttcaccgctgtggagg

SEQ ID NO: 60501 - DNA, 796 bp, Artificial Sequence
  derived and/or modified sequence
aggcagtctgactctggtgcccctgctgtgaagagctgtgccctgctgcattcctcctgtagctgcacgaaagggcaccttggaagttgttttcaaccatatccagcctttgccgaatacatcctatctgccacacatccagcgtgaggtccctccagctacaaggtgggcaccatggcggagaagtttgactgccactactgcagggatcccttgcaggggaagaagtatgtgcaaaaggatggccaccactgctgcctgaaatgctttgacaagttctgtgccaacacctgtgtggaatgccgcaagcccatcggtgcggactccaaggaggtgcactataagaaccgcttctggcatgacacctgcttccgctgtgccaagtgccttcaccccttggccaatgagacctttgtggccaaggacaacaagatcctgtgcaacaagtgcaccactcgggaggactcccccaagtgcaaggggtgcttcaaggccattgtggcaggagatcaaaacgtggagtacaaggggaccgtctggcacaaagactgcttcacctgtagtaactgcaagcaagtcatcgggactggaagcttcttccctaaaggggaggacttctactgcgtgacttgccatgagaccaagtttgccaagcattgcgtgaagtgcaacaaggccatcacatctggaggaatcacttaccaggatcagccctggcatgccgattgctttgtgtgtgttacctgctctaagaagctggctgggcagcgtttcaccgctgtggaggaccagtatt

SEQ ID NO: 60502 - DNA, 2297 bp, Artificial Sequence
  derived and/or modified sequence
atgagccatttcatacttaggcaccttggaagttgttttcaaccatatccagcctttgccgaatacatcctatctgccacacatccagcgtcaggtccctccagctacaaggtgggcaccatggcggagaagtttgactgccactactgcagggatcccttgcaggggaagaagtatgtgcaaaaggatggccaccactgctgcctgaaatgctttgacaagttctgtgccaacacctgtgtggaatgccgcaagcccatcggtgcggactccaaggaggtgcactataagaaccgcttctggcatgacacctgcttccgctgtgccaagtgccttcaccccttggccaatgagacctttgtggccaaggacaacaagatcctgtgcaacaagtgcaccactcgggaggactcccccaagtgcaaggggtgcttcaaggccattgtggcaggagatcaaaacgtggagtacaaggggaccgtctggcacaaagactgcttcacctgtagtaactgcaagcaagtcatcgggactggaagcttcttccctaaaggggaggacttctactgcgtgacttgccatgagaccaagtttgccaagcattgcgtgaagtgcaacaaggccatcacatctggaggaatcacttaccaggatcagccctggcatgccgattgctttgtgtgtgttacctgctctaagaagctggctgggcagcgtttcaccgctgtggaggaccagtattactgcgtggattgctacaagaactttgtggccaagaagtgtgctggatgcaagaaccccatcactgggtttggtaaaggctccagtgtggtggcctatgaaggacaatcctggcacgactactgcttccactgcaaaaaatgctccgtgaatctggccaacaagcgctttgttttccaccaggagcaagtgtattgtcccgactgtgccaaaaagctgtaaactgacaggggctcctgtcctgtaaaatggcatttgaatctcgttctttgtgtccttactttctgccctataccatcaataggggaagagtggtccttcccttctttaaagttctccttccgtcttttctcccattttacagtattactcaaataagggcacacagtgatcatattagcatttagcaaaaagcaaccctgcagcaaagtgaatttctgtccggctgcaatttaaaaatgaaaacttaggtagattgactcttctgcatgtttctcatagagcagaaaagtgctaatcatttagccacttagtgatgtaagcaagaagcataggagataaaacccccactgagatgcctctcatgcctcagctgggacccaccgtgtagacacacgacatgcaagagttgcagcggctgctccaactcactgctcaccctcttctgtgagcaggaaaagaaccctactgacatgcatggtttaacttcctcatcagaactctgcccttccttctgttcttttgtgctttcaaataactaacacgaacttccagaaaattaacatttgaacttagctgtaattctaaactgacctttccccgtactaacgtttggtttccccgtgtggcatgttttctgagcgttcctactttaaagcatggaacatgcaggtgatttgggaagtgtagaaagacctgagaaaacgagcctgtttcagaggaacatcgtcacaacgaatacttctggaagcttaacaaaactaaccctgctgtcctttttattgtttttaattaatatttttgttttaattgatagcaaaatagtttatgggtttggaaacttgcatgaaaatattttagccccctcagatgttcctgcagtgctgaaattcatcctacggaagtaaccgcaaaactctagagggggagttgagcaggcgccagggctgtcatcaacatggatatgacatttcacaacagtgactagttgaatcccttgtaacgtagtagttgtctgctctttgtccatgtgttaatgaggactgcaaagtcccttctgttgtgattcctaggacttttcctcaagaggaaatctggatttccacctaccgcttacctgaaatgcaggatcacctacttactgtattctacattattatatgacatagtataatgagacaatatcaaaagtaaacatgtaatgacaatacatactaacattcttgtaggagtggttagagaagctgatgcctcatttctacattctgtcattagctattatcatctaacgtttcagtgtatccttacagaaataaagcagcatatgaataacctgc

SEQ ID NO: 60503 - DNA, 775 bp, Artificial Sequence
  derived and/or modified sequence
gagggagccagatccactgccagtgctcatgttatatgataaacagacatttggagaagcaccttggaagttgttttcaaccatatccagcctttgccgaatacatcctatctgccacacatccagcgtgaggtccctccagctacaaggtgggcaccatggcggagaagtttgactgccactactgcagggatcccttgcaggggaagaagtatgtgcaaaaggatggccaccactgctgcctgaaatgctttgacaagttctgtgccaacacctgtgtggaatgccgcaagcccatcggtgcggactccaaggaggtgcactataagaaccgcttctggcatgacacctgcttccgctgtgccaagtgccttcaccccttggccaatgagacctttgtggccaaggacaacaagatcctgtgcaacaagtgcaccactcgggaggactcccccaagtgcaaggggtgcttcaaggccattgtggcaggagatcaaaacgtggagtacaaggggaccgtctggcacaaagactgcttcacctgtagtaactgcaagcaagtcatcgggactggaagcttcttccctaaaggggaggacttctactgcgtgacttgccatgagaccaagtttgccaagcattgcgtgaagtgcaacaaggccatcacatctggaggaatcacttaccaggatcagccctggcatgccgattgctttgtgtgtgttacctgctctaagaagctggctgggcagcgtttcaccgctgtggaggacca

SEQ ID NO: 60504 - DNA, 2437 bp, Artificial Sequence
  derived and/or modified sequence
acagaggtttctgctttcgaagtttctcttcctttcctctctgctcttagcgtccaggactaggtaaaggttaaaaaatcatcaaggctaagcgactgttgtgtcgttcgtgttgagcgctgtattattttctgcatttgggaatgtgcgagtttctcaggcaccttggaagttgttttcaaccatatccagcctttgccgaatacatcctatctgccacacatccagcgtgaggtccctccagctacaaggtgggcaccatggcggagaagtttgactgccactactgcagggatcccttgcaggggaagaagtatgtgcaaaaggatggccaccactgctgcctgaaatgctttgacaagttctgtgccaacacctgtgtggaatgccgcaagcccatcggtgcggactccaaggaggtgcactataagaaccgcttctggcatgacacctgcttccgctgtgccaagtgccttcaccccttggccaatgagacctttgtggccaaggacaacaagatcctgtgcaacaagtgcaccactcgggaggactcccccaagtgcaaggggtgcttcaaggccattgtggcaggagatcaaaacgtggagtacaaggggaccgtctggcacaaagactgcttcacctgtagtaactgcaagcaagtcatcgggactggaagcttcttccctaaaggggaggacttctactgcgtgacttgccatgagaccaagtttgccaagcattgcgtgaagtgcaacaaggccatcacatctggaggaatcacttaccaggatcagccctggcatgccgattgctttgtgtgtgttacctgctctaagaagctggctgggcagcgtttcaccgctgtggaggaccagtattactgcgtggattgctacaagaactttgtggccaagaagtgtgctggatgcaagaaccccatcactgggtttggtaaaggctccagtgtggtggcctatgaaggacaatcctggcacgactactgcttccactgcaaaaaatgctccgtgaatctggccaacaagcgctttgttttccaccaggagcaagtgtattgtcccgactgtgccaaaaagctgtaaactgacaggggctcctgtcctgtaaaatggcatttgaatctcgttctttgtgtccttactttctgccctataccatcaataggggaagagtggtccttcccttctttaaagttctccttccgtcttttctcccattttacagtattactcaaataagggcacacagtgatcatattagcatttagcaaaaagcaaccctgcagcaaagtgaatttctgtccggctgcaatttaaaaatgaaaacttaggtagattgactcttctgcatgtttctcatagagcagaaaagtgctaatcatttagccacttagtgatgtaagcaagaagcataggagataaaacccccactgagatgcctctcatgcctcagctgggacccaccgtgtagacacacgacatgcaagagttgcagcggctgctccaactcactgctcaccctcttctgtgagcaggaaaagaaccctactgacatgcatggtttaacttcctcatcagaactctgcccttccttctgttcttttgtgctttcaaataactaacacgaacttccagaaaattaacatttgaacttagctgtaattctaaactgacctttccccgtactaacgtttggtttccccgtgtggcatgttttctgagcgttcctactttaaagcatggaacatgcaggtgatttgggaagtgtagaaagacctgagaaaacgagcctgtttcagaggaacatcgtcacaacgaatacttctggaagcttaacaaaactaaccctgctgtcctttttattgtttttaattaatatttttgttttaattgatagcaaaatagtttatgggtttggaaacttgcatgaaaatattttagccccctcagatgttcctgcagtgctgaaattcatcctacggaagtaaccgcaaaactctagagggggagttgagcaggcgccagggctgtcatcaacatggatatgacatttcacaacagtgactagttgaatcccttgtaacgtagtagttgtctgctctttgtccatgtgttaatgaggactgcaaagtcccttctgttgtgattcctaggacttttcctcaagaggaaatctggatttccacctaccgcttacctgaaatgcaggatcacctacttactgtattctacattattatatgacatagtataatgagacaatatcaaaagtaaacatgtaatgacaatacatactaacattcttgtaggagtggttagagaagctgatgcctcatttctacattctgtcattagctattatcatctaacgtttcagtgtatccttacagaaataaagcagcatatgaataacctgc

SEQ ID NO: 60505 - DNA, 1432 bp, Artificial Sequence
  derived and/or modified sequence
agtccgcagccgccgccgccaccgccgcgcctcggcctcggtgcaggcagcggccgccgccgccgagacagctgcgcgggcgagcatccccacgcagcaccttggaagttgttttcaaccatatccagcctttgccgaatacatcctatctgccacacatccagcgtgaggtccctccagctacaaggtgggcaccatggcggagaagtttgactgctgcctgaaatgctttgacaagttctgtgccaacacctgtgtggaatgccgcaagcccatcggtgcggactccaaggaggtgcactataagaaccgcttctggcatgacacctgcttccgctgtgccaagtgccttcaccccttggccaatgagacctttgtggccaaggacaacaagatcctgtgcaacaagtgcaccactcgggaggactcccccaagtgcaaggggtgcttcaaggccattgtggcaggagatcaaaacgtggagtacaaggggaccgtctggcacaaagactgcttcacctgtagtaactgcaagcaagtcatcgggactggaagcttcttccctaaaggggaggacttctactgcgtgacttgccatgagaccaagtttgccaagcattgcgtgaagtgcaacaaggccatcacatctggaggaatcacttaccaggatcagccctggcatgccgattgctttgtgtgtgttacctgctctaagaagctggctgggcagcgtttcaccgctgtggaggaccagtattactgcgtggattgctacaagaactttgtggccaagaagtgtgctggatgcaagaaccccatcactgggtttggtaaaggctccagtgtggtggcctatgaaggacaatcctggcacgactactgcttccactgcaaaaaatgctccgtgaatctggccaacaagcgctttgttttccaccaggagcaagtgtattgtcccgactgtgccaaaaagctgtaaactgacaggggctcctgtcctgtaaaatggcatttgaatctcgttctttgtgtccttactttctgccctataccatcaataggggaagagtggtccttcccttctttaaagttctccttccgtcttttctcccattttacagtattactcaaataagggcacacagtgatcatattagcatttagcaaaaagcaaccctgcagcaaagtgaatttctgtccggctgcaatttaaaaatgaaaacttaggtagattgactcttctgcatgtttctcatagagcagaaaagtgctaatcatttagccacttagtgatgtaagcaagaagcataggagataaaacccccactgagatgcctctcatgcctcagctgggacccaccgtgtagacacacgacatgcaagagttgcagcggctgctccaactcactgctcaccctcttctgtgagcagg

SEQ ID NO: 60506 - DNA, 969 bp, Artificial Sequence
  derived and/or modified sequence
atcagctggggttgagggaagactggtctaggtgctgctcctgaacttggtctctgagccatggcttcccatagacactcaggtccctccagctacaaggtgggcaccatggcggagaagtttgactgccactactgcagggatcccttgcaggggaagaagtatgtgcaaaaggatggccaccactgctgcctgaaatgctttgacaagttctgtgccaacacctgtgtggaatgccgcaagcccatcggtgcggactccaaggaggtgcactataagaaccgcttctggcatgacacctgcttccgctgtgccaagtgcaccactcgggaggactcccccaagtgcaaggggtgcttcaaggccattgtggcaggagatcaaaacgtggagtacaaggggaccgtctggcacaaagactgcttcacctgtagtaactgcaagcaagtcatcgggactggaagcttcttccctaaaggggaggacttctactgcgtgacttgccatgagaccaagtttgccaagcattgcgtgaagtgcaacaaggccatcacatctggaggaatcacttaccaggatcagccctggcatgccgattgctttgtgtgtgttacctgctctaagaagctggctgggcagcgtttcaccgctgtggaggaccagtattactgcgtggattgctacaagaactttgtggccaagaagtgtgctggatgcaagaaccccatcactgggtttggtaaaggctccagtgtggtggcctatgaaggacaatcctggcacgactactgcttccactgcaaaaaatgctccgtgaatctggccaacaagcgctttgttttccaccaggagcaagtgtattgtcccgactgtgccaaaaagctgtaaactgacaggggctcctgtcctgtaaaatggcatttgaatctcgttctttgtgtccttactttctgccctataccatcaata

SEQ ID NO: 60507 - DNA, 2888 bp, Artificial Sequence
  derived and/or modified sequence
acacctgtttcctagtgctgcagaaccctcgtcctgggatgagcctgcccgctagtctgcatcctaatcctgctgttgattggagataacttcagcggtcacagggcacctcgtctccatggcaacccctctaaatattcctctagtgacttgtgctctacattctggctggatcagagccctcctgtggcaaaatattctaaagatgttaaaagagagagagagaaaaaaaaaggctcaactaataaatctattctaaacgactgagtcatttgttttgattacccgggtgattgccaaatgttaatttaaaactgaaataggccatgagctcactcccctaacaatgctgagtgtttgagctaatacggcttgataatgagggagccagatccactgccagtgctcatgttatatgataaacagacatttggagaagtatgcagaacatcttggcagttttcctttaactctaagggttgtaaatacaaagtagaatgtgttaccatgagccatttcataggaagttgactttatttttttagaattcagaactttgcttctaaaaaggtaactttgcctcttgattctcatttttttccctaacttaggcaccttggaagttgttttcaaccatatccagcctttgccgaatacatcctatctgccacacatccagcgtgaggtccctccagctacaaggtgggcaccatggcggagaagtttgactgccactactgcagggatcccttgcaggggaagaagtatgtgcaaaaggatggccaccactgctgcctgaaatgctttgacaagttctgtgccaacacctgtgtggaatgccgcaagcccatcggtgcggactccaaggaggtgcactataagaaccgcttctggcatgacacctgcttccgctgtgccaagtgccttcaccccttggccaatgagacctttgtggccaaggacaacaagatcctgtgcaacaagtgcaccactcgggaggactcccccaagtgcaaggggtgcttcaaggccattgtggcaggagatcaaaacgtggagtacaaggggaccgtctggcacaaagactgcttcacctgtagtaactgcaagcaagtcatcgggactggaagcttcttccctaaaggggaggacttctactgcgtgacttgccatgagaccaagtttgccaagcattgcgtgaagtgcaacaaggccatcacatctggaggaatcacttaccaggatcagccctggcatgccgattgctttgtgtgtgttacctgctctaagaagctggctgggcagcgtttcaccgctgtggaggaccagtattactgcgtggattgctacaagaactttgtggccaagaagtgtgctggatgcaagaaccccatcactgggtttggtaaaggctccagtgtggtggcctatgaaggacaatcctggcacgactactgcttccactgcaaaaaatgctccgtgaatctggccaacaagcgctttgttttccaccaggagcaagtgtattgtcccgactgtgccaaaaagctgtaaactgacaggggctcctgtcctgtaaaatggcatttgaatctcgttctttgtgtccttactttctgccctataccatcaataggggaagagtggtccttcccttctttaaagttctccttccgtcttttctcccattttacagtattactcaaataagggcacacagtgatcatattagcatttagcaaaaagcaaccctgcagcaaagtgaatttctgtccggctgcaatttaaaaatgaaaacttaggtagattgactcttctgcatgtttctcatagagcagaaaagtgctaatcatttagccacttagtgatgtaagcaagaagcataggagataaaacccccactgagatgcctctcatgcctcagctgggacccaccgtgtagacacacgacatgcaagagttgcagcggctgctccaactcactgctcaccctcttctgtgagcaggaaaagaaccctactgacatgcatggtttaacttcctcatcagaactctgcccttccttctgttcttttgtgctttcaaataactaacacgaacttccagaaaattaacatttgaacttagctgtaattctaaactgacctttccccgtactaacgtttggtttccccgtgtggcatgttttctgagcgttcctactttaaagcatggaacatgcaggtgatttgggaagtgtagaaagacctgagaaaacgagcctgtttcagaggaacatcgtcacaacgaatacttctggaagcttaacaaaactaaccctgctgtcctttttattgtttttaattaatatttttgttttaattgatagcaaaatagtttatgggtttggaaacttgcatgaaaatattttagccccctcagatgttcctgcagtgctgaaattcatcctacggaagtaaccgcaaaactctagagggggagttgagcaggcgccagggctgtcatcaacatggatatgacatttcacaacagtgactagttgaatcccttgtaacgtagtagttgtctgctctttgtccatgtgttaatgaggactgcaaagtcccttctgttgtgattcctaggacttttcctcaagaggaaatctggatttccacctaccgcttacctgaaatgcaggatcacctacttactgtattctacattattatatgacatagtataatgagacaatatcaaaagtaaacatgtaatgacaatacatactaacattcttgtaggagtggttagagaagctgatgcctcatttctacattctgtcattagctattatcatctaacgtttcagtgtatccttacagaaataaagcagcatatgaataacctgc

SEQ ID NO: 60508 - DNA, 891 bp, Artificial Sequence
  derived and/or modified sequence
atggcgagccaccgccattccggcccttcgtcctacaaagtaggaacaatggcagagaagttcgattgtcactactgccgcgacccactccaggggaagaaatacgtccagaaagacggccaccactgctgtttgaaatgcttcgataaattctgtgccaatacctgcgttgagtgtcggaagcccattggcgccgattcaaaagaagtccactacaagaacaggttctggcacgacacatgctttcggtgtgctaagtgcctgcaccccttggcaaatgaaacattcgtagcaaaggacaacaagatcctgtgtaacaaatgcaccactcgggaggactctccgaaatgtaagggatgttttaaagccattgtggctggcgatcaaaacgtcgaatataagggcactgtctggcataaagattgtttcacttgctcgaactgtaagcaagtgattggaacagggtccttttttcccaagggcgaggacttttactgcgtgacatgtcatgagaccaaattcgcgaaacattgcgtgaagtgtaacaaggcgattactagcggtggcatcacctaccaggaccagccgtggcacgcagattgctttgtctgcgtgacctgtagcaagaagctggccggccagagatttaccgccgtggaggaccagtactactgcgtggattgttacaagaacttcgtcgccaagaagtgcgccgggtgtaaaaatcctattaccggctttggaaagggtagcagcgtggtggcctacgagggacagtcatggcacgattattgttttcactgtaaaaagtgtagtgtgaatctggccaacaagagattcgttttccatcaggagcaggtgtattgcccagactgcgcgaagaaactctag

SEQ ID NO: 60509 - DNA, 963 bp, Artificial Sequence
  derived and/or modified sequence
atgagccattttatactccggcaccttggctcgtgcttccagccctaccctgcctttgctgagtatattctgagcgcaacccaccccgcgtccggcccatcttcctacaaagtgggaactatggccgagaagtttgattgtcattattgcagagatcccctgcagggcaaaaaatacgtgcagaaagacggccatcattgttgcctgaaatgctttgataagttctgtgccaacacgtgcgtggagtgtagaaaaccgatcggcgctgatagcaaggaagtgcactataaaaaccgcttttggcatgacacctgttttcggtgcgcaaagtgcctgcatccgttggctaacgaaacgttcgtggccaaagataacaagattctgtgcaataaatgtacaacacgggaagacagcccgaaatgcaaaggatgcttcaaagccatagtcgccggagaccagaatgtcgaatacaaagggactgtatggcacaaggattgttttacatgcagcaattgcaagcaagtaatcggcaccggctccttctttccaaagggcgaggatttttactgtgtcacctgccacgaaaccaagtttgctaagcattgcgtcaagtgtaataaggccataacatccggaggtatcacctaccaggatcagccgtggcacgctgactgtttcgtgtgcgtgacctgttctaaaaagctcgccggacagcgtttcaccgctgttgaagaccaatattactgcgtagattgttacaagaactttgtagcaaagaagtgtgccggctgtaaaaaccccattaccgggtttgggaaaggatcatcagttgttgcctacgagggtcagtcttggcacgattactgcttccactgcaaaaagtgttctgtcaatctggccaacaagcgcttcgtgtttcatcaggagcaagtgtattgccccgattgcgccaaaaagctgtag

SEQ ID NO: 60510 - DNA, 828 bp, Artificial Sequence
  derived and/or modified sequence
atggcctctcatagacatagcggtccatcttcgtataaggtgggtacaatggctgaaaagttcgactgtcactactgtcgggatccgttgcaaggcaaaaagtacgtgcagaaagatggccatcattgctgtctcaaatgctttgacaagttctgcgcgaacacgtgtgtggaatgccgcaaaccgatcggtgccgactctaaggaggtgcattacaagaatcggttctggcacgacacatgctttaggtgcgctaagtgcacaacgagggaggatagcccaaagtgtaagggatgcttcaaggccatcgtcgccggggaccagaacgttgaatacaagggcacagtgtggcacaaagactgtttcacctgctccaactgcaaacaagtcatcggcacaggttccttcttccctaaaggagaagacttctattgcgtgacttgtcacgagactaaattcgccaagcattgcgttaagtgtaataaagctattacttccggaggcattacctatcaggaccagccttggcacgccgactgttttgtgtgcgtgacatgctcaaagaaattggccgggcagcgattcaccgccgtagaggatcaatactattgcgtggattgttacaagaattttgtggccaaaaaatgtgctggctgcaaaaacccgatcactgggtttggcaaaggatcatctgtggtggcttatgaaggccagtcttggcacgactactgtttccactgcaagaagtgttcggttaatctggccaacaaacgctttgttttccatcaagaacaagtctattgcccagattgtgctaagaagttgtag

SEQ ID NO: 60511 - DNA, 891 bp, Artificial Sequence
  derived and/or modified sequence
atggccagccaccgccacagcggccccagcagctacaaggtgggcaccatggccgagaagtttgactgccactactgccgggaccccctgcagggcaagaagtatgtgcagaaggatggccaccactgctgcctgaagtgctttgacaagttctgtgccaacacctgtgtggagtgcaggaagcccatcggggctgacagcaaggaggtgcactacaagaaccgcttctggcatgacacctgcttccgctgtgccaagtgcctgcaccccctggccaatgagacctttgtggccaaggacaacaagatcctgtgcaacaagtgcaccacccgggaggacagccccaagtgcaagggctgcttcaaggccatcgtggccggggaccagaatgtggagtacaagggcaccgtgtggcacaaggactgcttcacctgcagcaactgcaagcaggtgattggcaccggcagcttcttccccaagggggaggacttctactgtgtgacctgccacgagaccaagtttgccaagcactgtgtgaagtgcaacaaggccatcaccagcggcggcatcacctaccaggaccagccctggcatgctgactgctttgtgtgtgtgacctgcagcaagaagctggccggccagcgcttcaccgctgtggaggaccagtactactgtgtggactgctacaagaactttgtggccaagaagtgtgccggctgcaagaaccccatcactggatttgggaagggcagctctgtggtggcctatgagggccagagctggcatgactactgcttccactgcaagaagtgcagcgtgaacctggccaacaagagatttgtgttccaccaggagcaggtgtactgcccagactgtgccaagaagctgtag

SEQ ID NO: 60512 - DNA, 963 bp, Artificial Sequence
  derived and/or modified sequence
atgagccacttcatcctgcggcacctgggcagctgcttccagccctacccagcctttgctgagtacatcctgagcgccacccacccagccagcggccccagcagctacaaggtgggcaccatggccgagaagtttgactgccactactgccgggaccccctgcagggcaagaagtatgtgcagaaggatggccaccactgctgcctgaagtgctttgacaagttctgtgccaacacctgtgtggagtgcaggaagcccatcggggctgacagcaaggaggtgcactacaagaaccgcttctggcatgacacctgcttccgctgtgccaagtgcctgcaccccctggccaatgagacctttgtggccaaggacaacaagatcctgtgcaacaagtgcaccacccgggaggacagccccaagtgcaagggctgcttcaaggccatcgtggccggggaccagaatgtggagtacaagggcaccgtgtggcacaaggactgcttcacctgcagcaactgcaagcaggtgattggcaccggcagcttcttccccaagggggaggacttctactgtgtgacctgccacgagaccaagtttgccaagcactgtgtgaagtgcaacaaggccatcaccagcggcggcatcacctaccaggaccagccctggcatgctgactgctttgtgtgtgtgacctgcagcaagaagctggccggccagcgcttcaccgctgtggaggaccagtactactgtgtggactgctacaagaactttgtggccaagaagtgtgccggctgcaagaaccccatcactggatttgggaagggcagctctgtggtggcctatgagggccagagctggcatgactactgcttccactgcaagaagtgcagcgtgaacctggccaacaagagatttgtgttccaccaggagcaggtgtactgcccagactgtgccaagaagctgtag

SEQ ID NO: 60513 - DNA, 828 bp, Artificial Sequence
  derived and/or modified sequence
atggccagccaccgccacagcggccccagcagctacaaggtgggcaccatggccgagaagtttgactgccactactgccgggaccccctgcagggcaagaagtatgtgcagaaggatggccaccactgctgcctgaagtgctttgacaagttctgtgccaacacctgtgtggagtgcaggaagcccatcggggctgacagcaaggaggtgcactacaagaaccgcttctggcatgacacctgcttccgctgtgccaagtgcaccacccgggaggacagccccaagtgcaagggctgcttcaaggccatcgtggccggggaccagaatgtggagtacaagggcaccgtgtggcacaaggactgcttcacctgcagcaactgcaagcaggtgattggaacaggcagcttcttccccaagggggaggacttctactgtgtgacctgccacgagaccaagtttgccaagcactgtgtgaagtgcaacaaggccatcaccagcggcggcatcacctaccaggaccagccctggcacgccgactgctttgtgtgtgtgacctgcagcaagaagctggccggccagcgcttcaccgctgtggaggaccagtactactgtgtggactgctacaagaactttgtggccaagaagtgtgccggctgcaagaaccccatcaccggctttgggaagggcagctctgtggtggcctatgagggccagagctggcatgactactgcttccactgcaagaagtgcagcgtgaacctggccaacaagagatttgtgttccaccaggagcaggtgtactgcccagactgtgccaagaagctgtag

SEQ ID NO: 60514 - DNA, 891 bp, Artificial Sequence
  derived and/or modified sequence
atggccagccaccggcacagcggccccagcagctacaaggtgggcaccatggcagagaaattcgattgtcactactgccgcgacccactgcaaggaaaaaaatatgtccagaaggacggccatcactgctgcctcaagtgttttgataagttctgtgcaaatacctgcgtcgagtgccggaagccaatcggggctgatagcaaagaggtgcactacaagaaccgattctggcacgacacatgtttccgctgcgcaaagtgtttacaccccttagcaaatgagaccttcgtcgctaaggacaacaagatcctatgcaacaagtgtactacaagggaggactcacccaagtgtaaagggtgttttaaggcgattgtggcgggggaccaaaacgtggaatacaaaggcaccgtatggcacaaggattgctttacatgttctaattgtaagcaggttataggcacaggctcgttcttcccaaaaggagaagacttctattgcgtcacttgtcacgagaccaaattcgccaaacactgcgtgaagtgtaataaagccataacctcaggcggcattacttaccaagatcagccttggcacgcagactgtttcgtgtgtgtgacctgctctaaaaaattagccggtcaaagatttacggcagttgaagaccagtactattgcgtcgattgctataagaattttgtggctaagaaatgtgcaggctgcaaaaaccctataaccgggttcggcaagggaagttcagtggtggcatacgaagggcagagttggcatgattattgtttccactgcaagaagtgttccgtgaatcttgccaataaacggttcgtgtttcaccaagaacaggtgtattgccctgactgcgccaaaaagctgtag

SEQ ID NO: 60515 - DNA, 963 bp, Artificial Sequence
  derived and/or modified sequence
atgagccacttcatcctgcggcacctgggcagctgcttccagccctatccagcctttgcggaatacatattgtccgctacacacccagcatcgggtcctagttcttacaaggtcggaacaatggccgaaaagttcgactgccattattgtcgggaccctctgcaaggcaaaaagtatgtccagaaggatggccaccactgctgcttgaagtgctttgacaaattttgtgcaaacacgtgtgttgagtgccgtaaacccattggcgctgacagcaaggaagtgcactacaagaaccgattctggcacgatacatgctttaggtgtgctaagtgtttgcatcccctggcaaacgaaacattcgtagcaaaggataacaagattctgtgcaacaagtgcacaactcgagaggattcccctaaatgcaaggggtgcttcaaggccatcgttgcgggtgaccagaacgtggaatacaaggggacggtgtggcacaaggattgcttcacctgctccaattgtaaacaggtgataggtacaggatcattctttccaaaaggagaagatttctactgcgtgacgtgccatgagaccaaatttgctaaacattgcgtgaagtgtaataaggccataacttctgggggaatcacataccaggatcaaccatggcatgcggattgctttgtgtgcgtgacgtgcagtaagaagctggccggccaacggtttacagctgtggaggatcagtattattgcgtggattgctacaagaatttcgtggccaagaaatgtgccgggtgcaagaacccaattaccggatttggaaaaggctccagcgtagtggcgtacgaaggacagtcttggcacgactattgctttcactgcaagaagtgctctgtgaacctcgcgaataaaagattcgtgtttcaccaggaacaggtgtactgtcccgattgcgccaaaaagctatag

SEQ ID NO: 60516 - DNA, 828 bp, Artificial Sequence
  derived and/or modified sequence
atggccagccaccggcacagcggccccagcagctacaaggtgggcacaatggctgaaaagttcgactgtcattattgccgcgatccgttgcaaggcaagaagtacgttcagaaagatggacatcactgttgcctgaaatgcttcgacaagttttgtgctaacacatgcgttgaatgtagaaagcccatcggcgcggattcgaaagaggtgcactacaagaatagattctggcacgacacctgctttagatgcgccaaatgcacaacgcgcgaagatagtcctaaatgtaaaggctgtttcaaagcaatcgtcgctggagaccagaacgttgagtataagggaaccgtgtggcacaaagactgcttcacatgttccaactgtaagcaagtgattggcaccggatctttctttcccaagggcgaggacttctattgcgtcacctgccatgagactaaattcgctaaacactgtgtgaagtgtaacaaggcgatcaccagtggcgggataacttatcaagaccagccctggcacgcagattgcttcgtttgtgtaacgtgctccaagaaactcgcaggtcaacgctttacagctgttgaagatcagtactattgcgtcgactgctacaagaattttgtcgcaaaaaagtgcgcagggtgcaagaacccgattaccggattcggaaaaggctctagcgtcgtggcttacgaagggcagtcatggcacgactactgcttccactgtaaaaaatgctccgtaaacctagctaacaagaggtttgtgtttcatcaggagcaagtatactgtccggactgcgctaaaaagctatag

SEQ ID NO: 60517 - DNA, 891 bp, Artificial Sequence
  derived and/or modified sequence
atggcatcccacaggcacagtggaccaagttcatacaaggtggggactatggcagaaaagtttgattgccactactgtagagaccctctgcagggcaagaagtacgttcagaaggacggccatcactgttgtttaaagtgtttcgataagttctgcgccaacacctgcgtcgagtgcaggaaaccgatcggcgctgacagcaaggaagtacactacaagaaccggttttggcatgatacatgttttagatgtgcaaagtgtctgcatccgctggctaacgagacctttgtggccaaagacaacaagattctctgcaataaatgcaccaccagggaggatagcccgaaatgcaaggggtgcttcaaggctatcgtagctggcgaccagaatgttgagtataagggcacagtgtggcacaaggactgttttacatgctcgaactgcaagcaggtgatcggcacaggctctttttttccaaagggagaggacttttactgtgtcacatgccatgagacgaagtttgcaaagcactgcgtgaagtgtaacaaagcaattaccagtgggggaattacctatcaagaccagccctggcatgctgattgttttgtctgcgtcacgtgtagtaagaagctggccggtcagcggttcacagccgttgaggaccaatattactgtgtggactgttataagaatttcgtagcaaagaagtgtgccggatgtaagaatcctatcaccgggttcgggaagggttcatctgttgtagcttacgagggacagtcttggcacgattattgtttccattgtaagaagtgttctgtgaacctggccaacaagcgctttgtgtttcatcaagagcaagtctactgccctgattgcgcaaaaaaattgtag

SEQ ID NO: 60518 - DNA, 963 bp, Artificial Sequence
  derived and/or modified sequence
atgagccacttcatcctcagacacctgggctcctgctttcagccctatcccgctttcgcggaatatatcctttctgcgacacatcccgcaagcggtccatcatcctacaaagtcggcacgatggcagaaaagttcgactgccactattgcagggacccgctgcaggggaaaaagtacgtccagaaagacggacatcactgttgcctgaaatgcttcgataagttttgcgcaaacacttgcgtggagtgtaggaaaccaatcggcgcagacagtaaagaagtacactataaaaaccggttctggcatgatacctgttttagatgtgccaagtgtctgcatcctctcgctaacgagacgttcgtcgcaaaggataacaaaatactgtgtaataaatgcactacacgggaggattcccccaagtgtaaagggtgtttcaaggccattgtggcaggggaccagaacgtggaatataaagggaccgtgtggcacaaagactgctttacctgttcgaattgtaagcaggtgatcggaaccggatccttcttcccaaagggcgaagacttctactgcgtcacctgtcatgaaacgaagttcgctaaacactgcgtgaagtgcaacaaagccataacctctggcggtatcacataccaggatcagccgtggcacgcggactgcttcgtgtgcgtcacttgctctaaaaagctggcgggtcaacggttcacagccgtggaagaccagtactactgtgttgactgctataagaatttcgtggcgaaaaagtgtgccggatgcaaaaatccaattactggatttgggaagggctcttccgtagtcgcttatgagggacaatcctggcatgactattgctttcactgtaaaaagtgcagtgtcaacctcgccaataaaagatttgtgttccaccaggagcaggtctattgccccgattgtgccaaaaagctgtag

SEQ ID NO: 60519 - DNA, 828 bp, Artificial Sequence
  derived and/or modified sequence
atggcctcccaccggcactcagggccatcttcctataaggtggggacaatggccgagaagttcgattgtcactactgtagggacccacttcagggaaagaagtacgtgcagaaggacgggcatcactgctgcttgaaatgctttgataaattttgtgccaacacgtgcgtcgagtgtcgcaagcccatcggagccgattccaaggaagtccactacaagaaccggttctggcacgacacttgctttagatgtgcaaagtgtactacacgggaagacagccctaagtgcaaggggtgcttcaaggccatagtggcaggagaccagaacgtcgagtataaagggactgtttggcacaaagactgctttacatgctcaaattgtaaacaggttattgggacaggctcattttttcctaaaggggaggatttttactgtgtcacatgtcacgagacaaagtttgcaaagcattgcgtgaaatgtaacaaagccatcacctctggagggattacctaccaagaccagccatggcatgccgattgtttcgtatgcgttacttgtagcaaaaagctggccggacagcgtttcaccgccgtggaggaccagtattattgcgtggattgctataagaacttcgtcgcgaagaaatgcgctggatgtaaaaatcctattacgggcttcggtaaaggaagttcagtggtggcgtacgaagggcagtcctggcacgattactgcttccactgcaagaagtgctccgtgaatctagccaacaagcgctttgtgtttcatcaggagcaggtttattgtcctgattgtgccaagaagttatag

SEQ ID NO: 60520 - DNA, 891 bp, Artificial Sequence
  derived and/or modified sequence
atggccagccacagacacagcggccccagcagctacaaggtgggcaccatggccgagaagttcgactgccactactgcagagaccccctgcagggcaagaagtacgtgcagaaggacggccaccactgctgcctgaagtgcttcgacaagttctgcgccaacacctgcgtggagtgcagaaagcccatcggcgccgacagcaaggaggtgcactacaagaacagattctggcacgacacctgcttcagatgcgccaagtgcctgcaccccctggccaacgagaccttcgtggccaaggacaacaagatcctgtgcaacaagtgcaccaccagagaggacagccccaagtgcaagggctgcttcaaggccatcgtggccggcgaccagaacgtggagtacaagggcaccgtgtggcacaaggactgcttcacctgcagcaactgcaagcaggtgatcggcaccggcagcttcttccccaagggcgaggacttctactgcgtgacctgccacgagaccaagttcgccaagcactgcgtgaagtgcaacaaggccatcaccagcggcggcatcacctaccaggaccagccctggcacgccgactgcttcgtgtgcgtgacctgcagcaagaagctggccggccagagattcaccgccgtggaggaccagtactactgcgtggactgctacaagaacttcgtggccaagaagtgcgccggctgcaagaaccccatcaccggcttcggcaagggcagcagcgtggtggcctacgagggccagagctggcacgactactgcttccactgcaagaagtgcagcgtgaacctggccaacaagagattcgtgttccaccaggagcaggtgtactgccccgactgcgccaagaagctgtag

SEQ ID NO: 60521 - DNA, 963 bp, Artificial Sequence
  derived and/or modified sequence
atgagccacttcatcctgagacacctgggcagctgcttccagccctaccccgccttcgccgagtacatcctgagcgccacccaccccgccagcggccccagcagctacaaggtgggcaccatggccgagaagttcgactgccactactgcagagaccccctgcagggcaagaagtacgtgcagaaggacggccaccactgctgcctgaagtgcttcgacaagttctgcgccaacacctgcgtggagtgcagaaagcccatcggcgccgacagcaaggaggtgcactacaagaacagattctggcacgacacctgcttcagatgcgccaagtgcctgcaccccctggccaacgagaccttcgtggccaaggacaacaagatcctgtgcaacaagtgcaccaccagagaggacagccccaagtgcaagggctgcttcaaggccatcgtggccggcgaccagaacgtggagtacaagggcaccgtgtggcacaaggactgcttcacctgcagcaactgcaagcaggtgatcggcaccggcagcttcttccccaagggcgaggacttctactgcgtgacctgccacgagaccaagttcgccaagcactgcgtgaagtgcaacaaggccatcaccagcggcggcatcacctaccaggaccagccctggcacgccgactgcttcgtgtgcgtgacctgcagcaagaagctggccggccagagattcaccgccgtggaggaccagtactactgcgtggactgctacaagaacttcgtggccaagaagtgcgccggctgcaagaaccccatcaccggcttcggcaagggcagcagcgtggtggcctacgagggccagagctggcacgactactgcttccactgcaagaagtgcagcgtgaacctggccaacaagagattcgtgttccaccaggagcaggtgtactgccccgactgcgccaagaagctgtag

SEQ ID NO: 60522 - DNA, 828 bp, Artificial Sequence
  derived and/or modified sequence
atggccagccacagacacagcggccccagcagctacaaggtgggcaccatggccgagaagttcgactgccactactgcagagaccccctgcagggcaagaagtacgtgcagaaggacggccaccactgctgcctgaagtgcttcgacaagttctgcgccaacacctgcgtggagtgcagaaagcccatcggcgccgacagcaaggaggtgcactacaagaacagattctggcacgacacctgcttcagatgcgccaagtgcaccaccagagaggacagccccaagtgcaagggctgcttcaaggccatcgtggccggcgaccagaacgtggagtacaagggcaccgtgtggcacaaggactgcttcacctgcagcaactgcaagcaggtgatcggcaccggcagcttcttccccaagggcgaggacttctactgcgtgacctgccacgagaccaagttcgccaagcactgcgtgaagtgcaacaaggccatcaccagcggcggcatcacctaccaggaccagccctggcacgccgactgcttcgtgtgcgtgacctgcagcaagaagctggccggccagagattcaccgccgtggaggaccagtactactgcgtggactgctacaagaacttcgtggccaagaagtgcgccggctgcaagaaccccatcaccggcttcggcaagggcagcagcgtggtggcctacgagggccagagctggcacgactactgcttccactgcaagaagtgcagcgtgaacctggccaacaagagattcgtgttccaccaggagcaggtgtactgccccgactgcgccaagaagctgtag

SEQ ID NO: 60523 - protein, 257 aa, Artificial Sequence
  derived and/or modified sequence
MAEKFDCHYCRDPLQGKKYVQKDGHHCCLKCFDKFCANTCVECRKPIGADSKEVHYKNRFWHDTCFRCAKCLHPLANETFVAKDNKILCNKCTTREDSPKCKGCFKAIVAGDQNVEYKGTVWHKDCFTCSNCKQVIGTGSFFPKGEDFYCVTCHETKFAKHCVKCNKAITSGGITYQDQPWHADCFVCVTCSKKLAGQRFTAVEDQYYCVDCYKNFVAKKCAGCKNPITGFGKGSSVVAYEGQSWHDYCFHCKKCSV

SEQ ID NO: 60524 - protein, 280 aa, Artificial Sequence
  derived and/or modified sequence
MAEKFDCHYCRDPLQGKKYVQKDGHHCCLKCFDKFCANTCVECRKPIGADSKEVHYKNRFWHDTCFRCAKCLHPLANETFVAKDNKILCNKCTTREDSPKCKGCFKAIVAGDQNVEYKGTVWHKDCFTCSNCKQVIGTGSFFPKGEDFYCVTCHETKFAKHCVKCNKAITSGGITYQDQPWHADCFVCVTCSKKLAGQRFTAVEDQYYCVDCYKNFVAKKCAGCKNPITGFGKGSSVVAYEGQSWHDYCFHCKKCSVNLANKRFVFHQEQVYCPDCAKKL

SEQ ID NO: 60525 - protein, 260 aa, Artificial Sequence [sequence omitted]

SEQ ID NO: 60526 - protein, 309 aa, Artificial Sequence
  derived and/or modified sequence
MTFYVASLALELIWMLSSPAGPSSYKVGTMAEKFDCHYCRDPLQGKKYVQKDGHHCCLKCFDKFCANTCVECRKPIGADSKEVHYKNRFWHDTCFRCAKCLHPLANETFVAKDNKILCNKCTTREDSPKCKGCFKAIVAGDQNVEYKGTVWHKDCFTCSNCKQVIGTGSFFPKGEDFYCVTCHETKFAKHCVKCNKAITSGGITYQDQPWHADCFVCVTCSKKLAGQRFTAVEDQYYCVDCYKNFVAKKCAGCKNPITGFGKGSSVVAYEGQSWHDYCFHCKKCSVNLANKRFVFHQEQVYCPDCAKKL

SEQ ID NO: 60527 - DNA, 2313 bp, Artificial Sequence
  derived and/or modified sequence
agcgttaagctatgccagagccgagtccaaattttattccggtacagggatgactttctatgtggcctctctggctctggagctaatttggatgctgagtagccccgcaggtccctccagctacaaggtgggcaccatggcggagaagtttgactgccactactgcagggatcccttgcaggggaagaagtatgtgcaaaaggatggccaccactgctgcctgaaatgctttgacaagttctgtgccaacacctgtgtggaatgccgcaagcccatcggtgcggactccaaggaggtgcactataagaaccgcttctggcatgacacctgcttccgctgtgccaagtgccttcaccccttggccaatgagacctttgtggccaaggacaacaagatcctgtgcaacaagtgcaccactcgggaggactcccccaagtgcaaggggtgcttcaaggccattgtggcaggagatcaaaacgtggagtacaaggggaccgtctggcacaaagactgcttcacctgtagtaactgcaagcaagtcatcgggactggaagcttcttccctaaaggggaggacttctactgcgtgacttgccatgagaccaagtttgccaagcattgcgtgaagtgcaacaaggccatcacatctggaggaatcacttaccaggatcagccctggcatgccgattgctttgtgtgtgttacctgctctaagaagctggctgggcagcgtttcaccgctgtggaggaccagtattactgcgtggattgctacaagaactttgtggccaagaagtgtgctggatgcaagaaccccatcactgggtttggtaaaggctccagtgtggtggcctatgaaggacaatcctggcacgactactgcttccactgcaaaaaatgctccgtgaatctggccaacaagcgctttgttttccaccaggagcaagtgtattgtcccgactgtgccaaaaagctgtaaactgacaggggctcctgtcctgtaaaatggcatttgaatctcgttctttgtgtccttactttctgccctataccatcaataggggaagagtggtccttcccttctttaaagttctccttccgtcttttctcccattttacagtattactcaaataagggcacacagtgatcatattagcatttagcaaaaagcaaccctgcagcaaagtgaatttctgtccggctgcaatttaaaaatgaaaacttaggtagattgactcttctgcatgtttctcatagagcagaaaagtgctaatcatttagccacttagtgatgtaagcaagaagcataggagataaaacccccactgagatgcctctcatgcctcagctgggacccaccgtgtagacacacgacatgcaagagttgcagcggctgctccaactcactgctcaccctcttctgtgagcaggaaaagaaccctactgacatgcatggtttaacttcctcatcagaactctgcccttccttctgttcttttgtgctttcaaataactaacacgaacttccagaaaattaacatttgaacttagctgtaattctaaactgacctttccccgtactaacgtttggtttccccgtgtggcatgttttctgagcgttcctactttaaagcatggaacatgcaggtgatttgggaagtgtagaaagacctgagaaaacgagcctgtttcagaggaacatcgtcacaacgaatacttctggaagcttaacaaaactaaccctgctgtcctttttattgtttttaattaatatttttgttttaattgatagcaaaatagtttatgggtttggaaacttgcatgaaaatattttagccccctcagatgttcctgcagtgctgaaattcatcctacggaagtaaccgcaaaactctagagggggagttgagcaggcgccagggctgtcatcaacatggatatgacatttcacaacagtgactagttgaatcccttgtaacgtagtagttgtctgctctttgtccatgtgttaatgaggactgcaaagtcccttctgttgtgattcctaggacttttcctcaagaggaaatctggatttccacctaccgcttacctgaaatgcaggatcacctacttactgtattctacattattatatgacatagtataatgagacaatatcaaaagtaaacatgtaatgacaatacatactaacattcttgtaggagtggttagagaagctgatgcctcatttctacattctgtcattagctattatcatctaacgtttcagtgtatccttacagaaataaagcagcatatgaataacctgc

SEQ ID NO: 60528 - DNA, 930 bp, Artificial Sequence
  derived and/or modified sequence
atgacattttacgtcgccagcctggcgcttgagctcatctggatgttaagctcccccgcagggccatcaagctacaaagtcggcacgatggcagaaaagttcgattgccattattgtagagacccactccaggggaagaaatatgttcagaaggatggccatcactgctgcctgaagtgtttcgataaattttgcgccaacacctgcgttgagtgtagaaaacctattggcgcagattctaaggaggtgcactacaaaaacaggttctggcacgatacttgcttcagatgtgcgaagtgtctccaccccctggccaacgaaaccttcgttgccaaagataataagatcttgtgtaacaagtgcaccacacgtgaagacagcccaaaatgcaaaggctgctttaaggctatcgtagccggggatcaaaatgttgaatataaagggacagtttggcacaaagactgcttcacctgctctaattgtaaacaggtgattgggaccggcagtttcttccccaagggtgaggacttttattgcgtgacttgccacgagacaaaatttgcgaagcattgcgttaagtgcaataaagctataacctccggcggtattacataccaggatcagccctggcatgcagactgttttgtatgcgtaacttgctcaaaaaaactggctggacagagattcacagcagtcgaagaccagtactattgcgttgactgttacaagaattttgtcgcaaagaagtgtgccggttgcaagaaccccatcacaggattcggtaagggcagcagtgtggtcgcctacgagggacagagctggcatgactactgttttcactgcaagaaatgtagcgtcaatctggcgaataaaagatttgtgtttcatcaagaacaagtgtattgtcccgattgcgccaagaagctgtag

SEQ ID NO: 60529 - DNA, 930 bp, Artificial Sequence
  derived and/or modified sequence
atgaccttctacgtggccagcctggccctggagctgatctggatgctgagcagccctgctggccccagcagctacaaggtgggcaccatggccgagaagtttgactgccactactgccgggaccccctgcagggcaagaagtatgtgcagaaggatggccaccactgctgcctgaagtgctttgacaagttctgtgccaacacctgtgtggagtgcaggaagcccatcggggctgacagcaaggaggtgcactacaagaaccgcttctggcatgacacctgcttccgctgtgccaagtgcctgcaccccctggccaatgagacctttgtggccaaggacaacaagatcctgtgcaacaagtgcaccacccgggaggacagccccaagtgcaagggctgcttcaaggccatcgtggccggggaccagaatgtggagtacaagggcaccgtgtggcacaaggactgcttcacctgcagcaactgcaagcaggtgattggaacaggcagcttcttccccaagggggaggacttctactgtgtgacctgccacgagaccaagtttgccaagcactgtgtgaagtgcaacaaggccatcaccagcggcggcatcacctaccaggaccagccctggcacgccgactgctttgtgtgtgtgacctgcagcaagaagctggccggccagcgcttcaccgctgtggaggaccagtactactgtgtggactgctacaagaactttgtggccaagaagtgtgccggctgcaagaaccccatcaccggctttgggaagggcagctctgtggtggcctatgagggccagagctggcatgactactgcttccactgcaagaagtgcagcgtgaacctggccaacaagagatttgtgttccaccaggagcaggtgtactgcccagactgtgccaagaagctgtag

SEQ ID NO: 60530 - DNA, 930 bp, Artificial Sequence
  derived and/or modified sequence
atgaccttctacgtggccagcctggccctggagctgatctggatgctgtcctcccctgccggtccaagttcctacaaggtgggaacaatggccgagaaatttgactgtcactattgcagggacccattgcagggtaagaagtacgtacaaaaggacggacaccactgctgcctaaaatgctttgacaaattctgcgcaaatacctgtgttgaatgccgcaagccaattggcgctgattccaaggaggtgcattacaaaaataggttttggcatgatacttgcttcaggtgtgctaaatgcctgcatcctctggcaaacgagacctttgtggccaaagataacaaaatcttgtgtaacaagtgtacaactcgggaggattctcctaaatgcaaggggtgttttaaagctatcgttgcaggagaccagaacgttgaatacaagggaacagtttggcacaaggattgctttacatgctctaattgtaaacaggtgatcggaacgggatccttcttcccaaaaggagaggacttttactgcgtgacatgtcacgagaccaaattcgccaagcactgtgtcaagtgtaacaaggccatcacctccggaggaatcacataccaggatcagccttggcatgcagactgttttgtctgcgtaacttgtagtaagaaactggccggtcagagatttacagcagtggaagaccaatactactgcgtggattgttacaagaattttgtggccaagaagtgtgccggctgcaaaaatccaatcacagggttcggaaaggggagctctgtcgtggcttacgagggacagtcgtggcatgattattgcttccactgtaagaagtgttccgtgaacctggcaaataagcgattcgtctttcatcaggaacaggtgtactgtccagattgcgccaaaaaactctag

SEQ ID NO: 60531 - DNA, 930 bp, Artificial Sequence
  derived and/or modified sequence
atgacattttacgtcgccagtttagcactggagctgatttggatgctgagcagcccggctgggccttccagctataaagttgggaccatggccgagaagttcgattgccattactgtagagacccactccagggaaagaagtacgtgcagaaagatggccatcactgttgtctcaaatgctttgataagttctgcgctaacacctgcgtggagtgtagaaagcctatcggcgctgacagtaaggaagtccattataaaaacaggttttggcatgatacttgctttcggtgcgcaaaatgtctccacccactggctaacgaaaccttcgtggccaaagataacaagatcctatgtaacaagtgcaccacaagagaagattctccaaaatgtaaggggtgcttcaaggctattgtggccggagaccagaacgtggaatacaagggtacggtatggcacaaagattgttttacatgctccaattgtaagcaggtaatcggaacgggatccttcttccctaaaggggaagatttctattgcgtcacctgtcacgaaacaaagttcgctaaacactgcgtaaaatgtaataaggcaatcacttctggcggaattacttaccaggaccagccctggcatgcggactgctttgtttgcgtgacttgctcaaagaagctggcagggcagagatttactgcggtagaagaccaatactactgcgtcgactgctataagaacttcgtggccaagaagtgcgccggttgcaaaaaccccattaccgggttcggcaaaggttcttccgtggtcgcgtacgaggggcaaagttggcacgactattgtttccattgtaaaaagtgttctgttaacttggcaaacaagagattcgtcttccaccaggagcaggtctattgccccgattgtgctaaaaaactgtag

SEQ ID NO: 60532 - DNA, 930 bp, Artificial Sequence
  derived and/or modified sequence
atgaccttctacgtggccagcctggccctggagctgatctggatgctgagcagccccgccggccccagcagctacaaggtgggcaccatggccgagaagttcgactgccactactgcagagaccccctgcagggcaagaagtacgtgcagaaggacggccaccactgctgcctgaagtgcttcgacaagttctgcgccaacacctgcgtggagtgcagaaagcccatcggcgccgacagcaaggaggtgcactacaagaacagattctggcacgacacctgcttcagatgcgccaagtgcctgcaccccctggccaacgagaccttcgtggccaaggacaacaagatcctgtgcaacaagtgcaccaccagagaggacagccccaagtgcaagggctgcttcaaggccatcgtggccggcgaccagaacgtggagtacaagggcaccgtgtggcacaaggactgcttcacctgcagcaactgcaagcaggtgatcggcaccggcagcttcttccccaagggcgaggacttctactgcgtgacctgccacgagaccaagttcgccaagcactgcgtgaagtgcaacaaggccatcaccagcggcggcatcacctaccaggaccagccctggcacgccgactgcttcgtgtgcgtgacctgcagcaagaagctggccggccagagattcaccgccgtggaggaccagtactactgcgtggactgctacaagaacttcgtggccaagaagtgcgccggctgcaagaaccccatcaccggcttcggcaagggcagcagcgtggtggcctacgagggccagagctggcacgactactgcttccactgcaagaagtgcagcgtgaacctggccaacaagagattcgtgttccaccaggagcaggtgtactgccccgactgcgccaagaagctgtag

SEQ ID NO: 60533 - DNA, 426 bp, Artificial Sequence
  derived and/or modified sequence
atggcagaaaagtttgactgtcattactgtagagaccccctccagggtaaaaagtacgtgcaaaaagacggacaccactgttgtctgaaatgttttgataaattttgcgcaaatacttgcgtggagtgccgcaagcctatcggagctgactctaaagaggtgcattacaagaacagattttggcacgacacatgtttccgttgcgccaagtgcctgcaccctcttgccaatgagacgttcgtggccaaggacaataaaatattgtgtaataagtgtactacccgtgaggactcccccaaatgcaaggggtgcttcaaggccatcgtagccggtgaccaaaacgtcgagtacaagggaacggtttggcacaaggactgtttcacatgctcaaactgtaaacaggtgataggaaccggatccttctag

SEQ ID NO: 60534 - DNA, 468 bp, Artificial Sequence
  derived and/or modified sequence
atggctgaaaaatttgactgtcactattgcagagatcctctgcaggggaaaaagtacgtgcagaaggacggccatcattgttgcctgaaatgttttgacaagttttgcgccaatacctgtgtggaatgcagaaagcccataggagcagactcgaaggaggtgcattataagaacaggttttggcatgatacatgtttccggtgcgctaagtgcctccaccccctcgcaaatgagaccttcgtcgccaaggataacaagattttgtgtaataagtgtacaacccgggaggattcccccaagtgcaagggatgttttaaggccatcgttgctggcgatcaaaacgttgaatataaaggaaccgtctggcataaagactgttttacgtgtagcaactgtaaacaggtcatcggaacaggctcctttttccctaagggcgaagatttttattgcgtaacttgtcatgagtag

SEQ ID NO: 60535 - DNA, 426 bp, Artificial Sequence
  derived and/or modified sequence
atggccgagaagtttgactgccactactgccgggaccccctgcagggcaagaagtatgtgcagaaggatggccaccactgctgcctgaagtgctttgacaagttctgtgccaacacctgtgtggagtgcaggaagcccatcggggctgacagcaaggaggtgcactacaagaaccgcttctggcatgacacctgcttccgctgtgccaagtgcctgcaccccctggccaatgagacctttgtggccaaggacaacaagatcctgtgcaacaagtgcaccacccgggaggacagccccaagtgcaagggctgcttcaaggccatcgtggccggggaccagaatgtggagtacaagggcaccgtgtggcacaaggactgcttcacctgcagcaactgcaagcaggtgattggcaccggcagcttctag

SEQ ID NO: 60536 - DNA, 468 bp, Artificial Sequence
  derived and/or modified sequence
atggccgagaagtttgactgccactactgccgggaccccctgcagggcaagaagtatgtgcagaaggatggccaccactgctgcctgaagtgctttgacaagttctgtgccaacacctgtgtggagtgcaggaagcccatcggggctgacagcaaggaggtgcactacaagaaccgcttctggcatgacacctgcttccgctgtgccaagtgcctgcaccccctggccaatgagacctttgtggccaaggacaacaagatcctgtgcaacaagtgcaccacccgggaggacagccccaagtgcaagggctgcttcaaggccatcgtggccggggaccagaatgtggagtacaagggcaccgtgtggcacaaggactgcttcacctgcagcaactgcaagcaggtgattggcaccggcagcttcttccccaagggggaggacttctactgtgtgacctgccacgagtag

SEQ ID NO: 60537 - DNA, 426 bp, Artificial Sequence
  derived and/or modified sequence
atggccgagaagttcgactgccactactgccgggaccccctgcagggaaagaaatatgtccagaaagacggccatcactgttgcctcaaatgtttcgacaaattctgtgctaacacttgcgtcgaatgcagaaaaccgataggagccgacagtaaggaggtccattacaaaaacaggttctggcatgacacttgttttagatgcgcaaaatgcctccatccgttagcaaatgagacatttgtggctaaggataataagatcctctgtaacaagtgtaccacccgcgaagacagtccaaaatgtaaaggttgctttaaagctatcgttgcaggtgaccagaatgtggagtataaaggaaccgtgtggcacaaagactgctttacgtgttcaaactgtaagcaagttattggcacaggatctttctag

SEQ ID NO: 60538 - DNA, 468 bp, Artificial Sequence
  derived and/or modified sequence
atggccgagaagttcgactgccactactgccgggaccccctgcagggaaaaaagtacgtgcaaaaggacgggcaccactgttgtctcaaatgtttcgacaaattttgtgctaatacttgtgtggagtgccggaaaccaattggggcagattctaaagaggtgcactacaaaaaccggttctggcacgatacttgtttccgctgtgctaaatgcctgcaccctctcgccaatgaaactttcgttgccaaagataacaagatcctctgtaacaaatgtacaacccgggaagattccccaaagtgcaaggggtgtttcaaagctattgtcgccggagaccagaatgtcgaatataaaggcactgtctggcataaagattgtttcacatgcagcaattgcaaacaagtgatcgggacgggctcattcttccccaaaggtgaggacttttactgcgtcacctgccacgagtag

SEQ ID NO: 60539 - DNA, 426 bp, Artificial Sequence
  derived and/or modified sequence
atggctgaaaaatttgactgtcattactgtagggaccccctgcagggtaaaaagtacgtgcagaaagacggtcaccattgttgtctgaaatgtttcgataagttctgcgcaaacacctgcgttgaatgtcgtaaacccattggggctgatagcaaagaggtccactacaagaatcgtttctggcacgacacgtgctttcgctgcgccaagtgcctgcaccccctggccaacgaaaccttcgtggctaaggacaataagattttgtgtaataagtgtaccacaagggaagattctcccaagtgtaaagggtgtttcaaggccattgtcgctggtgaccagaacgtcgaatacaaggggacagtctggcacaaagattgcttcacttgttctaactgtaaacaggtgatcgggacgggctccttttag

SEQ ID NO: 60540 - DNA, 468 bp, Artificial Sequence
  derived and/or modified sequence
atggccgagaaatttgactgtcactattgtagggatcccctgcaggggaaaaaatacgttcaaaaggatgggcaccactgttgcttgaagtgttttgacaagttttgcgcgaatacctgcgtggagtgccggaaaccaattggagcagactcaaaggaggtccactacaaaaaccgtttctggcacgatacttgtttccgttgtgcaaagtgcttgcaccccttggcgaatgagaccttcgtggccaaggacaacaaaattttgtgtaataagtgtacaactcgcgaggatagcccaaagtgtaagggctgctttaaggcgatcgttgcgggagatcagaatgtcgaatacaagggcacggtgtggcacaaggactgttttacatgcagcaactgcaaacaggtgatcggtacaggttcctttttccctaaaggcgaggacttctattgcgttacatgccatgaatag

SEQ ID NO: 60541 - DNA, 426 bp, Artificial Sequence
  derived and/or modified sequence
atggccgagaagttcgactgccactactgcagagaccccctgcagggcaagaagtacgtgcagaaggacggccaccactgctgcctgaagtgcttcgacaagttctgcgccaacacctgcgtggagtgcagaaagcccatcggcgccgacagcaaggaggtgcactacaagaacagattctggcacgacacctgcttcagatgcgccaagtgcctgcaccccctggccaacgagaccttcgtggccaaggacaacaagatcctgtgcaacaagtgcaccaccagagaggacagccccaagtgcaagggctgcttcaaggccatcgtggccggcgaccagaacgtggagtacaagggcaccgtgtggcacaaggactgcttcacctgcagcaactgcaagcaggtgatcggcaccggcagcttctag

SEQ ID NO: 60542 - DNA, 468 bp, Artificial Sequence
  derived and/or modified sequence
atggccgagaagttcgactgccactactgcagagaccccctgcagggcaagaagtacgtgcagaaggacggccaccactgctgcctgaagtgcttcgacaagttctgcgccaacacctgcgtggagtgcagaaagcccatcggcgccgacagcaaggaggtgcactacaagaacagattctggcacgacacctgcttcagatgcgccaagtgcctgcaccccctggccaacgagaccttcgtggccaaggacaacaagatcctgtgcaacaagtgcaccaccagagaggacagccccaagtgcaagggctgcttcaaggccatcgtggccggcgaccagaacgtggagtacaagggcaccgtgtggcacaaggactgcttcacctgcagcaactgcaagcaggtgatcggcaccggcagcttcttccccaagggcgaggacttctactgcgtgacctgccacgagtag

SEQ ID NO: 60543 - protein, 485 aa, Artificial Sequence
  derived and/or modified sequence
MAAAPPLSKAEYLKRYLSGADAGVDRGSESGRKRRKKRPKPGGAGGKGMRIVDDDVSWTAISTTKLEKEEEEDDGDLPVVAEFVDERPEEVKQMEAFRSSAKWKLLGGHNEDLPSNRHFRHDTPDSSPRRVRHGTPDPSPRKDRHDTPDPSPRRARHDTPDPSPLRGARHDSDTSPPRRIRHDSSDTSPPRRARHDSPDPSPPRRPQHNSSGDCQKATDSDLSSPRHKQSPGHQDSDSDLSPPRNRPRHRSSDSDLSPPRRRQRTKSSDSDLSPPRRSQPPGKKAAHMYSGAKTGLVLTDIQREQQELKEQDQETMAFEAEFQYAETVFRDKSGRKRNLKLERLEQRRKAEKDSERDELYAQWGKGLAQSRQQQQNVEDAMKEMQKPLARYIDDEDLDRMLREQEREGDPMANFIKKNKAKENKNKKVRPRYSGPAPPPNRFNIWPGYRWDGVDRSNGFEQKRFARLASKKAVEELAYKWSVEDM

SEQ ID NO: 60544 - DNA, 1458 bp, Artificial Sequence
  derived and/or modified sequence
atggccgccgccccccccctgagcaaggccgagtacctgaagagatacctgagcggcgccgacgccggcgtggacagaggcagcgagagcggcagaaagagaagaaagaagagacccaagcccggcggcgccggcggcaagggcatgagaatcgtggacgacgacgtgagctggaccgccatcagcaccaccaagctggagaaggaggaggaggaggacgacggcgacctgcccgtggtggccgagttcgtggacgagagacccgaggaggtgaagcagatggaggccttcagaagcagcgccaagtggaagctgctgggcggccacaacgaggacctgcccagcaacagacacttcagacacgacacccccgacagcagccccagaagagtgagacacggcacccccgaccccagccccagaaaggacagacacgacacccccgaccccagccccagaagagccagacacgacacccccgaccccagccccctgagaggcgccagacacgacagcgacaccagcccccccagaagaatcagacacgacagcagcgacaccagcccccccagaagagccagacacgacagccccgaccccagcccccccagaagaccccagcacaacagcagcggcgactgccagaaggccaccgacagcgacctgagcagccccagacacaagcagagccccggccaccaggacagcgacagcgacctgagcccccccagaaacagacccagacacagaagcagcgacagcgacctgagcccccccagaagaagacagagaaccaagagcagcgacagcgacctgagcccccccagaagaagccagccccccggcaagaaggccgcccacatgtacagcggcgccaagaccggcctggtgctgaccgacatccagagagagcagcaggagctgaaggagcaggaccaggagaccatggccttcgaggccgagttccagtacgccgagaccgtgttcagagacaagagcggcagaaagagaaacctgaagctggagagactggagcagagaagaaaggccgagaaggacagcgagagagacgagctgtacgcccagtggggcaagggcctggcccagagcagacagcagcagcagaacgtggaggacgccatgaaggagatgcagaagcccctggccagatacatcgacgacgaggacctggacagaatgctgagagagcaggagagagagggcgaccccatggccaacttcatcaagaagaacaaggccaaggagaacaagaacaagaaggtgagacccagatacagcggccccgcccccccccccaacagattcaacatctggcccggctacagatgggacggcgtggacagaagcaacggcttcgagcagaagagattcgccagactggccagcaagaaggccgtggaggagctggcctacaagtggagcgtggaggacatgtag

SEQ ID NO: 60545 - DNA, 1458 bp, Artificial Sequence
  derived and/or modified sequence
atggcggctgctcctccgctgtcaaaagcagagtacctaaagaggtatttgtcgggcgccgacgctggtgttgaccgcgggtcagaatcaggcaggaaacggagaaagaagcggccgaagcccggtggggccggcggcaagggtatgagaattgtggatgatgatgtgtcgtggacagccatctccaccaccaaacttgagaaggaagaggaggaggacgacggcgacttacctgtcgtggccgaattcgtagatgagcggccagaggaagtcaagcaaatggaagcgtttaggtcctccgcaaaatggaaactgctcggtggtcacaatgaagaccttccttcaaaccgccacttccgtcatgataccccagatagctcgccaaggagggttcgacacggtacgcctgacccctctccaaggaaagacagacatgatactccggatcctagccctcgccgtgccagacatgacacgcccgaccccagcccgttgaggggagcgcggcatgattctgatacttctccaccaaggcgcatccgccatgatagttcagacaccagcccacctaggcgggcccggcatgatagccctgacccgtccccccctaggaggccccagcataactcctccggagactgtcagaaggccaccgattccgacctgtccagccctcggcacaagcagtctcctggacatcaggactccgactccgacttgtctccccctcggaatagaccaaggcataggagctccgacagcgatctgagccctcccaggaggagacaaagaaccaaatctagtgactcagatctgtcgccacctaggcgatctcagccaccaggcaagaaggcagcccatatgtacagcggggccaaaaccggtctcgtactgaccgatatccagagggagcaacaggagctcaaggaacaagaccaggaaaccatggcatttgaagcagaatttcagtacgccgaaaccgtgtttcgagataaaagcggccgcaaacggaatctcaaactcgaaaggttggagcaacggcggaaggccgagaaggactcggagcgcgatgagctttatgcccagtggggaaaaggccttgcacagtcacgtcaacagcaacagaatgtggaagatgcaatgaaagaaatgcagaaaccactagcccggtacatcgatgacgaggacctggaccgaatgctccgcgagcaagagcgagagggggacccaatggccaattttatcaagaagaataaggccaaggagaacaaaaataaaaaggtgagacccaggtactccggcccagcaccccctcccaatcggtttaacatttggcccggctacaggtgggatggggtggacagatcaaatggctttgaacagaaaagattcgccaggctggcttctaaaaaagcggtggaggaactggcatacaagtggagcgtcgaagacatgtag

SEQ ID NO: 60546 - DNA, 1458 bp, Artificial Sequence
  derived and/or modified sequence
atggctgctgccccacccctgagcaaggccgagtacctgaagcgctacctgagcggggctgatgctggggtggaccggggcagcgagagcggcaggaagaggaggaagaagaggcccaagccaggaggagctgggggcaagggcatgagaattgtggatgatgatgtgtcctggacagccatcagcaccaccaagctggagaaggaggaggaggaggatgatggagacctgcctgtggtggccgagtttgtggatgagaggcctgaggaggtgaagcagatggaggccttccgcagcagcgccaagtggaagctgctgggcggccacaatgaagacctgcccagcaacagacacttcagacatgacaccccagacagcagccccaggagagtgagacatggcaccccagaccccagccccaggaaggacagacatgacaccccagaccccagcccccggcgggcccggcatgacaccccagaccccagccccctgcggggggcccggcatgacagcgacaccagccccccccggcgcatcagacatgacagcagtgacaccagccccccaagaagagcccggcatgacagcccagaccccagccccccccggcggccccagcacaacagcagcggggactgccagaaggccacagacagcgacctgagcagccccaggcacaagcagagccctggccaccaggacagcgacagcgacctgagcccccccaggaaccggcccaggcacaggagcagtgacagcgacctgagccccccccggcggcggcagaggaccaagagcagtgacagcgacctgagccccccccggcgcagccagcccccaggcaagaaggccgcccacatgtacagcggggccaagacaggcctggtgctgacagacatccagcgggagcagcaggagctgaaggagcaggaccaggagaccatggcctttgaggccgagttccagtatgcagagaccgtcttccgggacaagagcggcaggaagaggaacctgaagctggagcggctggagcagaggaggaaggccgagaaggacagcgagagagatgagctgtatgcccagtggggcaagggcctggcccagagccggcagcagcagcagaatgtggaggatgccatgaaggagatgcagaagcccctggcccgctacattgatgatgaggacctggacaggatgctgcgggagcaggagcgggagggggaccccatggccaacttcatcaagaagaacaaggccaaggagaacaagaacaagaaggtgcggccccgctacagcggccctgcccccccacccaaccgcttcaacatctggccaggctaccgctgggatggagtggacaggagcaatggatttgagcagaagagatttgcccggctggccagcaagaaggctgtggaggagctggcctacaagtggagcgtggaggacatgtag

SEQ ID NO: 60547 - DNA, 1458 bp, Artificial Sequence
  derived and/or modified sequence
atggccgccgccccccccctgagcaaggccgagtacctgaagcggtatctgtctggtgcggatgctggagtggacaggggatctgaatctgggcggaagagaagaaagaagcgccccaaaccgggtggggccggcggcaagggcatgcgaatagtggacgacgacgttagctggacggcgatctctacgacaaagctggagaaagaggaagaggaagacgacggagacttaccagtagtagcagaattcgtagatgagagaccagaagaagttaaacagatggaagcatttaggtcctcggccaagtggaaactacttggcggtcacaacgaagacctcccgtcaaatcggcactttcggcatgatactccagacagttcacctagaagggtgcggcacggaacccccgatccttcgccaagaaaagaccgtcacgatacacctgatccttcacccaggcgggctagacatgataccccagacccgtcacccctcagaggagcccgacacgactcggatacatcacccccgcgcaggatcagacatgatagttcagatacctctccgcctagaagggctagacacgattcccccgatccttctcctccccgaaggccccagcacaatagctcaggggactgtcaaaaagccacagattccgatcttagcagccctaggcataaacaatctcccggacaccaggattctgattctgacctgtctccaccacgtaataggcctcggcaccggagcagcgatagcgacctcagcccaccgcggaggcgtcaacgtactaaaagtagcgatagcgacctcagcccaccaaggaggagccagcccccaggaaagaaggccgcacacatgtactcaggcgccaaaactggtctcgttttgaccgacattcagagggagcaacaagagctaaaagaacaggaccaggagaccatggcttttgaggccgaattccaatatgcagagaccgtattccgtgataaaagcggtagaaaacgcaacttaaaactggagcggctcgaacagagacggaaggctgaaaaggatagcgagagagatgaactgtatgcccaatggggcaaaggcctggctcagtcacgacaacagcagcaaaacgttgaagacgcaatgaaggagatgcagaagcccttggcaaggtacatcgacgacgaggacctggaccgaatgctgagagaacaggagcgggaaggtgacccaatggcaaattttattaagaagaacaaggctaaggagaataaaaataagaaagtacggccccgctacagcggcccggcacccccacccaaccggtttaacatctggcccggataccgctgggacggggttgatagatctaacggttttgagcaaaagcgattcgcgaggttagcatcgaagaaggcggttgaagagttggcttataaatggagcgtggaggatatgtag

SEQ ID NO: 60548 - DNA, 1458 bp, Artificial Sequence
  derived and/or modified sequence
atggccgcagccccaccattgtctaaagctgagtacttaaagcggtacctctctggagctgacgctggtgtggaccgtggctctgaatctggcaggaagcgcagaaagaagagaccaaagcctggaggggctggtggaaagggaatgagaattgttgatgatgacgtctcctggacagcgataagtactactaagctggagaaagaggaggaagaagacgatggagatctgccagtggtcgccgagttcgtcgacgaaagaccggaggaagtcaagcagatggaagcatttcggtctagcgctaaatggaagttactggggggacataacgaggacctgcccagcaatcgacattttagacatgacactccagatagctccccgcgtagggtgcgacatggcactccggatccatcacccagaaaggatcggcacgataccccagacccttctcccaggagggccaggcacgacacgcctgaccctagtcccctccggggtgccaggcacgatagcgatactagccctcctcgtagaatcagacacgacagtagcgatacctcaccccctcgtcgcgcacgtcatgacagtcccgatccatcaccaccgcgtaggccacagcataactccagcggggactgccagaaagccaccgactcggatctcagcagccctagacataagcagagccccggacaccaggattccgactctgacctgagtcctccaaggaataggccgcgacaccgtagttcggacagtgacttatccccccctaggaggaggcagcgaaccaaaagtagcgactccgacctgagcccccctaggaggtcccagccaccgggtaagaaggctgcccacatgtactcaggagccaagacaggcttagtgctcacagacatccagcgcgagcagcaggagttaaaggaacaggaccaggagaccatggccttcgaggccgaattccagtatgcagagaccgtgttccgggacaagtctggacgaaagagaaatctcaagctagaacgcttagagcaaagacggaaagctgagaaggatagcgaacgcgacgaactctatgctcaatggggcaagggtctggcccaatctcgccagcaacaacagaacgtggaggacgccatgaaggaaatgcagaagccactcgccaggtatattgatgatgaggatttagatcgtatgctgcgggaacaagaaagagaaggtgatcccatggccaacttcataaagaaaaacaaggcaaaagaaaacaaaaacaagaaagtgcggcctagatatagcggccctgctcctccccctaaccggttcaatatttggccaggttaccgatgggatggcgtggatcggtctaatggttttgaacagaagcggtttgccagactcgccagcaagaaagccgtggaagaactggcgtacaagtggagcgtagaggacatgtag

SEQ ID NO: 60549 - DNA, 1793 bp, Artificial Sequence
  derived and/or modified sequence
gtctctctgcccccgccgctgccatggcggcagctccgccgctttccaaggccgagtatctgaagcgttacttgtccggggcagatgccggcgtcgaccggggatctgagtccggtcgcaagcgtcgcaaaaagcggccgaagcctggcggggccggcggcaagggaatgcggattgtggatgatgatgtgagctggacagctatctccacaaccaaactagaaaaggaggaagaggaagatgatggagatttgcctgtggtggcagagtttgtggatgagcggccagaagaggtaaagcagatggaggcctttcgttccagtgccaaatggaagcttctgggaggccacaacgaagacctaccctcaaacagacattttcgtcacgataccccggattcatctcctaggagggtccgtcatggtaccccagatccatctcctaggaaggaccgtcatgacaccccggatccatctcctaggagggcccgtcatgacaccccggatccttctcccctcagaggggctcgtcatgactcagacacatctcctcccaggaggatccgtcatgactcctcagacacttcacccccaaggagggcccgtcatgattctccagatccttctcccccaaggaggcctcagcataattcttcaggtgactgccagaaagcaactgattcagacctttcttctccacggcataaacaaagtccagggcaccaggattctgattcagatctgtcacctccacggaatagacctagacaccggagctctgattctgacctctctccaccaaggaggagacagaggaccaaatcttctgattctgacctgtccccgcctcgaaggagtcagcctcctggaaagaaggctgcacacatgtattctggggctaaaactgggttggtgttaactgacatacagcgagaacagcaggagctcaaggaacaggatcaagaaaccatggcatttgaagctgaatttcaatatgctgaaaccgtatttcgagataagtctggtcgtaagaggaatttgaaactcgaacgtttagagcaaaggaggaaagcagaaaaggactcagagagagatgagctgtatgcccagtggggaaaagggcttgcccagagccggcaacagcaacaaaatgtggaggatgcaatgaaagagatgcaaaagcctctggcccgctatattgatgacgaagatctggataggatgctaagagaacaggaaagagagggggaccctatggccaacttcatcaagaagaataaggccaaggagaacaagaataaaaaagtgagacctcgctacagtggtccagcacctcctcccaacagatttaatatctggcctggatatcgctgggacggagtggacagatccaatggatttgaacagaagcgctttgccaggcttgccagcaagaaggcagtggaggaacttgcctacaaatggagtgttgaggatatgtaactttcctgaggctgtgggggtggctgggctgtggtagtgggcataggcagcgagatatccagtggtaacagttgtctgtgctaataattggagcccacacagaccagcaacttgttgaatgccagttttgaccacagaagaatattcgagacctgatgtttggactgaggtacctgtacttcttgggtgtgacagcaccggctgttgctggctttcagaggaagcattgatttctcattgaccagggtttgttcttggtagggtttttctttttcttttttaaataaacatgtatttatttttttaaaatta

SEQ ID NO: 60550 - protein, 813 aa, Artificial Sequence
  derived and/or modified sequence
MPYIDESPTMSPQLSARSQGGGDGVSPTPPEGLAPGVEAGKGLEMRKLVLSGFLASEEIYINQLEALLLPMKPLKATATTSQPVLTIQQIETIFYKIQDIYEIHKEFYDNLCPKVQQWDSQVTMGHLFQKLASQLGVYKAFVDNYKVALETAEKCSQSNNQFQKISEELKVKGPKDSKDSHTSVTMEALLYKPIDRVTRSTLVLHDLLKHTPVDHPDYPLLQDALRISQNFLSSINEDIDPRRTAVTTPKGETRQLVKDGFLVEVSESSRKLRHVFLFTDVLLCAKLKKTSAGKHQQYDCKWYIPLADLVFPSPEESEASPQVHPFPDHELEDMKMKISALKSEIQKEKANKGQSRAIERLKKKMFENEFLLLLNSPTIPFRIHNRNGKSYLFLLSSDYERSEWREAIQKLQKKDLQAFVLSSVELQVLTGSCFKLRTVHNIPVTSNKDDDESPGLYGFLHVIVHSAKGFKQSANLYCTLEVDSFGYFVSKAKTRVFRDTAEPKWDEEFEIELEGSQSLRILCYEKCYDKTKVNKDNNEIVDKIMGKGQIQLDPQTVETKNWHTDVIEMNGIKVEFSMKFTSRDMSLKRTPSKKQTGVFGVKISVVTKRERSKVPYIVRQCVEEVEKRGIEEVGIYRISGVATDIQALKAVFDANNKDILLMLSDMDINAIAGTLKLYFRELPEPLLTDRLYPAFMEGIALSDPAAKENCMMHLLRSLPDPNLITFLFLLEHLKRVAEKEPINKMSLHNLATVFGPTLLRPSEVESKAHLTSAADIWSHDVMAQVQVLLYYLQHPPISFAELKRNTLYFSTDV

SEQ ID NO: 60551 - protein, 474 aa, Artificial Sequence
  derived and/or modified sequence
MGKVNVAKLRYMSRDDFRVLTAVEMGMKNHEIVPGSLIASIASLKHGGCNKVLRELVKHKLIAWERTKTVQGYRLTNAGYDYLALKTLSSRQVVESVGNQMGVGKESDIYIVANEEGQQFALKLHRLGRTSFRNLKNKRDYHKHRHNVSWLYLSRLSAMKEFAYMKALYERKFPVPKPIDYNRHAVVMELINGYPLCQIHHVEDPASVYDEAMELIVKLANHGLIHGDFNEFNLILDESDHITMIDFPQMVSTSHPNAEWYFDRDVKCIKDFFMKRFSYESELFPTFKDIRREDTLDVEVSASGYTKEMQADDELLHPLGPDDKNIETKEGSEFSFSDGEVAEKAEVYGSENESERNCLEESEGCYCRSSGDPEQIKEDSLSEESADARSFEMTEFNQALEEIKGQVVENNSVTEFSEEKNRTENYNRQDGQRVQGGVPAGSDEYEDECPHLIALSSLNREFRPFRYRLLSIAF

SEQ ID NO: 60552 - DNA, 1425 bp, Artificial Sequence
  derived and/or modified sequence
atgggcaaggtgaacgtggccaagctgagatacatgagcagagacgacttcagagtgctgaccgccgtggagatgggcatgaagaaccacgagatcgtgcccggcagcctgatcgccagcatcgccagcctgaagcacggcggctgcaacaaggtgctgagagagctggtgaagcacaagctgatcgcctgggagagaaccaagaccgtgcagggctacagactgaccaacgccggctacgactacctggccctgaagaccctgagcagcagacaggtggtggagagcgtgggcaaccagatgggcgtgggcaaggagagcgacatctacatcgtggccaacgaggagggccagcagttcgccctgaagctgcacagactgggcagaaccagcttcagaaacctgaagaacaagagagactaccacaagcacagacacaacgtgagctggctgtacctgagcagactgagcgccatgaaggagttcgcctacatgaaggccctgtacgagagaaagttccccgtgcccaagcccatcgactacaacagacacgccgtggtgatggagctgatcaacggctaccccctgtgccagatccaccacgtggaggaccccgccagcgtgtacgacgaggccatggagctgatcgtgaagctggccaaccacggcctgatccacggcgacttcaacgagttcaacctgatcctggacgagagcgaccacatcaccatgatcgacttcccccagatggtgagcaccagccaccccaacgccgagtggtacttcgacagagacgtgaagtgcatcaaggacttcttcatgaagagattcagctacgagagcgagctgttccccaccttcaaggacatcagaagagaggacaccctggacgtggaggtgagcgccagcggctacaccaaggagatgcaggccgacgacgagctgctgcaccccctgggccccgacgacaagaacatcgagaccaaggagggcagcgagttcagcttcagcgacggcgaggtggccgagaaggccgaggtgtacggcagcgagaacgagagcgagagaaactgcctggaggagagcgagggctgctactgcagaagcagcggcgaccccgagcagatcaaggaggacagcctgagcgaggagagcgccgacgccagaagcttcgagatgaccgagttcaaccaggccctggaggagatcaagggccaggtggtggagaacaacagcgtgaccgagttcagcgaggagaagaacagaaccgagaactacaacagacaggacggccagagagtgcagggcggcgtgcccgccggcagcgacgagtacgaggacgagtgcccccacctgatcgccctgagcagcctgaacagagagttcagacccttcagatacagactgctgagcatcgccttctag

SEQ ID NO: 60553 - DNA, 1425 bp, Artificial Sequence
  derived and/or modified sequence
atggggaaagtcaatgttgcaaagctgcgctacatgtcccgcgatgattttcgggtcctcaccgcagtcgaaatgggcatgaaaaaccacgagattgttccagggtcattgatcgcctcaatcgcaagtctgaagcacggggggtgcaataaggtgttgagagagctggtgaaacacaaattgattgcgtgggaacgaactaaaacagttcaaggttaccgcctcaccaatgccggatacgactacttggcccttaagacgctcagcagcagacaggtggtagaatctgttggcaaccagatgggcgtaggcaaggagtccgatatttacattgtcgcgaatgaggagggtcagcagttcgctcttaagctgcatcgcttgggcaggacatcctttcgaaatctgaagaacaaacgagattaccacaagcataggcacaacgtaagttggttgtacctgtctcgtttatcggccatgaaggaatttgcttatatgaaggcactttacgaaaggaagttcccggtgcctaaacccattgactacaaccggcatgcagtggtcatggagctgattaacgggtatcccctgtgccagatacaccacgttgaggaccccgcctccgtgtatgatgaagccatggagctgatcgtgaagttagctaatcacggcctaattcacggggatttcaacgagttcaatctgattttggatgagagtgaccacattaccatgattgacttcccccagatggtctccactagccaccctaacgcagagtggtactttgacagggatgtcaagtgtataaaggactttttcatgaagagattcagctacgaaagcgagctctttccaacatttaaagacattagacgagaggatacactggacgttgaggtgagtgcaagcggttacaccaaggagatgcaggccgacgacgagctcttacacccccttggaccagacgataagaatattgagacaaaggaagggagtgaattttccttctctgatggggaggtcgctgagaaggctgaggtatacggcagtgaaaacgaaagcgaaagaaattgtctggaggagtctgaagggtgttactgtagaagctccggggatcctgagcagataaaagaggactctctttcggaagagtctgccgacgctagatcctttgagatgacggagtttaaccaggccctggaagagatcaaggggcaggtggtggagaacaactccgtgacggagttctctgaggagaagaatcgcaccgagaattacaaccgccaggacggtcagcgggttcaaggaggtgtccccgcgggcagtgacgagtacgaagacgagtgcccccatctgatagcattatcctccctgaatcgggagttccgccctttccgctacaggctgctgtctatagcattttag

SEQ ID NO: 60554 - DNA, 1425 bp, Artificial Sequence
  derived and/or modified sequence
atgggcaaggtgaatgtggccaagctgcgctacatgagcagagatgacttccgggtgctgacagctgtggagatgggcatgaagaaccacgagatcgtgcccggcagcctcatcgccagcatcgccagcctgaagcacggcggctgcaacaaggtgctgcgggagctggtgaagcacaagctgattgcctgggagaggaccaagacagtgcagggctaccgcctgaccaatgccggctatgactacctggccctgaagaccctgagcagccggcaggtggtggagagcgtgggcaaccagatgggcgtgggcaaggagagtgacatctacatcgtggccaatgaggagggccagcagtttgccctgaagctgcaccggctgggccgcaccagcttcaggaacctgaagaacaagagggactaccacaagcaccgccacaacgtgtcctggctgtacctgagccggctgagcgccatgaaggagtttgcctacatgaaggccctgtatgaaaggaagtttcctgtgcccaagcccatcgactacaacagacatgctgtggtgatggagctgatcaatggctaccccctgtgccagatccaccacgtggaggaccctgcctctgtgtatgatgaggccatggagctgattgtgaagctggccaaccacggcctcatccacggggacttcaatgagttcaacctgatcctggatgaaagtgaccacatcaccatgattgacttcccccagatggtgtccaccagccaccccaatgctgagtggtactttgacagagatgtgaagtgcatcaaggacttcttcatgaagcgcttctcctatgaaagtgagctgttccccaccttcaaggacatcagaagagaggacaccctggatgtggaggtgtctgccagcggctacaccaaggagatgcaggctgatgatgagctgctgcaccccctgggcccagatgacaagaacatcgagaccaaggagggcagcgagttctccttcagtgatggagaggtggccgagaaggccgaggtgtatggctctgaaaatgaaagtgagaggaactgcctggaggagagcgagggctgctactgccgcagcagcggggaccctgagcagatcaaggaggacagcctgtctgaggagagcgcagatgcccggagctttgagatgacagagttcaaccaggccctggaggagatcaagggccaggtggtggagaacaacagcgtgacagagttcagcgaggagaagaacagaacagagaactacaaccggcaggacggccagagggtgcagggcggcgtgcctgctggcagtgatgaatatgaagatgagtgcccccacctgattgccctgagcagcctgaaccgggagttccggcccttccgctaccgcctgctgagcatcgccttctag

SEQ ID NO: 60555 - DNA, 1425 bp, Artificial Sequence
  derived and/or modified sequence
atgggcaaggtgaacgtggccaagctgcggtacatgagccgggacgacttcagggtgcttaccgccgttgaaatgggtatgaagaatcatgagattgtcccagggtccctaattgcatcgatcgcaagtttgaagcatggcggatgtaacaaagtcctgcgagaactggtgaaacacaagcttattgcttgggagagaacaaaaactgtgcagggctaccgcctcacaaacgcaggctatgactacctcgcgctcaagactctgtcaagccggcaggtcgtggagagtgtcgggaatcagatgggtgtgggcaaggagtcagatatttatattgtcgccaacgaggaaggacaacagtttgctctcaagttgcacaggctgggccgcacatccttcaggaaccttaagaataaacgggactatcataaacacaggcacaatgtgtcctggctttatctgagccgcctgagcgccatgaaggaattcgcatatatgaaagctctctatgagaggaaattccctgtacccaagcctattgattacaacagacatgcagtggtgatggaactcattaacgggtatcccttatgtcagattcaccacgtagaagaccctgcttctgtgtatgacgaggctatggagttgatcgtgaaattagcaaaccacggactgattcatggcgactttaatgagtttaatctcatactggatgaatccgaccacatcacaatgatagacttcccacagatggtaagtacttctcaccctaatgctgagtggtacttcgatagagatgtaaaatgtataaaagacttcttcatgaagcggttctcatacgagagcgagttgttccctactttcaaagatattcgcagggaagacaccttggacgtagaagtcagcgcgtccggctatactaaagaaatgcaggcggacgacgagctgttacatcctctgggacccgacgataaaaacatagaaaccaaggagggtagcgagttttcattttcagatggtgaggtggccgaaaaggctgaggtttacggatctgagaatgaatctgaaagaaattgtctggaagaaagcgaagggtgttactgccgctcatctggagaccccgaacagattaaagaggactcactctccgaggagtcagcagacgcacggagctttgagatgacagagttcaatcaggcactcgaggagataaagggccaggtcgtagaaaacaatagcgtgaccgagttttcagaggagaagaacagaaccgaaaattataatcggcaggatgggcagagagtgcagggaggtgttcccgcagggagcgacgagtatgaagatgaatgtccacaccttattgctcttagcagcttgaatagagaatttaggcctttcagatatagactgctaagtatcgctttctag

SEQ ID NO: 60556 - DNA, 1425 bp, Artificial Sequence
  derived and/or modified sequence
atggggaaggtcaatgtggccaagctgaggtacatgtcccgagacgactttagggttctgactgccgtggaaatgggcatgaagaatcacgagatagtccctgggtccctgatcgcttccatcgcaagtctcaagcacggaggctgcaacaaagtgctgagagaactcgtgaaacacaaactcatcgcatgggagcgcacaaaaacagtccagggctatcgacttacaaatgcaggttacgactaccttgcactaaagaccctgagtagccgccaagtggtggagtcagtcgggaaccagatgggagttgggaaagagagcgacatttacatcgtcgcaaacgaagagggccaacagtttgccctgaagctgcatcggctggggcgtactagcttccgcaatcttaaaaacaaacgggattaccacaagcatcggcataatgtctcttggctgtatctcagtcgcctctccgcaatgaaggagtttgcgtatatgaaggcactgtacgagagaaagttccccgtacccaagcccatcgactataacaggcacgccgttgtgatggagttgatcaacggctatccactttgccaaatccaccatgttgaggaccctgctagcgtatacgatgaggccatggagctgatcgtcaagctcgctaaccatggcttgatacacggggatttcaatgagttcaacttaatactagacgagagtgatcacatcactatgatagacttccctcagatggtgtctacctcacaccccaatgctgagtggtattttgatcgagacgtgaaatgcatcaaggacttcttcatgaagcgcttctcttatgaaagtgaactcttcccaactttcaaggatattcggagggaggatactcttgacgtcgaagttagcgcgagcggctatacgaaggaaatgcaggcagatgacgaactgctgcacccactaggcccagacgacaaaaatatcgagacgaaagagggctcagaatttagctttagcgacggagaggtggcggagaaggccgaggtgtacggctctgagaatgagtccgaacgaaattgtctggaagaaagtgagggatgctattgcagatcttcgggggatcccgaacaaatcaaggaggattccctgtccgaagagagcgccgacgcgagaagcttcgaaatgacagagtttaaccaggcacttgaggaaataaagggtcaggtggtcgaaaataactctgtgaccgagtttagcgaggaaaagaaccggacggaaaactataacaggcaggatggacagcgagtgcaaggcggagtgcccgcagggagcgacgaatacgaggatgagtgtcctcacttgatcgctttatccagtctgaaccgtgagttcaggccgtttcggtacaggctgctgtctattgccttttag

SEQ ID NO: 60557 - DNA, 2149 bp, Artificial Sequence
  derived and/or modified sequence
gagaggcatctgggttcggactggggccgccatggggaaagtgaatgtggccaagttgcgttacatgagccgagatgacttcagggtcttgaccgcggttgaaatgggcatgaagaaccatgaaattgttcccggcagtttgattgcttctatagccagccttaaacatggtggctgtaataaagttttaagagaattagtgaaacataaactcatagcttgggagcgtaccaaaactgtccagggctatcggttgacaaatgcaggatatgattacctagctttgaaaacactttcttctaggcaagtagttgagtctgttggaaaccagatgggtgttggcaaagaatcagatatttacattgttgcaaatgaagaaggacaacaatttgcattaaagcttcacagactaggaagaacctcgtttcgaaatttgaaaaacaaacgcgattatcataaacataggcacaatgtgtcatggctatatttatctcgtctctctgccatgaaggaatttgcctatatgaaggcattgtatgagaggaaatttccagttccaaagccaattgattacaatcgtcatgcagtggtcatggaactcataaatggttatccactatgtcagatacaccatgttgaagatcctgcatcagtatatgatgaagctatggaactaattgtcaaacttgcaaatcatgggctgattcatggagattttaatgaatttaatctcattttggatgaaagtgaccatatcaccatgattgattttccacagatggtttcaacttctcatcccaatgctgagtggtattttgacagagatgttaaatgcattaaagatttctttatgaaacgtttcagctacgaaagtgagctttttccaacttttaaggatatcaggagagaagacactcttgatgtggaggtttctgccagtggctacacaaaggaaatgcaggcagatgatgaactgcttcatccattaggtccagatgataaaaatattgaaacaaaagagggatctgaattctcattttcagatggagaagtggcagaaaaagcagaggtttacgggtcagaaaatgaaagtgaacggaactgtctagaagaatcagagggctgctattgcagatcatctggagaccctgaacaaataaaggaagacagtttatcagaagagagtgctgatgcacggagttttgaaatgactgaattcaatcaagctttagaagaaataaaagggcaggttgttgaaaacaactctgtaactgaattttctgaggagaaaaacagaactgaaaattacaacaggcaagatggtcagagagttcaaggaggagtccctgctggctctgacgagtatgaagatgaatgccctcatctaattgccttgtcgtcattaaatagagaattcaggcctttcaggtatagacttctgtcgattgctttttaactttagtcttgagactgatactttgttagattctagtaaaagaatgtttttttcaaatgatgtgacaaaattgtattctgccaccttgatgtataaaatgaaagccaaataattttttgttgttaaaaactcaaaatagcttccttttcaattgacctgattctaggcagcctattgactaaatttcaagtaattctgccttaaaatacaaactgatggctgggcacagtggctcgctcatgcctgtaatctcagcacttctgggaggccaaggcaggcaaatcacctgaggtcaggagtttgagaccagccaggccaacatggcaaaaccctgtctctactaaaaatataaaaattaaccgggcatggtggcctgtgcttgtaatcccagctacttgggagactgaggcaggagaatcacttgaacctgggaggcagaggttgcagtaagccaaagatcgtaccactgcactccagcctgggtgacgagcaaaaaactccgtctcaaaaatatatatatatatacaaactgatgattttaaaattattgcaggtctctggatacattgatcaggttttagatggatgagttattcctcatatattttcctaattacacatctgatgtgtgtttgagttatgtaaaggcatgtaaatattaaaacatgcaataaatgtactttctatatgaaa

SEQ ID NO: 60558 - protein, 342 aa, Artificial Sequence
  derived and/or modified sequence
MLQGHSSVFQALLGTFFTWGMTAAGAALVFVFSSGQRRILDGSLGFAAGVMLAASYWSLLAPAVEMATSSGGFGAFAFFPVAVGFTLGAAFVYLADLLMPHLGAAEDPQTTLALNFGSTLMKKKSDPEGPALLFPESELSIRIGRAGLLSDKSENGEAYQRKKAAATGLPEGPAVPVPSRGNLAQPGGSSWRRIALLILAITIHNVPEGLAVGVGFGAIEKTASATFESARNLAIGIGIQNFPEGLAVSLPLRGAGFSTWRAFWYGQLSGMVEPLAGVFGAFAVVLAEPILPYALAFAAGAMVYVVMDDIIPEAQISGNGKLASWASILGFVVMMSLDVGLG

SEQ ID NO: 60559 - DNA, 1029 bp, Artificial Sequence
  derived and/or modified sequence
atgctgcagggccacagcagcgtgttccaggccctgctgggcaccttcttcacctggggcatgaccgccgccggcgccgccctggtgttcgtgttcagcagcggccagagaagaatcctggacggcagcctgggcttcgccgccggcgtgatgctggccgccagctactggagcctgctggcccccgccgtggagatggccaccagcagcggcggcttcggcgccttcgccttcttccccgtggccgtgggcttcaccctgggcgccgccttcgtgtacctggccgacctgctgatgccccacctgggcgccgccgaggacccccagaccaccctggccctgaacttcggcagcaccctgatgaagaagaagagcgaccccgagggccccgccctgctgttccccgagagcgagctgagcatcagaatcggcagagccggcctgctgagcgacaagagcgagaacggcgaggcctaccagagaaagaaggccgccgccaccggcctgcccgagggccccgccgtgcccgtgcccagcagaggcaacctggcccagcccggcggcagcagctggagaagaatcgccctgctgatcctggccatcaccatccacaacgtgcccgagggcctggccgtgggcgtgggcttcggcgccatcgagaagaccgccagcgccaccttcgagagcgccagaaacctggccatcggcatcggcatccagaacttccccgagggcctggccgtgagcctgcccctgagaggcgccggcttcagcacctggagagccttctggtacggccagctgagcggcatggtggagcccctggccggcgtgttcggcgccttcgccgtggtgctggccgagcccatcctgccctacgccctggccttcgccgccggcgccatggtgtacgtggtgatggacgacatcatccccgaggcccagatcagcggcaacggcaagctggccagctgggccagcatcctgggcttcgtggtgatgatgagcctggacgtgggcctgggctag

SEQ ID NO: 60560 - DNA, 1029 bp, Artificial Sequence
  derived and/or modified sequence
atgttgcaaggtcactctagcgttttccaggccctgctgggtacgttttttacttggggtatgactgcagccggtgccgcactggtatttgtgtttagcagcggtcaaaggagaatcctggacgggtccctgggtttcgccgccggcgtgatgctggccgcgagctactggtccctcctggccccagcggtggagatggcaacatcttccggcggcttcggggcttttgccttctttcctgtggctgtaggtttcacactcggcgcagcattcgtttatcttgccgatctgctgatgccacacctgggcgcggctgaggacccccaaactacgctggctctgaatttcggctctaccctcatgaagaagaagagcgacccggaggggccagctctcctgtttccggaatccgagttatcaatcagaatcggcagagctgggctgctctcagataagtcagagaacggcgaggcatatcagaggaaaaaggccgcagctaccggattaccggaaggccccgccgtgcctgtgccatcccggggaaatctcgcccaaccgggcggctcctcttggcggaggattgccctcttaattctggccatcacaatacacaacgtgccggaagggctcgccgtcggtgtcggcttcggtgctatcgagaagacggcgagcgctacatttgagtcggcccgtaatctggccattggtattgggattcaaaattttcccgaggggcttgctgtcagcctaccgctgcgaggcgcaggctttagcacatggcgggcattctggtacggccagctctcaggaatggtggaacctctcgcaggggtgttcggcgcctttgcggtggtactggcagagccaattctcccttatgctctggcattcgccgccggggcaatggtatacgtcgttatggatgacatcattcccgaggcccagatctctgggaacgggaagcttgcctcttgggcaagcatactgggcttcgtggtcatgatgagcctggacgtcggactggggtag

SEQ ID NO: 60561 - DNA, 1029 bp, Artificial Sequence
  derived and/or modified sequence
atgctgcagggccacagctctgtgttccaggccctgctgggcaccttcttcacctggggcatgacagctgctggggccgccctggtgtttgtgttcagcagcggccagaggcgcatcctggatggcagcctgggctttgctgctggggtgatgctggccgccagctactggagcctgctggccccagctgtggagatggccaccagcagcggcggctttggagcctttgccttcttccctgtggccgtgggcttcaccctgggcgccgcctttgtgtacctggccgacctgctgatgccccacctgggcgctgctgaggacccccagaccaccctggccctgaactttggcagcaccctgatgaagaagaagagtgaccctgagggccctgccctgctcttccctgagagcgagctgagcatcagaattggccgggccggcctgctgagtgacaagtcagaaaatggagaggcctaccagaggaagaaggctgctgccaccggcctgcctgagggccctgctgtgcctgtgcccagccggggcaacctggcccagcccggcggcagctcctggaggcgcatcgccctgctgatcctggccatcaccatccacaacgtgcctgagggcctggccgtgggcgtgggctttggagccatcgagaagacagccagcgccacctttgaaagtgccaggaacctggccatcggcatcggcatccagaacttccctgagggcctggccgtgtccctgcccctgcggggagctggcttcagcacctggagggccttctggtacggccagctgagcggcatggtggagcccctggccggcgtgtttggagcctttgctgtggtgctggccgagcccatcctgccctatgccctggcctttgctgctggggccatggtgtatgtggtgatggatgacatcatccctgaggcccagatctctggaaatggcaagctggcctcctgggccagcatcctgggctttgtggtgatgatgagcctggatgtgggcctgggctag

SEQ ID NO: 60562 - DNA, 1029 bp, Artificial Sequence
  derived and/or modified sequence
atgctgcagggccacagcagcgtgttccaggccctgctgggcacctttttcacatgggggatgacagcggccggagcagccttggtgtttgtgttttcgtctggccagagaagaatactggacggcagtctcggcttcgccgccggcgttatgttagcggcttcctactggtccttgttagccccagctgtcgagatggctacctcctcaggggggtttggtgcatttgccttctttcccgtggccgtggggtttacccttggggccgcttttgtatacctggctgatttgctaatgcctcacctgggcgccgccgaggacccccaaactaccctggccttaaactttggctccactttaatgaagaagaaatcagacccggaggggccagctctgctctttcccgagagcgaattgtctatacgcatcggaagagccggactgctgtctgataagtcagaaaatggagaggcctatcagagaaagaaggcagccgccacaggcctgcctgaggggcccgcggtgcccgtaccaagtcgtgggaacttggctcagccaggaggctcctcctggaggcggatcgccttgctaatcttagcgattaccatccataatgtgcccgagggactagctgtcggcgtcggtttcggagcgatcgagaaaaccgcctccgccaccttcgagagcgcgagaaatcttgctattgggattggtatccaaaacttcccagaagggctggccgtatctctgcccctccgcggtgccggcttctccacgtggcgagccttctggtatggacagctgtcaggcatggtggagccactcgctggcgttttcggggcttttgcagtcgtcctcgccgagcccattctgccatacgcactcgcttttgctgccggggcaatggtgtacgtggtaatggacgatattatcccagaggcgcaaatatcaggtaacggaaagctcgcttcctgggcctccatcctagggttcgtggttatgatgagtctggacgtggggttgggctag

SEQ ID NO: 60563 - DNA, 1029 bp, Artificial Sequence
  derived and/or modified sequence
atgctccaagggcattccagtgtgttccaggctctgctcggtacattctttacttggggcatgaccgcagccggtgccgcattggtgttcgtgtttagctcaggccagagacggattctcgatgggagcctcggatttgctgctggggtgatgctagccgcatcttactggagcctcctcgctcccgctgtagagatggcaacctcctcaggaggtttcggggctttcgcattcttccctgtcgccgtgggcttcacgctgggggctgcgttcgtgtatcttgccgatttgctgatgccccacctcggcgcagccgaggacccacagactaccctggcgctaaattttggatctacactaatgaaaaaaaagtccgaccctgagggtccagccttgctgtttcccgagagcgaactcagcatcagaatcggccgagccggattactctctgataaatccgaaaacggcgaagcttatcagagaaagaaggcggcagctaccggccttccagaagggcctgctgtcccagtgcccagtagagggaatctagcacagcccggaggcagcagctggaggcgcattgctctcttaatcctggctatcactattcataatgttccagagggcctggccgtgggtgtgggctttggcgcaatcgagaaaaccgcatccgcgaccttcgagagcgccaggaacctagccattgggatcggaatccagaatttccctgagggattggcagtgtcactgcctctgagaggagctggcttcagcacatggagggcattctggtacgggcagctgtctgggatggtggagccccttgctggggtcttcggtgcattcgccgtcgtattagccgaaccaattttgccttacgcccttgcctttgcagcgggtgctatggtttatgttgtgatggatgacattattcccgaggctcagatttccgggaacggaaagctcgcttcctgggcctcgattctggggttcgtggtcatgatgagcttagacgtcggcctcgggtag

SEQ ID NO: 60564 - DNA, 2781 bp, Artificial Sequence
  derived and/or modified sequence
acgtgtgcgggagggaagcaggaagtgactgcgggagtggagccggcgagagagtggcagcgggggctgatggaagtgcagtgggggctggagagggcaccctactgtatccagcatgctccaaggccacagctctgtgttccaggccttgctggggaccttcttcacctgggggatgacagcagctggggcagctctcgtgttcgtattctctagtggacagaggcggatcttagatggaagtcttggctttgctgcaggggtcatgttggcagcttcctattggtctcttctggccccagcagttgagatggccacgtcctctgggggcttcggtgcctttgccttcttccctgtggctgttggcttcacccttggagcggcttttgtctacttggctgacctcctgatgcctcacttgggtgcagcagaagacccccagacgaccctggcactgaacttcggctctacgttgatgaagaagaagtctgatcctgagggtcccgcgctgctcttccctgagagtgaactttccatccggataggtagagctgggcttctttcagacaagagtgagaatggtgaggcatatcagagaaagaaggcggcagccactggccttccagagggtcctgctgtccctgtgccttctcgagggaatctggcacagcccggcggcagcagctggaggaggatcgcactgctcatcttggccatcactatacacaacgttccagagggtctcgctgttggagttggatttggggctatagaaaagacggcatctgctacctttgagagtgccaggaatttggccattggaatcgggatccagaatttccccgagggcctggctgtcagccttcccttgcgaggggcaggcttctccacctggagagctttctggtatgggcagctgagcggcatggtggagcccctggccggggtctttggtgcctttgccgtggtgctggctgagcccatcctgccctacgctctggcctttgctgccggtgccatggtctacgtggtcatggacgacatcatccccgaagcccagatcagtggtaatgggaaactggcatcctgggcctccatcctgggatttgtagtgatgatgtcactggacgttggcctgggctagggctgagacgcttcggaccccgggaaaggccatacgaagaaacagcagtggttggcttctatgggacaacaagcttctttcttcacattaaaacttttttccttcctctcttcttcatctcattatcctgattgactctgattataatagaaccatttttactttgctttgagggagatttttgatttaatggggaattttaaggtgtcatggaaatacagattctttgttttggccactgaatggactctctcttcagtgggattatcaaggaacttcagatcagggaaatctccacttcgggaccttctatctgcctcccaactcctcaaggtcacctatagaagcgagctaccaaaagacgtctcctaagcattttggtggcctagtgactcagggcagagtggccagcacacctctcatccgcccctcctgctccatcactgctgagcctctccccatctagaatgttggaactggagcatcataaagatagcaagctaccttccaaggccgagccagcccagagaggagcatgtcttcctttacctccccctaaggagatactacatgggagggggacacagaaaaagggaaggaaattggctagtctggctttttttttttttttttttaaaggcaaagattgacattattgaaggaaaggggatgaggacaactgtgaactcacagtgagccctgtggaaagaagagacagacagagtgtgggtttgttcggaggcctctgctgtcaatggattccaggagcaaggccatttgtcgcgctttccaaatttcttaggcatttattttgataagtttatagccatcatgtttctaagagacttggagacaccagcaaactgctagaactcaaactcttcaattactcaaagaaggagccatttcagttaactcaagtgaatgaaagagttttggaatctgctgtgggtccttccctgttgaccatttggtaacttataatctgacaaaaactcttgagctgcaacaggccttgccagagggctcaggatgggaaaggaagaaggggataggaaaagaagaggtaattttacatttcccctttaaagtaaattttagccaactcatcattctgaaatgtccctataaagaatgagtcgaactagaccagaagccagcctactccttcttacatagcttctccaacaggggtagcaatgacctgtccacttcaaacacagataaggcctgccatcctcattggttaaaggcacacgtgagactttcagtgggctctgctgagaaggaaggcagcccaggagtcaggtatgcaggcattgcattgtcagtgtctgctctcagagtttacacattcaattgcttccaagggtgaatctcctgctctgtgaatgctatcagaccccaaaggccaaccttgggctgggtctatgtacgttcttccgaagcactgatgatcaaaattgaagacacattcagaggtttgattggttgagattaactggtgtggtggttggtgtatgtatgttttatttttatgtctttgtatgtagttctacataatgcaaattgtgctttctgatggacaagacctcataactgtgattaatatcaataaaaaggggatgttgtggatg

SEQ ID NO: 60565 - protein, 176 aa, Artificial Sequence
  derived and/or modified sequence
MVSYWDTGVLLCALLSCLLLTGSSSGSKLKDPELSLKGTQHIMQAGQTLHLQCRGEAAHKWSLPEMVSKESERLSITKSACGRNGKQFCSTLTLNTAQANHTGFYSCKYLAVPTSKKKETESAIYIFISDTGRPFVEMYSEIPEIIHMTEGRELVIPCRVTSPNITVTLKKKNKRA

SEQ ID NO: 60566 - DNA, 338 bp, Artificial Sequence
  derived and/or modified sequence
gagagcatcactcagcgcatggcaataatagaaggaaagaataagatggctagcaccttggttgtggctgactctagaatttctggaatctacatttgcatagcttccaataaagttgggactgtgggaagaaacataagcttttatatcacagaattgtcaaactttgagtgccttcatccttgctctcaggaatagaattctacctcatcggatctcatgtgccaaatgggtttcatgttaacttggaaaaaatgccgacggaaggagaggacctgaaactgtcttgcacagttaacaagttcttatacagagacgttacttggattttactgcgg

SEQ ID NO: 60567 - DNA, 358 bp, Artificial Sequence
  derived and/or modified sequence
gagagcatcactcagcgcatggcaataatagaaggaaagaataagcttccaccagctaacagttctttcatgttgccacctacaagcttctcttccaactacttccatttccttccgtgactctaaacggatggctagcaccttggttgtggctgactctagaatttctggaatctacatttgcatagcttccaataaagttgggactgtgggaagaaacataagcttttatatcacagatgtgccaaatgggtttcatgttaacttggaaaaaatgccgacggaaggagaggacctgaaactgtcttgcacagttaacaagttcttatacagagacgttacttggattttactgcgg

SEQ ID NO: 60568 - protein, 607 aa, Artificial Sequence
  derived and/or modified sequence
MGKGRAGRVGTTALPPRLKEMKSQESAAGSKLVLRCETSSEYSSLRFKWFKNGNELNRKNKPQNIKIQKKPGKSELRINKASLADSGEYMCKVISKLGNDSASANITIVESNEIITGMPASTEGAYVSSATSTSTTGTSHLVKCAEKEKTFCVNGGECFMVKDLSNPSRYLCKCPNEFTGDRCQNYVMASFYKHLGIEFMEAEELYQKRVLTITGICIALLVVGIMCVVAYCKTKKQRKKLHDRLRQSLRSERNNMMNIANGPHHPNPPPENVQLVNQYVSKNVISSEHIVEREAETSFSTSHYTSTAHHSTTVTQTPSHSWSNGHTESILSESHSVIVMSSVENSRHSSPTGGPRGRLNGTGGPRECNSFLRHARETPDSYRDSPHSERYVSAMTTPARMSPVDFHTPSSPKSPPSEMSPPVSSMTVSMPSMAVSPFMEEERPLLLVTPPRLREKKFDHHPQQFSSFHHNPAHDSNSLPASPLRIVEDEEYETTQEYEPAQEPVKKLANSRRAKRTKPNGHIANRLEVDSNTSSQSSNSESETEDERVGEDTPFLGIQNPLAASLEATPAFRLADSRTNPAGRFSTQEEIQARLSSVIANQDPIAV

SEQ ID NO: 60569 - DNA, 2553 bp, Artificial Sequence
  derived and/or modified sequence
gcactcggggcgacagagagggaggaggcgcgcggggacggggacgcccaggaggacccactcgcgggtcccgctccgctccggcagcagcatggggaaaggacgcgcgggccgagttggcaccacagccttgcctccccgattgaaagagatgaaaagccaggaatcggctgcaggttccaaactagtccttcggtgtgaaaccagttctgaatactcctctctcagattcaagtggttcaagaatgggaatgaattgaatcgaaaaaacaaaccacaaaatatcaagatacaaaaaaagccagggaagtcagaacttcgcattaacaaagcatcactggctgattctggagagtatatgtgcaaagtgatcagcaaattaggaaatgacagtgcctctgccaatatcaccatcgtggaatcaaacgagatcatcactggtatgccagcctcaactgaaggagcatatgtgtcttcagctacatctacatccaccactgggacaagccatcttgtaaaatgtgcggagaaggagaaaactttctgtgtgaatggaggggagtgcttcatggtgaaagacctttcaaacccctcgagatacttgtgcaagtgcccaaatgagtttactggtgatcgctgccaaaactacgtaatggccagcttctacaagcatcttgggattgaatttatggaggcggaggagctgtaccagaagagagtgctgaccataaccggcatctgcatcgccctccttgtggtcggcatcatgtgtgtggtggcctactgcaaaaccaagaaacagcggaaaaagctgcatgaccgtcttcggcagagccttcggtctgaacgaaacaatatgatgaacattgccaatgggcctcaccatcctaacccaccccccgagaatgtccagctggtgaatcaatacgtatctaaaaacgtcatctccagtgagcatattgttgagagagaagcagagacatccttttccaccagtcactatacttccacagcccatcactccactactgtcacccagactcctagccacagctggagcaacggacacactgaaagcatcctttccgaaagccactctgtaatcgtgatgtcatccgtagaaaacagtaggcacagcagcccaactgggggcccaagaggacgtcttaatggcacaggaggccctcgtgaatgtaacagcttcctcaggcatgccagagaaacccctgattcctaccgagactctcctcatagtgaaaggtatgtgtcagccatgaccaccccggctcgtatgtcacctgtagatttccacacgccaagctcccccaaatcgcccccttcggaaatgtctccacccgtgtccagcatgacggtgtccatgccttccatggcggtcagccccttcatggaagaagagagacctctacttctcgtgacaccaccaaggctgcgggagaagaagtttgaccatcaccctcagcagttcagctccttccaccacaaccccgcgcatgacagtaacagcctccctgctagccccttgaggatagtggaggatgaggagtatgaaacgacccaagagtacgagccagcccaagagcctgttaagaaactcgccaatagccggcgggccaaaagaaccaagcccaatggccacattgctaacagattggaagtggacagcaacacaagctcccagagcagtaactcagagagtgaaacagaagatgaaagagtaggtgaagatacgcctttcctgggcatacagaaccccctggcagccagtcttgaggcaacacctgccttccgcctggctgacagcaggactaacccagcaggccgcttctcgacacaggaagaaatccaggccaggctgtctagtgtaattgctaaccaagaccctattgctgtataaaacctaaataaacacatagattcacctgtaaaactttattttatataataaagtattccaccttaaattaaacaatttattttattttagcagttctgcaaatagaaaacaggaaaaaaacttttataaattaaatatatgtatgtaaaaatgtgttatgtgccatatgtagcaattttttacagtatttcaaaacgagaaagatatcaatggtgcctttatgttatgttatgtcgagagcaagttttgtacagttacagtgattgcttttccacagtatttctgcaaaacctctcatagattcagtttttgctggcttcttgtgcattgcattatgatgttgactggatgtatgatttgcaagacttgcaactgtccctctgtttgcttgtagtagcacccgatcagtatgtcttgtaatggcacatccatccagatatgcctctcttgtgtatgaagttttctttgctttcagaatatgaaatgagttgtgtctactctgccagccaaaggtttgcctcattgggctctgagataatagtagatccaacagcatgctactattaaatacagcaagaaactgcattaagtaatgttaaatattaggaagaaagtaatactgtgatttaaaaaaaact

SEQ ID NO: 60570 - protein, 308 aa, Artificial Sequence
  derived and/or modified sequence
MQIPKHISIEDITATSTSTTGTSHLVKCAEKEKTFCVNGGECFMVKDLSNPSRYLCKCQPGFTGARCTENVPMKVQNQEKAEELYQKRVLTITGICIALLVVGIMCVVAYCKTKKQRKKLHDRLRQSLRSERNNMMNIANGPHHPNPPPENVQLVNQYVSKNVISSEHIVEREAETSFSTSHYTSTAHHSTTVTQTPSHSWSNGHTESILSESHSVIVMSSVENSRHSSPTGGPRGRLNGTGGPRECNSFLRHARETPDSYRDSPHSERHNLIAELRRNKAHRSKCMQIQLSATHLRSSSIPHLGFIL

SEQ ID NO: 60571 - DNA, 2411 bp, Artificial Sequence
  derived and/or modified sequence
ctctttctgctcagcttctgctccagagcttcatcttcaggaaccacctaagcatttttttccccagtaggagttcagtctgctcattatacctaattgcaaaggagctatattcagagcaagaataataatttcagattttttaactggacttcaaagagcaggaaagtatgcagattcctaaacacataagcattgaagatattacagctacatctacatccaccactgggacaagccatcttgtaaaatgtgcggagaaggagaaaactttctgtgtgaatggaggggagtgcttcatggtgaaagacctttcaaacccctcgagatacttgtgcaagtgccaacctggattcactggagcaagatgtactgagaatgtgcccatgaaagtccaaaaccaagaaaaggcggaggagctgtaccagaagagagtgctgaccataaccggcatctgcatcgccctccttgtggtcggcatcatgtgtgtggtggcctactgcaaaaccaagaaacagcggaaaaagctgcatgaccgtcttcggcagagccttcggtctgaacgaaacaatatgatgaacattgccaatgggcctcaccatcctaacccaccccccgagaatgtccagctggtgaatcaatacgtatctaaaaacgtcatctccagtgagcatattgttgagagagaagcagagacatccttttccaccagtcactatacttccacagcccatcactccactactgtcacccagactcctagccacagctggagcaacggacacactgaaagcatcctttccgaaagccactctgtaatcgtgatgtcatccgtagaaaacagtaggcacagcagcccaactgggggcccaagaggacgtcttaatggcacaggaggccctcgtgaatgtaacagcttcctcaggcatgccagagaaacccctgattcctaccgagactctcctcatagtgaaagacataaccttatagctgagctaaggagaaacaaggcacacagatccaaatgcatgcagatccagctatcagcaactcatcttagatcttcttccattccccatttgggcttcattctctaagaccccttggcctttaggaaggtatgtgtcagccatgaccaccccggctcgtatgtcacctgtagatttccacacgccaagctcccccaaatcgcccccttcggaaatgtctccacccgtgtccagcatgacggtgtccatgccttccatggcggtcagccccttcatggaagaagagagacctctacttctcgtgacaccaccaaggctgcgggagaagaagtttgaccatcaccctcagcagttcagctccttccaccacaaccccgcgcatgacagtaacagcctccctgctagccccttgaggatagtggaggatgaggagtatgaaacgacccaagagtacgagccagcccaagagcctgttaagaaactcgccaatagccggcgggccaaaagaaccaagcccaatggccacattgctaacagattggaagtggacagcaacacaagctcccagagcagtaactcagagagtgaaacagaagatgaaagagtaggtgaagatacgcctttcctgggcatacagaaccccctggcagccagtcttgaggcaacacctgccttccgcctggctgacagcaggactaacccagcaggccgcttctcgacacaggaagaaatccaggccaggctgtctagtgtaattgctaaccaagaccctattgctgtataaaacctaaataaacacatagattcacctgtaaaactttattttatataataaagtattccaccttaaattaaacaatttattttattttagcagttctgcaaatagaaaacaggaaaaaaacttttataaattaaatatatgtatgtaaaaatgtgttatgtgccatatgtagcaattttttacagtatttcaaaacgagaaagatatcaatggtgcctttatgttatgttatgtcgagagcaagttttgtacagttacagtgattgcttttccacagtatttctgcaaaacctctcatagattcagtttttgctggcttcttgtgcattgcattatgatgttgactggatgtatgatttgcaagacttgcaactgtccctctgtttgcttgtagtagcacccgatcagtatgtcttgtaatggcacatccatccagatatgcctctcttgtgtatgaagttttctttgctttcagaatatgaaatgagttgtgtctactctgccagccaaaggtttgcctcattgggctctgagataatagtagatccaacagcatgctactattaaatacagcaagaaactgcattaagtaatgttaaatattaggaagaaagtaatactgtgatttaaaaaaaact

SEQ ID NO: 60572 - protein, 624 aa, Artificial Sequence
  derived and/or modified sequence
MGKGRAGRVGTTALPPRLKEMKSQESAAGSKLVLRCETSSEYSSLRFKWFKNGNELNRKNKPQNIKIQKKPGKSELRINKASLADSGEYMCKVISKLGNDSASANITIVESNEIITGMPASTEGAYVSSESPIRISVSTEGANTSSSTSTSTTGTSHLVKCAEKEKTFCVNGGECFMVKDLSNPSRYLCKCPNEFTGDRCQNYVMASFYKHLGIEFMEAEELYQKRVLTITGICIALLVVGIMCVVAYCKTKKQRKKLHDRLRQSLRSERNNMMNIANGPHHPNPPPENVQLVNQYVSKNVISSEHIVEREAETSFSTSHYTSTAHHSTTVTQTPSHSWSNGHTESILSESHSVIVMSSVENSRHSSPTGGPRGRLNGTGGPRECNSFLRHARETPDSYRDSPHSERYVSAMTTPARMSPVDFHTPSSPKSPPSEMSPPVSSMTVSMPSMAVSPFMEEERPLLLVTPPRLREKKFDHHPQQFSSFHHNPAHDSNSLPASPLRIVEDEEYETTQEYEPAQEPVKKLANSRRAKRTKPNGHIANRLEVDSNTSSQSSNSESETEDERVGEDTPFLGIQNPLAASLEATPAFRLADSRTNPAGRFSTQEEIQARLSSVIANQDPIAV

SEQ ID NO: 60573 - DNA, 2604 bp, Artificial Sequence
  derived and/or modified sequence
gcactcggggcgacagagagggaggaggcgcgcggggacggggacgcccaggaggacccactcgcgggtcccgctccgctccggcagcagcatggggaaaggacgcgcgggccgagttggcaccacagccttgcctccccgattgaaagagatgaaaagccaggaatcggctgcaggttccaaactagtccttcggtgtgaaaccagttctgaatactcctctctcagattcaagtggttcaagaatgggaatgaattgaatcgaaaaaacaaaccacaaaatatcaagatacaaaaaaagccagggaagtcagaacttcgcattaacaaagcatcactggctgattctggagagtatatgtgcaaagtgatcagcaaattaggaaatgacagtgcctctgccaatatcaccatcgtggaatcaaacgagatcatcactggtatgccagcctcaactgaaggagcatatgtgtcttcagagtctcccattagaatatcagtatccacagaaggagcaaatacttcttcatctacatctacatccaccactgggacaagccatcttgtaaaatgtgcggagaaggagaaaactttctgtgtgaatggaggggagtgcttcatggtgaaagacctttcaaacccctcgagatacttgtgcaagtgcccaaatgagtttactggtgatcgctgccaaaactacgtaatggccagcttctacaagcatcttgggattgaatttatggaggcggaggagctgtaccagaagagagtgctgaccataaccggcatctgcatcgccctccttgtggtcggcatcatgtgtgtggtggcctactgcaaaaccaagaaacagcggaaaaagctgcatgaccgtcttcggcagagccttcggtctgaacgaaacaatatgatgaacattgccaatgggcctcaccatcctaacccaccccccgagaatgtccagctggtgaatcaatacgtatctaaaaacgtcatctccagtgagcatattgttgagagagaagcagagacatccttttccaccagtcactatacttccacagcccatcactccactactgtcacccagactcctagccacagctggagcaacggacacactgaaagcatcctttccgaaagccactctgtaatcgtgatgtcatccgtagaaaacagtaggcacagcagcccaactgggggcccaagaggacgtcttaatggcacaggaggccctcgtgaatgtaacagcttcctcaggcatgccagagaaacccctgattcctaccgagactctcctcatagtgaaaggtatgtgtcagccatgaccaccccggctcgtatgtcacctgtagatttccacacgccaagctcccccaaatcgcccccttcggaaatgtctccacccgtgtccagcatgacggtgtccatgccttccatggcggtcagccccttcatggaagaagagagacctctacttctcgtgacaccaccaaggctgcgggagaagaagtttgaccatcaccctcagcagttcagctccttccaccacaaccccgcgcatgacagtaacagcctccctgctagccccttgaggatagtggaggatgaggagtatgaaacgacccaagagtacgagccagcccaagagcctgttaagaaactcgccaatagccggcgggccaaaagaaccaagcccaatggccacattgctaacagattggaagtggacagcaacacaagctcccagagcagtaactcagagagtgaaacagaagatgaaagagtaggtgaagatacgcctttcctgggcatacagaaccccctggcagccagtcttgaggcaacacctgccttccgcctggctgacagcaggactaacccagcaggccgcttctcgacacaggaagaaatccaggccaggctgtctagtgtaattgctaaccaagaccctattgctgtataaaacctaaataaacacatagattcacctgtaaaactttattttatataataaagtattccaccttaaattaaacaatttattttattttagcagttctgcaaatagaaaacaggaaaaaaacttttataaattaaatatatgtatgtaaaaatgtgttatgtgccatatgtagcaattttttacagtatttcaaaacgagaaagatatcaatggtgcctttatgttatgttatgtcgagagcaagttttgtacagttacagtgattgcttttccacagtatttctgcaaaacctctcatagattcagtttttgctggcttcttgtgcattgcattatgatgttgactggatgtatgatttgcaagacttgcaactgtccctctgtttgcttgtagtagcacccgatcagtatgtcttgtaatggcacatccatccagatatgcctctcttgtgtatgaagttttctttgctttcagaatatgaaatgagttgtgtctactctgccagccaaaggtttgcctcattgggctctgagataatagtagatccaacagcatgctactattaaatacagcaagaaactgcattaagtaatgttaaatattaggaagaaagtaatactgtgatttaaaaaaaact

SEQ ID NO: 60574 - protein, 611 aa, Artificial Sequence
  derived and/or modified sequence
MSERKEGRGKGKGKKKERGSGKKPESAAGSQSPALPPRLKEMKSQESAAGSKLVLRCETSSEYSSLRFKWFKNGNELNRKNKPQNIKIQKKPGKSELRINKASLADSGEYMCKVISKLGNDSASANITIVESNATSTSTTGTSHLVKCAEKEKTFCVNGGECFMVKDLSNPSRYLCKCPNEFTGDRCQNYVMASFYKHLGIEFMEAEELYQKRVLTITGICIALLVVGIMCVVAYCKTKKQRKKLHDRLRQSLRSERNNMMNIANGPHHPNPPPENVQLVNQYVSKNVISSEHIVEREAETSFSTSHYTSTAHHSTTVTQTPSHSWSNGHTESILSESHSVIVMSSVENSRHSSPTGGPRGRLNGTGGPRECNSFLRHARETPDSYRDSPHSERYVSAMTTPARMSPVDFHTPSSPKSPPSEMSPPVSSMTVSMPSMAVSPFMEEERPLLLVTPPRLREKKFDHHPQQFSSFHHNPAHDSNSLPASPLRIVEDEEYETTQEYEPAQEPVKKLANSRRAKRTKPNGHIANRLEVDSNTSSQSSNSESETEDERVGEDTPFLGIQNPLAASLEATPAFRLADSRTNPAGRFSTQEEIQARLSSVIANQDPIAV

SEQ ID NO: 60575 - protein, 590 aa, Artificial Sequence
  derived and/or modified sequence
MGKGRAGRVGTTALPPRLKEMKSQESAAGSKLVLRCETSSEYSSLRFKWFKNGNELNRKNKPQNIKIQKKPGKSELRINKASLADSGEYMCKVISKLGNDSASANITIVESNATSTSTTGTSHLVKCAEKEKTFCVNGGECFMVKDLSNPSRYLCKCPNEFTGDRCQNYVMASFYKHLGIEFMEAEELYQKRVLTITGICIALLVVGIMCVVAYCKTKKQRKKLHDRLRQSLRSERNNMMNIANGPHHPNPPPENVQLVNQYVSKNVISSEHIVEREAETSFSTSHYTSTAHHSTTVTQTPSHSWSNGHTESILSESHSVIVMSSVENSRHSSPTGGPRGRLNGTGGPRECNSFLRHARETPDSYRDSPHSERYVSAMTTPARMSPVDFHTPSSPKSPPSEMSPPVSSMTVSMPSMAVSPFMEEERPLLLVTPPRLREKKFDHHPQQFSSFHHNPAHDSNSLPASPLRIVEDEEYETTQEYEPAQEPVKKLANSRRAKRTKPNGHIANRLEVDSNTSSQSSNSESETEDERVGEDTPFLGIQNPLAASLEATPAFRLADSRTNPAGRFSTQEEIQARLSSVIANQDPIAV

SEQ ID NO: 60576 - DNA, 2502 bp, Artificial Sequence
  derived and/or modified sequence
gcactcggggcgacagagagggaggaggcgcgcggggacggggacgcccaggaggacccactcgcgggtcccgctccgctccggcagcagcatggggaaaggacgcgcgggccgagttggcaccacagccttgcctccccgattgaaagagatgaaaagccaggaatcggctgcaggttccaaactagtccttcggtgtgaaaccagttctgaatactcctctctcagattcaagtggttcaagaatgggaatgaattgaatcgaaaaaacaaaccacaaaatatcaagatacaaaaaaagccagggaagtcagaacttcgcattaacaaagcatcactggctgattctggagagtatatgtgcaaagtgatcagcaaattaggaaatgacagtgcctctgccaatatcaccatcgtggaatcaaacgctacatctacatccaccactgggacaagccatcttgtaaaatgtgcggagaaggagaaaactttctgtgtgaatggaggggagtgcttcatggtgaaagacctttcaaacccctcgagatacttgtgcaagtgcccaaatgagtttactggtgatcgctgccaaaactacgtaatggccagcttctacaagcatcttgggattgaatttatggaggcggaggagctgtaccagaagagagtgctgaccataaccggcatctgcatcgccctccttgtggtcggcatcatgtgtgtggtggcctactgcaaaaccaagaaacagcggaaaaagctgcatgaccgtcttcggcagagccttcggtctgaacgaaacaatatgatgaacattgccaatgggcctcaccatcctaacccaccccccgagaatgtccagctggtgaatcaatacgtatctaaaaacgtcatctccagtgagcatattgttgagagagaagcagagacatccttttccaccagtcactatacttccacagcccatcactccactactgtcacccagactcctagccacagctggagcaacggacacactgaaagcatcctttccgaaagccactctgtaatcgtgatgtcatccgtagaaaacagtaggcacagcagcccaactgggggcccaagaggacgtcttaatggcacaggaggccctcgtgaatgtaacagcttcctcaggcatgccagagaaacccctgattcctaccgagactctcctcatagtgaaaggtatgtgtcagccatgaccaccccggctcgtatgtcacctgtagatttccacacgccaagctcccccaaatcgcccccttcggaaatgtctccacccgtgtccagcatgacggtgtccatgccttccatggcggtcagccccttcatggaagaagagagacctctacttctcgtgacaccaccaaggctgcgggagaagaagtttgaccatcaccctcagcagttcagctccttccaccacaaccccgcgcatgacagtaacagcctccctgctagccccttgaggatagtggaggatgaggagtatgaaacgacccaagagtacgagccagcccaagagcctgttaagaaactcgccaatagccggcgggccaaaagaaccaagcccaatggccacattgctaacagattggaagtggacagcaacacaagctcccagagcagtaactcagagagtgaaacagaagatgaaagagtaggtgaagatacgcctttcctgggcatacagaaccccctggcagccagtcttgaggcaacacctgccttccgcctggctgacagcaggactaacccagcaggccgcttctcgacacaggaagaaatccaggccaggctgtctagtgtaattgctaaccaagaccctattgctgtataaaacctaaataaacacatagattcacctgtaaaactttattttatataataaagtattccaccttaaattaaacaatttattttattttagcagttctgcaaatagaaaacaggaaaaaaacttttataaattaaatatatgtatgtaaaaatgtgttatgtgccatatgtagcaattttttacagtatttcaaaacgagaaagatatcaatggtgcctttatgttatgttatgtcgagagcaagttttgtacagttacagtgattgcttttccacagtatttctgcaaaacctctcatagattcagtttttgctggcttcttgtgcattgcattatgatgttgactggatgtatgatttgcaagacttgcaactgtccctctgtttgcttgtagtagcacccgatcagtatgtcttgtaatggcacatccatccagatatgcctctcttgtgtatgaagttttctttgctttcagaatatgaaatgagttgtgtctactctgccagccaaaggtttgcctcattgggctctgagataatagtagatccaacagcatgctactattaaatacagcaagaaactgcattaagtaatgttaaatattaggaagaaagtaatactgtgatttaaaaaaaact

SEQ ID NO: 60577 - DNA, 1836 bp, Artificial Sequence
  derived and/or modified sequence
atgagcgagagaaaggagggcagaggcaagggcaagggcaagaagaaggagagaggcagcggcaagaagcccgagagcgccgccggcagccagagccccgccctgccccccagactgaaggagatgaagagccaggagagcgccgccggcagcaagctggtgctgagatgcgagaccagcagcgagtacagcagcctgagattcaagtggttcaagaacggcaacgagctgaacagaaagaacaagccccagaacatcaagatccagaagaagcccggcaagagcgagctgagaatcaacaaggccagcctggccgacagcggcgagtacatgtgcaaggtgatcagcaagctgggcaacgacagcgccagcgccaacatcaccatcgtggagagcaacgccaccagcaccagcaccaccggcaccagccacctggtgaagtgcgccgagaaggagaagaccttctgcgtgaacggcggcgagtgcttcatggtgaaggacctgagcaaccccagcagatacctgtgcaagtgccccaacgagttcaccggcgacagatgccagaactacgtgatggccagcttctacaagcacctgggcatcgagttcatggaggccgaggagctgtaccagaagagagtgctgaccatcaccggcatctgcatcgccctgctggtggtgggcatcatgtgcgtggtggcctactgcaagaccaagaagcagagaaagaagctgcacgacagactgagacagagcctgagaagcgagagaaacaacatgatgaacatcgccaacggcccccaccaccccaaccccccccccgagaacgtgcagctggtgaaccagtacgtgagcaagaacgtgatcagcagcgagcacatcgtggagagagaggccgagaccagcttcagcaccagccactacaccagcaccgcccaccacagcaccaccgtgacccagacccccagccacagctggagcaacggccacaccgagagcatcctgagcgagagccacagcgtgatcgtgatgagcagcgtggagaacagcagacacagcagccccaccggcggccccagaggcagactgaacggcaccggcggccccagagagtgcaacagcttcctgagacacgccagagagacccccgacagctacagagacagcccccacagcgagagatacgtgagcgccatgaccacccccgccagaatgagccccgtggacttccacacccccagcagccccaagagcccccccagcgagatgagcccccccgtgagcagcatgaccgtgagcatgcccagcatggccgtgagccccttcatggaggaggagagacccctgctgctggtgaccccccccagactgagagagaagaagttcgaccaccacccccagcagttcagcagcttccaccacaaccccgcccacgacagcaacagcctgcccgccagccccctgagaatcgtggaggacgaggagtacgagaccacccaggagtacgagcccgcccaggagcccgtgaagaagctggccaacagcagaagagccaagagaaccaagcccaacggccacatcgccaacagactggaggtggacagcaacaccagcagccagagcagcaacagcgagagcgagaccgaggacgagagagtgggcgaggacacccccttcctgggcatccagaaccccctggccgccagcctggaggccacccccgccttcagactggccgacagcagaaccaaccccgccggcagattcagcacccaggaggagatccaggccagactgagcagcgtgatcgccaaccaggaccccatcgccgtgtag

SEQ ID NO: 60578 - DNA, 1773 bp, Artificial Sequence
  derived and/or modified sequence
atgggcaagggcagagccggcagagtgggcaccaccgccctgccccccagactgaaggagatgaagagccaggagagcgccgccggcagcaagctggtgctgagatgcgagaccagcagcgagtacagcagcctgagattcaagtggttcaagaacggcaacgagctgaacagaaagaacaagccccagaacatcaagatccagaagaagcccggcaagagcgagctgagaatcaacaaggccagcctggccgacagcggcgagtacatgtgcaaggtgatcagcaagctgggcaacgacagcgccagcgccaacatcaccatcgtggagagcaacgccaccagcaccagcaccaccggcaccagccacctggtgaagtgcgccgagaaggagaagaccttctgcgtgaacggcggcgagtgcttcatggtgaaggacctgagcaaccccagcagatacctgtgcaagtgccccaacgagttcaccggcgacagatgccagaactacgtgatggccagcttctacaagcacctgggcatcgagttcatggaggccgaggagctgtaccagaagagagtgctgaccatcaccggcatctgcatcgccctgctggtggtgggcatcatgtgcgtggtggcctactgcaagaccaagaagcagagaaagaagctgcacgacagactgagacagagcctgagaagcgagagaaacaacatgatgaacatcgccaacggcccccaccaccccaaccccccccccgagaacgtgcagctggtgaaccagtacgtgagcaagaacgtgatcagcagcgagcacatcgtggagagagaggccgagaccagcttcagcaccagccactacaccagcaccgcccaccacagcaccaccgtgacccagacccccagccacagctggagcaacggccacaccgagagcatcctgagcgagagccacagcgtgatcgtgatgagcagcgtggagaacagcagacacagcagccccaccggcggccccagaggcagactgaacggcaccggcggccccagagagtgcaacagcttcctgagacacgccagagagacccccgacagctacagagacagcccccacagcgagagatacgtgagcgccatgaccacccccgccagaatgagccccgtggacttccacacccccagcagccccaagagcccccccagcgagatgagcccccccgtgagcagcatgaccgtgagcatgcccagcatggccgtgagccccttcatggaggaggagagacccctgctgctggtgaccccccccagactgagagagaagaagttcgaccaccacccccagcagttcagcagcttccaccacaaccccgcccacgacagcaacagcctgcccgccagccccctgagaatcgtggaggacgaggagtacgagaccacccaggagtacgagcccgcccaggagcccgtgaagaagctggccaacagcagaagagccaagagaaccaagcccaacggccacatcgccaacagactggaggtggacagcaacaccagcagccagagcagcaacagcgagagcgagaccgaggacgagagagtgggcgaggacacccccttcctgggcatccagaaccccctggccgccagcctggaggccacccccgccttcagactggccgacagcagaaccaaccccgccggcagattcagcacccaggaggagatccaggccagactgagcagcgtgatcgccaaccaggaccccatcgccgtgtag

SEQ ID NO: 60579 - DNA, 1836 bp, Artificial Sequence
  derived and/or modified sequence
atgagcgaaagaaaggaggggaggggtaaggggaagggcaagaaaaaagaaagaggaagcggcaagaaacctgaatccgcagccgggtcacagtccccagccctcccccctagacttaaggagatgaagagccaagaatcagctgccgggagcaagcttgtactgagatgcgagacttccagcgagtattccagtctccgcttcaaatggttcaaaaatggaaatgaactgaatcggaagaataagccccaaaacatcaagattcaaaagaaacccggcaagtcggagctccggatcaacaaagcctcactggccgacagcggggaatacatgtgtaaggtgatctcaaaattggggaatgattccgccagcgcgaacatcacaattgtcgagagcaatgctacttcaacatctaccactggaacctctcatctcgttaagtgtgcagagaaagagaaaacgttctgtgtgaatgggggagagtgctttatggtcaaggacctgagcaacccctcacggtatctatgcaaatgtcccaatgagtttaccggtgaccgatgccaaaactatgtcatggcttcattctacaagcatctcgggattgagtttatggaggctgaagagctgtaccagaaaagggtgttgacaatcaccggaatctgcatcgcactgctcgtggtgggcataatgtgcgtcgtcgcttattgtaagacaaaaaaacagcgtaagaagctgcacgacagactcagacagtctctgaggtctgagcgtaacaatatgatgaatattgctaacgggccgcaccatcctaacccaccccccgaaaacgtccaattagtgaaccagtatgtgagcaagaatgttatctcctccgaacatattgtcgaaagggaggccgagacgagtttctcgacaagtcattacacaagcacagctcaccactctacaaccgtcacccagaccccaagccacagttggtcaaacggtcatacggaatctatacttagtgagtcacattccgtgatagttatgagctctgtcgaaaactcccggcatagctctccaacggggggacctagaggcaggttgaacggcactggaggtccacgtgaatgcaattcatttctcaggcacgccagggaaacccctgactcgtacagagacagtccccactcagagcgctatgtgtctgcaatgaccacaccggcacgtatgagtcccgttgacttccataccccatcatctccaaaatcacccccgtctgagatgagtccacccgtctcatcgatgaccgtgagcatgcctagcatggccgtgtcaccattcatggaggaggaacgtcctctgctgctcgtgactcccccacggctgcgggagaagaagttcgaccatcacccccagcagtttagttcatttcatcataatccagcccatgattctaattcactccccgcctcacccctgcggattgtggaagacgaggagtatgagactacccaggagtacgaaccagcccaagaacccgttaagaaacttgctaactcaagacgcgcaaagcgcacaaagccaaacggccatatcgccaataggctcgaggtggattcaaacacttctagccagtccagcaattccgaatccgagactgaggatgaaagagtgggggaagatactccgttcctgggcatccagaatcctctggcggcgagccttgaagcaactccagctttccgactggctgactcccgcactaatcccgcagggaggttttcaacacaagaggaaattcaggctagactgtcctccgtgattgcgaatcaggacccaatcgctgtttag

SEQ ID NO: 60580 - DNA, 1773 bp, Artificial Sequence
  derived and/or modified sequence
atggggaaagggcgtgccggcagggtcggaacaactgccttaccccctcggctgaaagagatgaaatcccaagagagcgcagccggctctaaactggtgttgcgctgcgaaacatcctctgagtactccagtctcaggttcaagtggtttaagaatggcaacgaactgaatagaaaaaataaaccccagaacatcaagattcagaagaagcctggcaaaagcgagctacggattaataaggccagcctcgctgattctggggagtatatgtgtaaggtcatctcaaaactgggcaatgattcagcaagcgccaacatcaccatcgtggagagcaacgcaacttccacatctaccaccggcactagtcatctggttaagtgcgccgagaaagagaagaccttctgtgttaacggtggggagtgcttcatggttaaggatctctccaatccctctcgatatctctgtaagtgcccaaacgaattcaccggcgaccgctgtcagaactacgtaatggccagcttttacaagcatcttggaatcgaattcatggaagccgaagagctgtatcagaagagggtcctgactatcacaggaatttgcattgccctccttgtggtggggattatgtgcgtggtggcatactgcaagactaagaaacagcgaaaaaagctgcatgaccgtctccgacagagcttaagaagcgaacgcaacaacatgatgaatatcgccaacggtccgcatcaccccaacccccctccggagaatgtgcagctcgtgaaccagtatgtttccaagaatgtgatatcttcagagcacattgtggaaagggaggccgagaccagttttagtacgtcccattacacaagcaccgcgcatcattctacaacagtgacccagaccccaagtcacagctggtccaatgggcacacagaaagtatcctatccgagtcgcacagcgtcatcgtgatgtccagtgttgagaattcccgacattcttccccgacaggaggtcccagaggcaggctcaatggcactggcggcccgcgagagtgcaactctttcttgagacatgcccgcgaaactccagacagttaccgggactcccctcactctgaacgatacgtaagcgcgatgacaactcctgctcgcatgtcccccgtcgatttccatacacctagtagtcctaagtcccctccctccgaaatgtcccctcccgtgtcctccatgactgtcagcatgcccagcatggctgtaagcccttttatggaggaggagcggccactgctcctggttactccgccacgactacgagagaagaaatttgaccatcacccgcaacagttttcctccttccatcacaacccagcacacgactccaattccctgcctgcctcccccctgcgaatagtcgaggacgaggagtacgagaccactcaggaatacgaaccagcccaggaaccggtgaagaaactcgcgaactcaagaagagcaaagcgaacgaaaccaaacggccacatagccaacagacttgaagtggactctaatacaagttcacagtctagcaatagtgagtcagaaaccgaggacgagcgagtgggggaggacacacccttccttggcatccaaaatcccctggcagccagcctcgaagcgacacctgcatttcgtctggctgattcccgtacaaaccccgccggtcggttcagcacacaggaggaaattcaggccagattgtctagcgtgattgcaaaccaggatcctatcgcggtgtag

SEQ ID NO: 60581 - DNA, 1836 bp, Artificial Sequence
  derived and/or modified sequence
atgtctgagaggaaggagggccggggcaagggcaagggcaagaagaaggagcggggcagcggcaagaagccagagagcgctgctggcagccagagccctgccctgcccccccggctgaaggagatgaagagccaggagagcgctgctggcagcaagctggtgctgcgctgtgagaccagcagcgagtacagcagcctgcgcttcaagtggttcaagaatggaaatgagctgaacaggaagaacaagccccagaacatcaagatccagaagaagccaggcaagtctgagctgcgcatcaacaaggccagcctggccgacagcggggagtacatgtgcaaggtgatcagcaagctgggcaatgacagcgccagcgccaacatcaccatcgtggagagcaatgccaccagcaccagcaccaccggcaccagccacctggtgaagtgtgccgagaaggagaagaccttctgtgtgaatggaggagagtgcttcatggtgaaggacctgagcaaccccagccgctacctgtgcaagtgccccaatgagttcaccggggaccgctgccagaactacgtgatggccagcttctacaagcacctgggcatcgagttcatggaggccgaggagctgtaccagaagagggtgctgaccatcaccggcatctgcatcgccctgctggtggtgggcatcatgtgtgtggtggcctactgcaagaccaagaagcagaggaagaagctgcatgaccggctgcggcagagcctgcggagtgaaagaaacaacatgatgaacatcgccaacggcccccaccaccccaaccccccaccagaaaatgtgcagctggtgaaccagtatgtgtccaagaatgtcatcagcagcgagcacatcgtggagcgggaggccgagaccagcttcagcaccagccactacaccagcacagcccaccacagcaccaccgtgacccagacccccagccacagctggagcaatggccacacagagagcatcctgtctgagagccacagcgtcatcgtgatgagctctgtggagaacagccgccacagcagccccaccggcggcccccggggccgcctgaatggcaccggcggcccccgggagtgcaacagcttcctgcggcatgcccgggagaccccagacagctacagagacagcccccacagcgagagatatgtgtctgccatgaccaccccagccaggatgagccctgtggacttccacacccccagcagccccaagagccccccatctgagatgagcccccctgtgtcctccatgacagtgtccatgcccagcatggctgtgagccccttcatggaggaggagcggcccctgctgctggtgaccccaccccggctgcgggagaagaagtttgaccaccacccccagcagttcagcagcttccaccacaacccagcccatgacagcaacagcctgcctgccagccccctgcgcatcgtggaggatgaggagtatgagaccacccaggagtatgagcccgcccaggagcctgtgaagaagctggccaacagccggcgggccaagaggaccaagcccaacggccacatcgccaaccggctggaggtggacagcaacaccagcagccagagcagcaacagcgagagcgagacagaagatgagcgggtgggggaggacacccccttcctgggcatccagaaccccctggccgccagcctggaggccaccccagccttccggctggccgacagcaggaccaacccagctggccgcttcagcacccaggaggagatccaggcccggctgagctctgtgattgccaaccaggaccccatcgctgtgtag

SEQ ID NO: 60582 - DNA, 1773 bp, Artificial Sequence
  derived and/or modified sequence
atgggcaagggccgggccggccgggtgggcaccacagccctgcccccccggctgaaggagatgaagagccaggagagcgctgctggcagcaagctggtgctgcgctgtgagaccagcagcgagtacagcagcctgcgcttcaagtggttcaagaatggaaatgagctgaacaggaagaacaagccccagaacatcaagatccagaagaagccaggcaagtctgagctgcgcatcaacaaggccagcctggccgacagcggggagtacatgtgcaaggtgatcagcaagctgggcaatgattctgccagcgccaacatcaccatcgtggagagcaatgccaccagcaccagcaccaccggcaccagccacctggtgaagtgtgccgagaaggagaagaccttctgtgtgaatggaggagagtgcttcatggtgaaggacctgagcaaccccagccgctacctgtgcaagtgccccaatgagttcaccggggaccgctgccagaactacgtgatggccagcttctacaagcacctgggcatcgagttcatggaggccgaggagctgtaccagaagagggtgctgaccatcaccggcatctgcatcgccctgctggtggtgggcatcatgtgtgtggtggcctactgcaagaccaagaagcagaggaagaagctgcatgaccggctgcggcagagcctgcggtctgagaggaacaacatgatgaacatcgccaacggcccccaccaccccaaccccccaccagaaaatgtgcagctggtgaaccagtatgtgtccaagaatgtcatcagcagcgagcacatcgtggagcgggaggccgagaccagcttcagcaccagccactacaccagcacagcccaccacagcaccaccgtgacccagacccccagccacagctggagcaatggccacacagagagcatcctgtctgagagccacagcgtgattgtgatgagctctgtggagaacagccgccacagcagccccactggaggcccccggggccgcctgaatggaactggaggcccccgggagtgcaacagcttcctgcggcatgcccgggagaccccagacagctacagagacagcccccacagcgagcgctacgtgtctgccatgaccaccccagccaggatgagccctgtggacttccacacccccagcagccccaagagcccccccagcgagatgagcccccctgtgtcctccatgacagtgtccatgcccagcatggctgtgagccccttcatggaggaggagcggcccctgctgctggtgaccccaccccggctgcgggagaagaagtttgaccaccacccccagcagttcagcagcttccaccacaacccagcccatgacagcaacagcctgcctgccagccccctgagaattgtggaggatgaggagtatgagaccacccaggagtatgagcccgcccaggagcctgtgaagaagctggccaacagcagaagagccaagaggaccaagcccaacggccacatcgccaaccggctggaggtggacagcaacaccagcagccagagcagcaacagcgagagcgagacagaagatgagcgggtgggggaggacacccccttcctgggcatccagaaccccctggccgccagcctggaggccaccccagccttccggctggccgacagcaggaccaacccagctggccgcttcagcacccaggaggagatccaggcccggctgagcagcgtcatcgccaaccaggaccccatcgctgtgtag

SEQ ID NO: 60583 - DNA, 1836 bp, Artificial Sequence
  derived and/or modified sequence
atgagcgagcggaaggagggccggggcaagggcaagggcaagaagaaggagaggggctcagggaaaaagcctgagagcgctgctgggtcacagtctcccgccctgcccccacgcttgaaagagatgaagtcccaggaaagcgcagcaggttccaaactggtgctccggtgcgagactagctcagaatacagctctctccgattcaagtggtttaaaaacggaaatgagctgaaccgaaagaataaaccccagaacataaaaattcaaaaaaagcccgggaagtctgagttacgtattaataaggcctccctagcagactccggagagtatatgtgcaaggttatcagtaagctcgggaacgacagcgcctcagctaacatcacaattgttgaatccaacgcgaccagcacgagtactacaggcacttcgcaccttgtcaaatgtgccgagaaagagaaaaccttctgtgtgaacggaggcgaatgctttatggtgaaagacctgtcaaacccctccaggtacttgtgtaagtgcccgaatgagtttacaggtgatcgatgtcaaaactatgtcatggcctcattttacaaacatctggggatcgagttcatggaggctgaggagctgtatcaaaaacgggtactgacgattaccggtatatgtattgcactccttgtggttggcattatgtgcgtggttgcctattgcaagaccaagaagcagcgcaagaaattgcatgatcgtctgagacaaagcctcagatcggagcgaaacaatatgatgaacatagccaatggtccgcaccaccccaaccccccacccgaaaacgttcagttggtaaatcagtatgtcagtaagaatgtgatcagcagtgagcacattgtggagcgcgaagctgagacgtctttctccacgtcccattatactagcactgcccaccacagtaccacggtgactcagacgcccagccattcctggagcaacgggcacaccgagtccattctctctgaaagtcatagcgttatcgtgatgtcctccgtcgaaaacagtcgccattcctcccccaccggcggtcctcgcgggcgtctcaacggtaccgggggacctcgcgaatgtaacagcttcctgagacatgctcgggagactcccgattcgtatagagatagcccccattcagaaagatacgtctctgccatgaccacccctgctagaatgtcaccggttgacttccatacgccctcaagccccaaatcccccccttcagagatgtccccacccgttagcagtatgacagtgagcatgccttctatggcggtcagccctttcatggaagaagaacggcccttgctcctggtgaccccacctaggctgcgcgaaaagaagtttgatcaccacccccaacagttcagcagtttccatcataatccagcccacgactccaactccttgccggcttcacccttaaggattgtggaggatgaagagtatgaaaccacccaggaatatgagccagctcaggagccggtgaagaagctagctaattccagacgagctaagcgtacaaaacccaacggccacattgccaaccggctggaggttgattccaatacatcttctcagtcttctaattctgagtcagagaccgaagatgagcgcgtcggcgaggacactccattccttgggatccaaaaccctctcgccgcgtctttggaggccactccggcctttagactggcagatagccgcaccaaccccgcaggcagattcagcactcaagaggaaattcaggccagactgtcttccgtgattgccaaccaggaccctatcgctgtatag

SEQ ID NO: 60584 - DNA, 1773 bp, Artificial Sequence
  derived and/or modified sequence
atgggcaagggccgggccggccgggtgggcaccaccgccctgcccccccggttgaaggagatgaagagccaggaatccgccgctggctcgaagctcgtgcttcggtgcgagactagcagtgaatatagcagccttaggttcaaatggtttaagaacgggaacgagctgaataggaaaaataaaccacagaacataaagatacagaaaaaaccggggaagtccgagctgcggataaataaagcctccctcgccgacagcggtgaatatatgtgcaaggtgatctccaagctcgggaatgactccgcatccgcgaatattacaatcgttgagtcaaatgctacgagcaccagcacaaccggtactagtcatctggtaaagtgtgcagaaaaggagaaaacgttctgtgtcaacgggggtgagtgttttatggtgaaggacctctcaaatccaagccgttatttgtgtaagtgcccgaacgaattcacaggcgaccgctgtcagaactatgttatggcttcattctataaacatctaggaatcgagtttatggaggccgaagaactgtatcagaagcgggtgctgacaatcactggaatttgcatcgctttgttggtggttggaatcatgtgtgtggttgcctactgcaagacgaagaagcaaagaaaaaaactacacgatcggctccgacaatcccttcgctccgagcggaataacatgatgaatatcgctaacggtccccatcaccccaatcctccgccagagaatgtccagctcgtgaatcagtatgtgagcaagaatgtgatatcttctgaacacatcgttgaaagggaagctgaaacttccttctctaccagtcactatacgagtacagcgcaccattcaacaactgtgacacagaccccttcccactcttggagcaatggccacaccgaatcgatattgagtgaatcacacagcgtgattgtaatgagtagcgtggaaaattcgcgtcatagctctcctacagggggaccaagaggcaggcttaacggcactggcggcccccgcgagtgcaactctttcttgcgacatgcgcgagaaacgcctgattcttatagggacagcccccatagtgagcggtacgtcagtgctatgaccacacctgctagaatgtctccagtggactttcacacaccgtcgagtccaaaaagtccgccctcagagatgtcccctcctgtttccagtatgactgtgagtatgcctagcatggccgtatctccattcatggaagaggaaaggccattgctattagtgacacccccccggctccgggagaagaaatttgatcaccatccccagcaattctccagcttccatcataaccccgcgcatgacagcaattctcttccagcctcccctctgcgcatagtggaagatgaagaatatgagacaacgcaagagtatgagcccgcacaggaaccagtgaaaaaactcgcaaacagcagacgtgcgaagagaacgaaacctaacgggcatatcgcaaacagattggaggtcgacagtaacacaagtagccagagcagcaacagcgagagcgagaccgaggacgagagggtcggcgaggacacaccattcttggggattcagaaccccttggcggcctccctggaggccacccccgccttccgcctggctgacagccgaacaaacccagccggtagattcagcactcaggaggagatccaggcacgtctaagctccgtaattgcaaaccaggatccgatcgctgtctag

SEQ ID NO: 60585 - DNA, 1836 bp, Artificial Sequence
  derived and/or modified sequence
atgtctgaacggaaagaaggaaggggcaagggtaagggtaagaaaaaggagagaggcagcggaaagaaaccagaatctgctgcaggcagccagtcccctgccctgccgccacgcctgaaagaaatgaaatcccaggaaagtgcggcaggttcaaaacttgtgctcaggtgcgagacaagctcagagtatagctctcttcgatttaaatggttcaagaacggaaatgaattgaatagaaagaacaaacctcaaaatattaagatacaaaagaagcctgggaagtccgaactgagaatcaataaagccagcttagccgacagtggcgaatatatgtgtaaagttatctccaaactcggcaatgattctgcatctgctaacattactatcgtggagtctaacgctacatctacctccactacagggactagtcacttggttaaatgtgccgagaaagaaaagactttttgtgtgaacgggggagaatgtttcatggtgaaggacttgagcaacccttcccggtatctgtgcaaatgccctaacgaatttaccggggatcgctgccagaactacgtgatggcaagtttctacaaacacctggggatcgagtttatggaagccgaggaactgtatcagaaacgggtgttgaccatcaccggcatttgtatagccctgctggtggtcggtatcatgtgtgttgtagcctactgtaaaacaaaaaaacagcgtaagaagctgcatgaccgtttacggcagagcctgcgcagcgaacggaacaacatgatgaacatcgcaaacgggccacaccatccaaatcctccgcctgaaaacgtacaactcgttaatcagtatgtatctaagaacgttatcagctccgagcacattgttgagcgagaagctgagacttctttctctaccagccattacacatccaccgcacaccattccaccacagtgacccagaccccttctcactcctggtccaatgggcatacagagtccatcctttctgagtcccattcagtgatagttatgtccagtgtggagaatagccggcactctagtcctacaggcggacctaggggtagactgaatggtacggggggacctagagaatgtaattcctttctgcggcacgctagagagacccctgacagctacagggactcacctcattcggagcgctatgtgtccgcaatgacaactcctgcacggatgagtcccgtggatttccacaccccttctagtcccaagtcccctccaagcgagatgtcacctccagtgtccagcatgacagtgagcatgccctcaatggcggttagcccgttcatggaggaggaacggcctctgttactggtcacaccgcctcgcctacgcgagaagaaattcgaccaccacccccagcaatttagctcatttcaccataaccctgcgcacgatagcaacagcctgcccgcaagccccctgcgaatcgtagaggacgaggagtatgagactactcaagagtacgagcctgcccaagagcctgtcaagaagcttgccaacagtcgtagagctaaacgaaccaagccaaacggccatattgccaatagattagaagtcgactcgaacacctcttctcagtcgtccaattccgagtccgagactgaagacgaaagggttggcgaagacacacctttccttggaatccagaacccgctggccgcatctcttgaagctacccctgcattcaggctcgcagacagcaggacaaaccctgctggtcgattctccactcaggaagagattcaggccagacttagcagcgtgatcgcaaatcaggacccaatagctgtgtag

SEQ ID NO: 60586 - DNA, 1773 bp, Artificial Sequence
  derived and/or modified sequence
atgggaaaggggagggccggacgcgtgggtaccaccgcattacccccacggttgaaggagatgaaaagtcaagagagcgcagccggttctaagctggtactgcgatgcgagacttcatctgaatactccagcctcagatttaaatggtttaagaatggaaatgaattaaaccgaaagaacaagccccagaatatcaaaatccagaagaaaccaggcaagagcgagctgcgtatcaacaaggcgagcctggccgattcaggagaatatatgtgcaaggtgattagcaaactggggaatgatagcgcaagtgctaatatcactattgtggaaagtaacgcaaccagcacctccaccactgggacaagtcacttagtgaagtgtgccgaaaaagaaaagaccttttgcgtcaacggaggagagtgcttcatggtgaaggatctgtctaatccctctagatacctgtgcaaatgtccgaacgaatttacaggcgaccgctgccagaactatgtgatggccagcttttacaaacacctaggaattgaatttatggaagccgaagagctgtaccagaagagagtcttaaccattacaggtatatgtatcgctctgctagtcgtcggaattatgtgtgttgtggcatattgtaaaaccaagaagcaacggaagaagttacacgacaggctgcggcaaagccttaggtctgaacggaacaacatgatgaatatagcaaacggccctcaccatcccaatccgccaccagagaatgttcaattagtgaatcagtatgtgtctaagaacgtgatctcgagcgaacacatcgtggagcgggaagcagaaactagcttctctaccagtcattacacgtcaacggcacaccacagcaccaccgtgacacagacacctagtcactcatggagcaatggacatactgagtctatcctcagcgagagccactcagtcatcgtgatgtcatcagtggagaacagcaggcatagcagcccaaccggtggcccacgcggaaggctcaacggcactggcggacccagggagtgcaacagcttcctacggcacgctagggaaactccggacagttatcgtgatagtccacactccgagcggtatgtgagcgcgatgacaacacccgctaggatgagtcctgtagacttccatactccatccagcccaaagtcaccaccgagtgaaatgtctccccctgtgtcaagtatgaccgtttccatgccttcaatggctgtaagcccctttatggaggaagaacgcccactcctgctcgtgaccccaccaaggttacgcgagaagaaatttgaccaccacccccagcagttttcaagcttccaccataacccagcccacgattcaaactcactcccagcctcaccgctccgcattgttgaagacgaagaatatgagactactcaggaatatgagcccgcacaggaacccgtgaagaaattggcaaattcacggagggcaaagcggacaaagccaaacggtcatattgcgaaccgtctggaagtggatagcaacacctcttcccagtcatcaaattcagaaagcgagactgaggacgagagggttggggaggacaccccattcctcggcattcaaaacccactggcagcatctttagaggccactcctgctttccgcctggcagacagtcgcacaaatccagccggaaggttttcaactcaggaggagatccaggccaggctgtcctcagttattgcaaaccaggatcctatcgccgtctag

SEQ ID NO: 60587 - DNA, 2981 bp, Artificial Sequence
  derived and/or modified sequence
gaggccaggggagggtgcgaaggaggcgcctgcctccaacctgcgggcgggaggtgggtggctgcggggcaattgaaaaagagccggcgaggagttccccgaaacttgttggaactccgggctcgcgcggaggccaggagctgagcggcggcggctgccggacgatgggagcgtgagcaggacggtgataacctctccccgatcgggttgcgagggcgccgggcagaggccaggacgcgagccgccagcggtgggacccatcgacgacttcccggggcgacaggagcagccccgagagccagggcgagcgcccgttccaggtggccggaccgcccgccgcgtccgcgccgcgctccctgcaggcaacgggagacgcccccgcgcagcgcgagcgcctcagcgcggccgctcgctctccccctcgagggacaaacttttcccaaacccgatccgagcccttggaccaaactcgcctgcgccgagagccgtccgcgtagagcgctccgtctccggcgagatgtccgagcgcaaagaaggcagaggcaaagggaagggcaagaagaaggagcgaggctccggcaagaagccggagtccgcggcgggcagccagagcccagccttgcctccccgattgaaagagatgaaaagccaggaatcggctgcaggttccaaactagtccttcggtgtgaaaccagttctgaatactcctctctcagattcaagtggttcaagaatgggaatgaattgaatcgaaaaaacaaaccacaaaatatcaagatacaaaaaaagccagggaagtcagaacttcgcattaacaaagcatcactggctgattctggagagtatatgtgcaaagtgatcagcaaattaggaaatgacagtgcctctgccaatatcaccatcgtggaatcaaacgctacatctacatccaccactgggacaagccatcttgtaaaatgtgcggagaaggagaaaactttctgtgtgaatggaggggagtgcttcatggtgaaagacctttcaaacccctcgagatacttgtgcaagtgcccaaatgagtttactggtgatcgctgccaaaactacgtaatggccagcttctacaagcatcttgggattgaatttatggaggcggaggagctgtaccagaagagagtgctgaccataaccggcatctgcatcgccctccttgtggtcggcatcatgtgtgtggtggcctactgcaaaaccaagaaacagcggaaaaagctgcatgaccgtcttcggcagagccttcggtctgaacgaaacaatatgatgaacattgccaatgggcctcaccatcctaacccaccccccgagaatgtccagctggtgaatcaatacgtatctaaaaacgtcatctccagtgagcatattgttgagagagaagcagagacatccttttccaccagtcactatacttccacagcccatcactccactactgtcacccagactcctagccacagctggagcaacggacacactgaaagcatcctttccgaaagccactctgtaatcgtgatgtcatccgtagaaaacagtaggcacagcagcccaactgggggcccaagaggacgtcttaatggcacaggaggccctcgtgaatgtaacagcttcctcaggcatgccagagaaacccctgattcctaccgagactctcctcatagtgaaaggtatgtgtcagccatgaccaccccggctcgtatgtcacctgtagatttccacacgccaagctcccccaaatcgcccccttcggaaatgtctccacccgtgtccagcatgacggtgtccatgccttccatggcggtcagccccttcatggaagaagagagacctctacttctcgtgacaccaccaaggctgcgggagaagaagtttgaccatcaccctcagcagttcagctccttccaccacaaccccgcgcatgacagtaacagcctccctgctagccccttgaggatagtggaggatgaggagtatgaaacgacccaagagtacgagccagcccaagagcctgttaagaaactcgccaatagccggcgggccaaaagaaccaagcccaatggccacattgctaacagattggaagtggacagcaacacaagctcccagagcagtaactcagagagtgaaacagaagatgaaagagtaggtgaagatacgcctttcctgggcatacagaaccccctggcagccagtcttgaggcaacacctgccttccgcctggctgacagcaggactaacccagcaggccgcttctcgacacaggaagaaatccaggccaggctgtctagtgtaattgctaaccaagaccctattgctgtataaaacctaaataaacacatagattcacctgtaaaactttattttatataataaagtattccaccttaaattaaacaatttattttattttagcagttctgcaaatagaaaacaggaaaaaaacttttataaattaaatatatgtatgtaaaaatgtgttatgtgccatatgtagcaattttttacagtatttcaaaacgagaaagatatcaatggtgcctttatgttatgttatgtcgagagcaagttttgtacagttacagtgattgcttttccacagtatttctgcaaaacctctcatagattcagtttttgctggcttcttgtgcattgcattatgatgttgactggatgtatgatttgcaagacttgcaactgtccctctgtttgcttgtagtagcacccgatcagtatgtcttgtaatggcacatccatccagatatgcctctcttgtgtatgaagttttctttgctttcagaatatgaaatgagttgtgtctactctgccagccaaaggtttgcctcattgggctctgagataatagtagatccaacagcatgctactattaaatacagcaagaaactgcattaagtaatgttaaatattaggaagaaagtaatactgtgattt

SEQ ID NO: 60588 - DNA, 1785 bp, Artificial Sequence
  derived and/or modified sequence
ggcagcagcatggggaaaggacgcgcgggccgagttggcaccacagccttgcctccccgattgaaagagatgaaaagccaggaatcggctgcaggttccaaactagtccttcggtgtgaaaccagttctgaatactcctctctcagattcaagtggttcaagaatgggaatgaattgaatcgaaaaaacaaaccacaaaatatcaagatacaaaaaaagccagggaagtcagaacttcgcattaacaaagcatcactggctgattctggagagtatatgtgcaaagtgatcagcaaattaggaaatgacagtgcctctgccaatatcaccatcgtggaatcaaacgctacatctacatccaccactgggacaagccatcttgtaaaatgtgcggagaaggagaaaactttctgtgtgaatggaggggagtgcttcatggtgaaagacctttcaaacccctcgagatacttgtgcaagtgcccaaatgagtttactggtgatcgctgccaaaactacgtaatggccagcttctacaagcatcttgggattgaatttatggaggcggaggagctgtaccagaagagagtgctgaccataaccggcatctgcatcgccctccttgtggtcggcatcatgtgtgtggtggcctactgcaaaaccaagaaacagcggaaaaagctgcatgaccgtcttcggcagagccttcggtctgaacgaaacaatatgatgaacattgccaatgggcctcaccatcctaacccaccccccgagaatgtccagctggtgaatcaatacgtatctaaaaacgtcatctccagtgagcatattgttgagagagaagcagagacatccttttccaccagtcactatacttccacagcccatcactccactactgtcacccagactcctagccacagctggagcaacggacacactgaaagcatcctttccgaaagccactctgtaatcgtgatgtcatccgtagaaaacagtaggcacagcagcccaactgggggcccaagaggacgtcttaatggcacaggaggccctcgtgaatgtaacagcttcctcaggcatgccagagaaacccctgattcctaccgagactctcctcatagtgaaaggtatgtgtcagccatgaccaccccggctcgtatgtcacctgtagatttccacacgccaagctcccccaaatcgcccccttcggaaatgtctccacccgtgtccagcatgacggtgtccatgccttccatggcggtcagccccttcatggaagaagagagacctctacttctcgtgacaccaccaaggctgcgggagaagaagtttgaccatcaccctcagcagttcagctccttccaccacaaccccgcgcatgacagtaacagcctccctgctagccccttgaggatagtggaggatgaggagtatgaaacgacccaagagtacgagccagcccaagagcctgttaagaaactcgccaatagccggcgggccaaaagaaccaagcccaatggccacattgctaacagattggaagtggacagcaacacaagctcccagagcagtaactcagagagtgaaacagaagatgaaagagtaggtgaagatacgcctttcctgggcatacagaaccccctggcagccagtcttgaggcaacacctgccttccgcctggctgacagcaggactaacccagcaggccgcttctcgacacaggaagaaatccaggccaggctgtctagtgtaattgctaaccaagaccctattgctgtataaaac

SEQ ID NO: 60589 - protein, 194 aa, Artificial Sequence
  derived and/or modified sequence
MSERKEGRGKGKGKKKERGSGKKPESAAGSQSPALPPRLKEMKSQESAAGSKLVLRCETSSEYSSLRFKWFKNGNELNRKNKPQNIKIQKKPGKSELRINKASLADSGEYMCKVISKLGNDSASANITIVESNEIITGMPASTEGAYVSSATSTSTTGTSHLVKCAEKEKTFCVNGGECFMVKDLSNPSRYLCK

SEQ ID NO: 60590 - DNA, 1643 bp, Artificial Sequence
  derived and/or modified sequence
gaggccaggggagggtgcgaaggaggcgcctgcctccaacctgcgggcgggaggtgggtggctgcggggcaattgaaaaagagccggcgaggagttccccgaaacttgttggaactccgggctcgcgcggaggccaggagctgagcggcggcggctgccggacgatgggagcgtgagcaggacggtgataacctctccccgatcgggttgcgagggcgccgggcagaggccaggacgcgagccgccagcggtgggacccatcgacgacttcccggggcgacaggagcagccccgagagccagggcgagcgcccgttccaggtggccggaccgcccgccgcgtccgcgccgcgctccctgcaggcaacgggagacgcccccgcgcagcgcgagcgcctcagcgcggccgctcgctctccccctcgagggacaaacttttcccaaacccgatccgagcccttggaccaaactcgcctgcgccgagagccgtccgcgtagagcgctccgtctccggcgagatgtccgagcgcaaagaaggcagaggcaaagggaagggcaagaagaaggagcgaggctccggcaagaagccggagtccgcggcgggcagccagagcccagccttgcctccccgattgaaagagatgaaaagccaggaatcggctgcaggttccaaactagtccttcggtgtgaaaccagttctgaatactcctctctcagattcaagtggttcaagaatgggaatgaattgaatcgaaaaaacaaaccacaaaatatcaagatacaaaaaaagccagggaagtcagaacttcgcattaacaaagcatcactggctgattctggagagtatatgtgcaaagtgatcagcaaattaggaaatgacagtgcctctgccaatatcaccatcgtggaatcaaacgagatcatcactggtatgccagcctcaactgaaggagcatatgtgtcttcagctacatctacatccaccactgggacaagccatcttgtaaaatgtgcggagaaggagaaaactttctgtgtgaatggaggggagtgcttcatggtgaaagacctttcaaacccctcgagatacttgtgcaagtaagaaaagaaatcctgtgtgtcgcttatgtctataactccttgtttcagatgattctatgtctcatgatgtattgttgctttttttccaattttgttgcatcatgttgaataatgctgttttatatgtagagtgttttaaaacattcacaccattcgtcatcactcctctgtcatatgcagaattgttttttgctcttttcaatgtgtgtgaggtgttttttgtttttgtttttgttttttgccatgttatttatagtgttgctttccttgtggtttttcttgttgttattcagaaaagatgtgcagatatcacagaggcctataacttttggtatctacttctacatccaatgtatgaattaagctgtaagataatgttgctttcttatcccagtgatcacctgccaaatgaataagacaacaaagagaagcagaagggcagaagattatttactgacatatatctattacacttgggattgtcttactgttgcataactattttttaaacggagtttagttttatattgctagtaaaaaaa

SEQ ID NO: 60591 - protein, 459 aa, Artificial Sequence
  derived and/or modified sequence
MSERKEGRGKGKGKKKERGSGKKPESAAGSQSPALPPRLKEMKSQESAAGSKLVLRCETSSEYSSLRFKWFKNGNELNRKNKPQNIKIQKKPGKSELRINKASLADSGEYMCKVISKLGNDSASANITIVESNEIITGMPASTEGAYVSSESPIRISVSTEGANTSSSTSTSTTGTSHLVKCAEKEKTFCVNGGECFMVKDLSNPSRYLCKCPNEFTGDRCQNYVMASFYKAEELYQKRVLTITGICIALLVVGIMCVVAYCKTKKQRKKLHDRLRQSLRSERNNMMNIANGPHHPNPPPENVQLVNQYVSKNVISSEHIVEREAETSFSTSHYTSTAHHSTTVTQTPSHSWSNGHTESILSESHSVIVMSSVENSRHSSPTGGPRGRLNGTGGPRECNSFLRHARETPDSYRDSPHSERHNLIAELRRNKAHRSKCMQIQLSATHLRSSSIPHLGFIL

SEQ ID NO: 60592 - DNA, 3211 bp, Artificial Sequence
  derived and/or modified sequence
gaggccaggggagggtgcgaaggaggcgcctgcctccaacctgcgggcgggaggtgggtggctgcggggcaattgaaaaagagccggcgaggagttccccgaaacttgttggaactccgggctcgcgcggaggccaggagctgagcggcggcggctgccggacgatgggagcgtgagcaggacggtgataacctctccccgatcgggttgcgagggcgccgggcagaggccaggacgcgagccgccagcggtgggacccatcgacgacttcccggggcgacaggagcagccccgagagccagggcgagcgcccgttccaggtggccggaccgcccgccgcgtccgcgccgcgctccctgcaggcaacgggagacgcccccgcgcagcgcgagcgcctcagcgcggccgctcgctctccccctcgagggacaaacttttcccaaacccgatccgagcccttggaccaaactcgcctgcgccgagagccgtccgcgtagagcgctccgtctccggcgagatgtccgagcgcaaagaaggcagaggcaaagggaagggcaagaagaaggagcgaggctccggcaagaagccggagtccgcggcgggcagccagagcccagccttgcctccccgattgaaagagatgaaaagccaggaatcggctgcaggttccaaactagtccttcggtgtgaaaccagttctgaatactcctctctcagattcaagtggttcaagaatgggaatgaattgaatcgaaaaaacaaaccacaaaatatcaagatacaaaaaaagccagggaagtcagaacttcgcattaacaaagcatcactggctgattctggagagtatatgtgcaaagtgatcagcaaattaggaaatgacagtgcctctgccaatatcaccatcgtggaatcaaacgagatcatcactggtatgccagcctcaactgaaggagcatatgtgtcttcagagtctcccattagaatatcagtatccacagaaggagcaaatacttcttcatctacatctacatccaccactgggacaagccatcttgtaaaatgtgcggagaaggagaaaactttctgtgtgaatggaggggagtgcttcatggtgaaagacctttcaaacccctcgagatacttgtgcaagtgcccaaatgagtttactggtgatcgctgccaaaactacgtaatggccagcttctacaaggcggaggagctgtaccagaagagagtgctgaccataaccggcatctgcatcgccctccttgtggtcggcatcatgtgtgtggtggcctactgcaaaaccaagaaacagcggaaaaagctgcatgaccgtcttcggcagagccttcggtctgaacgaaacaatatgatgaacattgccaatgggcctcaccatcctaacccaccccccgagaatgtccagctggtgaatcaatacgtatctaaaaacgtcatctccagtgagcatattgttgagagagaagcagagacatccttttccaccagtcactatacttccacagcccatcactccactactgtcacccagactcctagccacagctggagcaacggacacactgaaagcatcctttccgaaagccactctgtaatcgtgatgtcatccgtagaaaacagtaggcacagcagcccaactgggggcccaagaggacgtcttaatggcacaggaggccctcgtgaatgtaacagcttcctcaggcatgccagagaaacccctgattcctaccgagactctcctcatagtgaaagacataaccttatagctgagctaaggagaaacaaggcacacagatccaaatgcatgcagatccagctatcagcaactcatcttagatcttcttccattccccatttgggcttcattctctaagaccccttggcctttaggaaggtatgtgtcagccatgaccaccccggctcgtatgtcacctgtagatttccacacgccaagctcccccaaatcgcccccttcggaaatgtctccacccgtgtccagcatgacggtgtccatgccttccatggcggtcagccccttcatggaagaagagagacctctacttctcgtgacaccaccaaggctgcgggagaagaagtttgaccatcaccctcagcagttcagctccttccaccacaaccccgcgcatgacagtaacagcctccctgctagccccttgaggatagtggaggatgaggagtatgaaacgacccaagagtacgagccagcccaagagcctgttaagaaactcgccaatagccggcgggccaaaagaaccaagcccaatggccacattgctaacagattggaagtggacagcaacacaagctcccagagcagtaactcagagagtgaaacagaagatgaaagagtaggtgaagatacgcctttcctgggcatacagaaccccctggcagccagtcttgaggcaacacctgccttccgcctggctgacagcaggactaacccagcaggccgcttctcgacacaggaagaaatccaggccaggctgtctagtgtaattgctaaccaagaccctattgctgtataaaacctaaataaacacatagattcacctgtaaaactttattttatataataaagtattccaccttaaattaaacaatttattttattttagcagttctgcaaatagaaaacaggaaaaaaacttttataaattaaatatatgtatgtaaaaatgtgttatgtgccatatgtagcaattttttacagtatttcaaaacgagaaagatatcaatggtgcctttatgttatgttatgtcgagagcaagttttgtacagttacagtgattgcttttccacagtatttctgcaaaacctctcatagattcagtttttgctggcttcttgtgcattgcattatgatgttgactggatgtatgatttgcaagacttgcaactgtccctctgtttgcttgtagtagcacccgatcagtatgtcttgtaatggcacatccatccagatatgcctctcttgtgtatgaagttttctttgctttcagaatatgaaatgagttgtgtctactctgccagccaaaggtttgcctcattgggctctgagataatagtagatccaacagcatgctactattaaatacagcaagaaactgcattaagtaatgttaaatattaggaagaaagtaatactgtgatttaaaaaaaact

SEQ ID NO: 60593 - DNA, 2377 bp, Artificial Sequence
  derived and/or modified sequence
gaggccaggggagggtgcgaaggaggcgcctgcctccaacctgcgggcgggaggtgggtggctgcggggcaattgaaaaagagccggcgaggagttccccgaaacttgttggaactccgggctcgcgcggaggccaggagctgagcggcggcggctgccggacgatgggagcgtgagcaggacggtgataacctctccccgatcgggttgcgagggcgccgggcagaggccaggacgcgagccgccagcggtgggacccatcgacgacttcccggggcgacaggagcagccccgagagccagggcgagcgcccgttccaggtggccggaccgcccgccgcgtccgcgccgcgctccctgcaggcaacgggagacgcccccgcgcagcgcgagcgcctcagcgcggccgctcgctctccccctcgagggacaaacttttcccaaacccgatccgagcccttggaccaaactcgcctgcgccgagagccgtccgcgtagagcgctccgtctccggcgagatgtccgagcgcaaagaaggcagaggcaaagggaagggcaagaagaaggagcgaggctccggcaagaagccggagtccgcggcgggcagccagagcccagccttgcctccccgattgaaagagatgaaaagccaggaatcggctgcaggttccaaactagtccttcggtgtgaaaccagttctgaatactcctctctcagattcaagtggttcaagaatgggaatgaattgaatcgaaaaaacaaaccacaaaatatcaagatacaaaaaaagccagggaagtcagaacttcgcattaacaaagcatcactggctgattctggagagtatatgtgcaaagtgatcagcaaattaggaaatgacagtgcctctgccaatatcaccatcgtggaatcaaacgagatcatcactggtatgccagcctcaactgaaggagcatatgtgtcttcagagtctcccattagaatatcagtatccacagaaggagcaaatacttcttcatctacatctacatccaccactgggacaagccatcttgtaaaatgtgcggagaaggagaaaactttctgtgtgaatggaggggagtgcttcatggtgaaagacctttcaaacccctcgagatacttgtgcaagtgcccaaatgagtttactggtgatcgctgccaaaactacgtaatggccagcttctacaaggcggaggagctgtaccagaagagagtgctgaccataaccggcatctgcatcgccctccttgtggtcggcatcatgtgtgtggtggcctactgcaaaaccaagaaacagcggaaaaagctgcatgaccgtcttcggcagagccttcggtctgaacgaaacaatatgatgaacattgccaatgggcctcaccatcctaacccaccccccgagaatgtccagctggtgaatcaatacgtatctaaaaacgtcatctccagtgagcatattgttgagagagaagcagagacatccttttccaccagtcactatacttccacagcccatcactccactactgtcacccagactcctagccacagctggagcaacggacacactgaaagcatcctttccgaaagccactctgtaatcgtgatgtcatccgtagaaaacagtaggcacagcagcccaactgggggcccaagaggacgtcttaatggcacaggaggccctcgtgaatgtaacagcttcctcaggcatgccagagaaacccctgattcctaccgagactctcctcatagtgaaaggtaaaaccgaagggcaaagctactgcagaggagaaactcagtcagagaatccctgtgagcacctgcggtctcacctcaggaaatctactctaatcagaataaggggcggcagttacctgttctaggagtgctcctagttgatgaagtcatctctttgtttgacggaacttatttcttctgagcttctctcgtcgtcccagtgactgacaggcaacagactcttaaagagctgggatgctttgatgcggaaggtgcagcacatggagtttccagctctggccatgggctcagacccactcggggtctcagtgtcctcagttgtaacattagagagatggcatcaatgcttgataaggacccttctataattccaattgccagttatccaaactctgattcggtggtcgagctggcctcgtgttcttatctgctaaccctgtcttaccttccagcctcagttaagtcaaatcaagggctatgtcattgctgaatgtcatggggggcaactgcttgccctccaccctatagtatctattttatgaaattccaagaagggatgaataaataaatctcttggatgctgaaaaaaaaaaaaaaaaaa

SEQ ID NO: 60594 - DNA, 2359 bp, Artificial Sequence
  derived and/or modified sequence
gaggccaggggagggtgcgaaggaggcgcctgcctccaacctgcgggcgggaggtgggtggctgcggggcaattgaaaaagagccggcgaggagttccccgaaacttgttggaactccgggctcgcgcggaggccaggagctgagcggcggcggctgccggacgatgggagcgtgagcaggacggtgataacctctccccgatcgggttgcgagggcgccgggcagaggccaggacgcgagccgccagcggtgggacccatcgacgacttcccggggcgacaggagcagccccgagagccagggcgagcgcccgttccaggtggccggaccgcccgccgcgtccgcgccgcgctccctgcaggcaacgggagacgcccccgcgcagcgcgagcgcctcagcgcggccgctcgctctccccctcgagggacaaacttttcccaaacccgatccgagcccttggaccaaactcgcctgcgccgagagccgtccgcgtagagcgctccgtctccggcgagatgtccgagcgcaaagaaggcagaggcaaagggaagggcaagaagaaggagcgaggctccggcaagaagccggagtccgcggcgggcagccagagcccagccttgcctccccgattgaaagagatgaaaagccaggaatcggctgcaggttccaaactagtccttcggtgtgaaaccagttctgaatactcctctctcagattcaagtggttcaagaatgggaatgaattgaatcgaaaaaacaaaccacaaaatatcaagatacaaaaaaagccagggaagtcagaacttcgcattaacaaagcatcactggctgattctggagagtatatgtgcaaagtgatcagcaaattaggaaatgacagtgcctctgccaatatcaccatcgtggaatcaaacgagatcatcactggtatgccagcctcaactgaaggagcatatgtgtcttcagagtctcccattagaatatcagtatccacagaaggagcaaatacttcttcatctacatctacatccaccactgggacaagccatcttgtaaaatgtgcggagaaggagaaaactttctgtgtgaatggaggggagtgcttcatggtgaaagacctttcaaacccctcgagatacttgtgcaagtgcccaaatgagtttactggtgatcgctgccaaaactacgtaatggccagcttctacaaggcggaggagctgtaccagaagagagtgctgaccataaccggcatctgcatcgccctccttgtggtcggcatcatgtgtgtggtggcctactgcaaaaccaagaaacagcggaaaaagctgcatgaccgtcttcggcagagccttcggtctgaacgaaacaatatgatgaacattgccaatgggcctcaccatcctaacccaccccccgagaatgtccagctggtgaatcaatacgtatctaaaaacgtcatctccagtgagcatattgttgagagagaagcagagacatccttttccaccagtcactatacttccacagcccatcactccactactgtcacccagactcctagccacagctggagcaacggacacactgaaagcatcctttccgaaagccactctgtaatcgtgatgtcatccgtagaaaacagtaggcacagcagcccaactgggggcccaagaggacgtcttaatggcacaggaggccctcgtgaatgtaacagcttcctcaggcatgccagagaaacccctgattcctaccgagactctcctcatagtgaaaggtaaaaccgaagggcaaagctactgcagaggagaaactcagtcagagaatccctgtgagcacctgcggtctcacctcaggaaatctactctaatcagaataaggggcggcagttacctgttctaggagtgctcctagttgatgaagtcatctctttgtttgacggaacttatttcttctgagcttctctcgtcgtcccagtgactgacaggcaacagactcttaaagagctgggatgctttgatgcggaaggtgcagcacatggagtttccagctctggccatgggctcagacccactcggggtctcagtgtcctcagttgtaacattagagagatggcatcaatgcttgataaggacccttctataattccaattgccagttatccaaactctgattcggtggtcgagctggcctcgtgttcttatctgctaaccctgtcttaccttccagcctcagttaagtcaaatcaagggctatgtcattgctgaatgtcatggggggcaactgcttgccctccaccctatagtatctattttatgaaattccaagaagggatgaataaataaatctcttggatgctg

SEQ ID NO: 60595 - protein, 207 aa, Artificial Sequence
  derived and/or modified sequence
MSERKEGRGKGKGKKKERGSGKKPESAAGSQSPALPPRLKEMKSQESAAGSKLVLRCETSSEYSSLRFKWFKNGNELNRKNKPQNIKIQKKPGKSELRINKASLADSGEYMCKVISKLGNDSASANITIVESNATSTSTTGTSHLVKCAEKEKTFCVNGGECFMVKDLSNPSRYLCKCPNEFTGDRCQNYVMASFYSTSTPFLSLPE

SEQ ID NO: 60596 - DNA, 1638 bp, Artificial Sequence
  derived and/or modified sequence
gaggccaggggagggtgcgaaggaggcgcctgcctccaacctgcgggcgggaggtgggtggctgcggggcaattgaaaaagagccggcgaggagttccccgaaacttgttggaactccgggctcgcgcggaggccaggagctgagcggcggcggctgccggacgatgggagcgtgagcaggacggtgataacctctccccgatcgggttgcgagggcgccgggcagaggccaggacgcgagccgccagcggtgggacccatcgacgacttcccggggcgacaggagcagccccgagagccagggcgagcgcccgttccaggtggccggaccgcccgccgcgtccgcgccgcgctccctgcaggcaacgggagacgcccccgcgcagcgcgagcgcctcagcgcggccgctcgctctccccctcgagggacaaacttttcccaaacccgatccgagcccttggaccaaactcgcctgcgccgagagccgtccgcgtagagcgctccgtctccggcgagatgtccgagcgcaaagaaggcagaggcaaagggaagggcaagaagaaggagcgaggctccggcaagaagccggagtccgcggcgggcagccagagcccagccttgcctccccgattgaaagagatgaaaagccaggaatcggctgcaggttccaaactagtccttcggtgtgaaaccagttctgaatactcctctctcagattcaagtggttcaagaatgggaatgaattgaatcgaaaaaacaaaccacaaaatatcaagatacaaaaaaagccagggaagtcagaacttcgcattaacaaagcatcactggctgattctggagagtatatgtgcaaagtgatcagcaaattaggaaatgacagtgcctctgccaatatcaccatcgtggaatcaaacgctacatctacatccaccactgggacaagccatcttgtaaaatgtgcggagaaggagaaaactttctgtgtgaatggaggggagtgcttcatggtgaaagacctttcaaacccctcgagatacttgtgcaagtgcccaaatgagtttactggtgatcgctgccaaaactacgtaatggccagcttctacagtacgtccactccctttctgtctctgcctgaataggagcatgctcagttggtgctgctttcttgttgctgcatctcccctcagattccacctagagctagatgtgtcttaccagatctaatattgactgcctctgcctgtcgcatgagaacattaacaaaagcaattgtattacttcctctgttcgcgactagttggctctgagatactaataggtgtgtgaggctccggatgtttctggaattgatattgaatgatgtgatacaaattgatagtcaatatcaagcagtgaaatatgataataaaggcatttcaaagtctcacttttattgataaaataaaaatcattctactgaacagtccatcttctttatacaatgaccacatcctgaaaagggtgttgctaagctgtaaccgatatgcacttgaaatgatggtaagttaattttgattcagaatgtgttatttgtcacaaataaacataataaaaggagttcagatgtttttcttcattaaccaaaaaaaaaaaaaaa

SEQ ID NO: 60597 - protein, 177 aa, Artificial Sequence
  derived and/or modified sequence
MSERKEGRGKGKGKKKERGSGKKPESAAGSQSPALPPRLKEMKSQESAAGSKLVLRCETSSEYSSLRFKWFKNGNELNRKNKPQNIKIQKKPGKSELRINKASLADSGEYMCKVISKLGNDSASANITIVESNATSTSTTGTSHLVKCAEKEKTFCVNGGECFMVKDLSNPSRYLCK

SEQ ID NO: 60598 - DNA, 1592 bp, Artificial Sequence
  derived and/or modified sequence
gaggccaggggagggtgcgaaggaggcgcctgcctccaacctgcgggcgggaggtgggtggctgcggggcaattgaaaaagagccggcgaggagttccccgaaacttgttggaactccgggctcgcgcggaggccaggagctgagcggcggcggctgccggacgatgggagcgtgagcaggacggtgataacctctccccgatcgggttgcgagggcgccgggcagaggccaggacgcgagccgccagcggtgggacccatcgacgacttcccggggcgacaggagcagccccgagagccagggcgagcgcccgttccaggtggccggaccgcccgccgcgtccgcgccgcgctccctgcaggcaacgggagacgcccccgcgcagcgcgagcgcctcagcgcggccgctcgctctccccctcgagggacaaacttttcccaaacccgatccgagcccttggaccaaactcgcctgcgccgagagccgtccgcgtagagcgctccgtctccggcgagatgtccgagcgcaaagaaggcagaggcaaagggaagggcaagaagaaggagcgaggctccggcaagaagccggagtccgcggcgggcagccagagcccagccttgcctccccgattgaaagagatgaaaagccaggaatcggctgcaggttccaaactagtccttcggtgtgaaaccagttctgaatactcctctctcagattcaagtggttcaagaatgggaatgaattgaatcgaaaaaacaaaccacaaaatatcaagatacaaaaaaagccagggaagtcagaacttcgcattaacaaagcatcactggctgattctggagagtatatgtgcaaagtgatcagcaaattaggaaatgacagtgcctctgccaatatcaccatcgtggaatcaaacgctacatctacatccaccactgggacaagccatcttgtaaaatgtgcggagaaggagaaaactttctgtgtgaatggaggggagtgcttcatggtgaaagacctttcaaacccctcgagatacttgtgcaagtaagaaaagaaatcctgtgtgtcgcttatgtctataactccttgtttcagatgattctatgtctcatgatgtattgttgctttttttccaattttgttgcatcatgttgaataatgctgttttatatgtagagtgttttaaaacattcacaccattcgtcatcactcctctgtcatatgcagaattgttttttgctcttttcaatgtgtgtgaggtgttttttgtttttgtttttgttttttgccatgttatttatagtgttgctttccttgtggtttttcttgttgttattcagaaaagatgtgcagatatcacagaggcctataacttttggtatctacttctacatccaatgtatgaattaagctgtaagataatgttgctttcttatcccagtgatcacctgccaaatgaataagacaacaaagagaagcagaagggcagaagattatttactgacatatatctattacacttgggattgtcttactgttgcataactattttttaaacggagtttagttttatattgctagtaaaaaaa

SEQ ID NO: 60599 - DNA, 1263 bp, Artificial Sequence
  derived and/or modified sequence
atgagcgagagaaaggagggcagaggcaagggcaagggcaagaagaaggagagaggcagcggcaagaagcccgagagcgccgccggcagccagagccccgccctgccccccagactgaaggagatgaagagccaggagagcgccgccggcagcaagctggtgctgagatgcgagaccagcagcgagtacagcagcctgagattcaagtggttcaagaacggcaacgagctgaacagaaagaacaagccccagaacatcaagatccagaagaagcccggcaagagcgagctgagaatcaacaaggccagcctggccgacagcggcgagtacatgtgcaaggtgatcagcaagctgggcaacgacagcgccagcgccaacatcaccatcgtggagagcaacgagatcatcaccggcatgcccgccagcaccgagggcgcctacgtgagcagcgagagccccatcagaatcagcgtgagcaccgagggcgccaacaccagcagcagcaccagcaccagcaccaccggcaccagccacctggtgaagtgcgccgagaaggagaagaccttctgcgtgaacggcggcgagtgcttcatggtgaaggacctgagcaaccccagcagatacctgtgcaagtgccccaacgagttcaccggcgacagatgccagaactacgtgatggccagcttctacaaggccgaggagctgtaccagaagagagtgctgaccatcaccggcatctgcatcgccctgctggtggtgggcatcatgtgcgtggtggcctactgcaagaccaagaagcagagaaagaagctgcacgacagactgagacagagcctgagaagcgagagaaacaacatgatgaacatcgccaacggcccccaccaccccaaccccccccccgagaacgtgcagctggtgaaccagtacgtgagcaagaacgtgatcagcagcgagcacatcgtggagagagaggccgagaccagcttcagcaccagccactacaccagcaccgcccaccacagcaccaccgtgacccagacccccagccacagctggagcaacggccacaccgagagcatcctgagcgagagccacagcgtgatcgtgatgagcagcgtggagaacagcagacacagcagccccaccggcggccccagaggcagactgaacggcaccggcggccccagagagtgcaacagcttcctgagacacgccagagagacccccgacagctacagagacagcccccacagcgagagatag

SEQ ID NO: 60600 - DNA, 1263 bp, Artificial Sequence
  derived and/or modified sequence
atgagcgaacggaaggagggcaggggaaagggaaagggcaaaaagaaggagcgtggtagcggcaagaaaccggaatcagcagccggttcccagagccccgccttaccacctcggctgaaagaaatgaagtcccaggagtcggcagcgggtagtaagcttgtgctgcgatgcgaaacatcaagcgaatatagttcccttcggtttaagtggttcaagaatggcaacgaactgaacaggaaaaacaaaccccagaatatcaaaatacaaaagaaaccgggtaagtcagagcttcgcatcaacaaggcatctctggctgattctggcgagtatatgtgtaaagtgattagtaagttggggaacgactcagccagcgcaaacataactatcgtggagtctaacgagatcatcacaggcatgcctgcgtctactgagggtgcatacgtgtcctcggagagtcctatccgtatctcagtgtctactgagggggccaacaccagtagttcaacctcaacaagcaccaccggcacatcccatttagtgaaatgcgctgagaaagaaaaaacgttctgcgtgaacggtggcgagtgctttatggtaaaagatctgtctaacccatcccggtacctatgtaagtgcccaaacgagttcaccggcgataggtgccaaaactacgtgatggcttccttttataaggccgaagagctgtatcagaagcgcgttcttacaatcacagggatttgtatcgcgctgcttgtggtaggaatcatgtgcgtggtggcttactgcaaaaccaagaaacagcggaagaaattgcatgatagactgagacagtccctgaggtccgagcggaacaacatgatgaacattgccaacggaccacaccacccaaacccgccccctgagaacgtgcaactcgttaaccagtacgtgtctaaaaacgtcatttctagcgaacatatcgtcgagagggaggcggaaacatcattttccacgtcacactataccagtaccgcacaccattcaacgaccgtgacacagacacctagtcatagctggagcaacggccatacagagtcgattctaagcgagagtcattctgtgatcgtgatgtcatccgtggagaactcacgacattcctcgcctacaggaggacccaggggtagacttaatgggacgggggggcccagagagtgtaattccttcctaagacatgcaagagagacaccggactcctatagagatagcccccactccgaaagatag

SEQ ID NO: 60601 - DNA, 1263 bp, Artificial Sequence
  derived and/or modified sequence
atgtctgagaggaaggagggccggggcaagggcaagggcaagaagaaggagcggggcagcggcaagaagccagagagcgctgctggcagccagagccctgccctgcccccccggctgaaggagatgaagagccaggagagcgctgctggcagcaagctggtgctgcgctgtgagaccagcagcgagtacagcagcctgcgcttcaagtggttcaagaatggaaatgagctgaacaggaagaacaagccccagaacatcaagatccagaagaagccaggcaagtctgagctgcgcatcaacaaggccagcctggccgacagcggggagtacatgtgcaaggtgatcagcaagctgggcaatgacagcgccagcgccaacatcaccatcgtggagagcaatgagatcatcaccggcatgcctgccagcacagaaggagcctacgtgagcagcgagagccccatccgcatctctgtgtccacagagggcgccaacaccagcagcagcaccagcaccagcaccaccggcaccagccacctggtgaagtgtgccgagaaggagaagaccttctgtgtgaatggaggagagtgcttcatggtgaaggacctgagcaaccccagccgctacctgtgcaagtgccccaatgagttcaccggggaccgctgccagaactacgtgatggccagcttctacaaggccgaggagctgtaccagaagagggtgctgaccatcaccggcatctgcatcgccctgctggtggtgggcatcatgtgtgtggtggcctactgcaagaccaagaagcagaggaagaagctgcatgaccggctgcggcagagcctgcggagtgaaagaaacaacatgatgaacatcgccaacggcccccaccaccccaaccccccaccagaaaatgtgcagctggtgaaccagtatgtgtccaagaatgtcatcagcagcgagcacatcgtggagcgggaggccgagaccagcttcagcaccagccactacaccagcacagcccaccacagcaccaccgtgacccagacccccagccacagctggagcaatggccacacagagagcatcctgtctgagagccacagcgtcatcgtgatgagctctgtggagaacagccgccacagcagccccaccggcggcccccggggccgcctgaatggcaccggcggcccccgggagtgcaacagcttcctgcggcatgcccgggagaccccagacagctacagagacagcccccacagcgagaggtag

SEQ ID NO: 60602 - DNA, 1263 bp, Artificial Sequence
  derived and/or modified sequence
atgagcgagcggaaggagggccggggcaagggcaagggcaagaagaaggaacgcggtagtggcaagaaacctgaatctgcagctggatctcaatcccctgccctccccccgcgcctcaaagaaatgaagtctcaggagagtgcagcgggatcaaaactcgtgcttagatgtgagacatcgtctgaatattcctccttgaggttcaaatggttcaagaatggcaacgagttaaacaggaagaacaagccccagaacattaagattcagaagaagcctgggaaatccgaactaagaattaataaagcatccctggcagactccggcgaatatatgtgcaaagtgataagcaaactgggaaacgacagcgcctcagcaaacatcactatcgtcgagtccaacgaaatcataacaggaatgcccgcctcaactgaaggcgcttacgtgagcagcgaaagtccaatacgaatctctgtctcaaccgagggcgccaataccagctccagtacttctacctctaccacaggtacctcgcacctggtcaaatgtgccgaaaaagagaaaactttctgtgtgaacggaggcgagtgttttatggtcaaagatctgtcgaatccttcccgctacctgtgcaaatgtccgaatgagtttactggtgaccgctgtcaaaattacgttatggccagtttttataaagcagaagagctgtaccagaaacgcgtgctgactatcaccgggatctgcatcgcgctgttggtggtgggcataatgtgtgttgtcgcgtattgcaagactaaaaagcaacgaaaaaagcttcatgataggctgcgtcaaagtctgcggtccgagcggaataatatgatgaacatcgccaatgggccacaccacccaaatccccctccagagaatgtgcagttggttaatcagtatgtgtccaaaaatgtaatatcctctgagcatatcgttgaacgagaagccgagacatcatttagtaccagccattacaccagcactgctcatcactccactaccgtcacgcagaccccttcgcactcatggagcaatggccacacagagtccattctgtccgagtcacacagtgtgatcgtgatgtcttctgtggaaaactcacgtcattcctctccaaccggcgggccccgcggtaggctcaacggaaccggaggtccgcgggagtgcaactccttcctgcgtcatgccagagagactccagatagttaccgcgatagtccccactctgaaaggtag

SEQ ID NO: 60603 - DNA, 1263 bp, Artificial Sequence
  derived and/or modified sequence
atgtcagagcgcaaagaaggcagagggaagggcaagggcaagaaaaaagagcgcggtagcggaaaaaagcctgagtccgcagccggttcacagtctcccgctttacctcccagactgaaagagatgaaatctcaggagagcgccgctggatcaaagctggtattgcgctgtgaaacctctagtgaatactctagccttcgcttcaaatggttcaagaacgggaatgaactaaatcggaaaaacaaaccgcaaaatattaagatacaaaagaaacccggtaaatccgaattacggatcaacaaggcatccctggcagacagtggggaatatatgtgtaaagtgatctccaaactcggcaacgattcagcatctgccaatatcaccatcgttgaatcaaatgagatcatcactggcatgcccgcaagcaccgaaggagcttatgtgtcctcagaaagcccgatccggatcagcgtgtccaccgagggggcaaacacttcgagctctacttctacgtctactacaggaacaagtcatttagtaaagtgtgcggaaaaggaaaaaacgttctgtgtgaacgggggagaatgtttcatggtcaaggatctgagcaaccctagccggtacctctgtaagtgccccaacgagtttactggtgatcggtgccaaaattacgtgatggctagcttctacaaagccgaggagctttatcagaagagggtcttaacgattaccgggatctgcatcgccttactcgtggtgggtataatgtgtgtagtcgcctactgtaaaacaaaaaagcaacgcaaaaagctgcacgatagactacgccagagcctacgaagcgaaagaaataacatgatgaacattgctaacggaccccaccacccaaatcctcctcctgaaaacgttcagctcgtgaaccagtatgttagtaaaaacgtgatctcatccgaacacatagttgaaagagaggcagaaacctccttttccacttcacattatactagcaccgcgcaccattccactactgtcacccagaccccatcgcacagttggagtaacgggcataccgaatcaattctgagcgagtctcacagcgttatcgtgatgtctagtgtcgaaaactctaggcacagctctccgactgggggtccacgcggaaggctgaatggcaccgggggaccaagagagtgtaactcattccttaggcatgcccgagagactcctgattcttaccgagattctccgcacagcgagcggtag

SEQ ID NO: 60604 - protein, 733 aa, Artificial Sequence
  derived and/or modified sequence
MVSYWDTGVLLCALLSCLLLTGSSSGSKLKDPELSLKGTQHIMQAGQTLHLQCRGEAAHKWSLPEMVSKESERLSITKSACGRNGKQFCSTLTLNTAQANHTGFYSCKYLAVPTSKKKETESAIYIFISDTGRPFVEMYSEIPEIIHMTEGRELVIPCRVTSPNITVTLKKFPLDTLIPDGKRIIWDSRKGFIISNATYKEIGLLTCEATVNGHLYKTNYLTHRQTNTIIDVQISTPRPVKLLRGHTLVLNCTATTPLNTRVQMTWSYPDEKNKRASVRRRIDQSNSHANIFYSVLTIDKMQNKDKGLYTCRVRSGPSFKSVNTSVHIYDKAFITVKHRKQQVLETVAGKRSYRLSMKVKAFPSPEVVWLKDGLPATEKSARYLTRGYSLIIKDVTEEDAGNYTILLSIKQSNVFKNLTATLIVNVKPQIYEKAVSSFPDPALYPLGSRQILTCTAYGIPQPTIKWFWHPCNHNHSEARCDFCSNNEESFILDADSNMGNRIESITQRMAIIEGKNKMASTLVVADSRISGIYICIASNKVGTVGRNISFYITDVPNGFHVNLEKMPTEGEDLKLSCTVNKFLYRDVTWILLRTVNNRTMHYSISKQKMAITKEHSITLNLTIMNVSLQDSGTYACRARNVYTGEEILQKKEITIRDQEAPYLLRNLSDHTVAISSSTTLDCHANGVPEPQITWFKNNHKIQQEPELYTSTSPSSSSSSPLSSSSSSSSSSSS

SEQ ID NO: 60605 - DNA, 2202 bp, Artificial Sequence
  derived and/or modified sequence
atggtgagctactgggacaccggcgtgctgctgtgcgccctgctgagctgcctgctgctgaccggcagcagcagcggcagcaagctgaaggaccccgagctgagcctgaagggcacccagcacatcatgcaggccggccagaccctgcacctgcagtgcagaggcgaggccgcccacaagtggagcctgcccgagatggtgagcaaggagagcgagagactgagcatcaccaagagcgcctgcggcagaaacggcaagcagttctgcagcaccctgaccctgaacaccgcccaggccaaccacaccggcttctacagctgcaagtacctggccgtgcccaccagcaagaagaaggagaccgagagcgccatctacatcttcatcagcgacaccggcagacccttcgtggagatgtacagcgagatccccgagatcatccacatgaccgagggcagagagctggtgatcccctgcagagtgaccagccccaacatcaccgtgaccctgaagaagttccccctggacaccctgatccccgacggcaagagaatcatctgggacagcagaaagggcttcatcatcagcaacgccacctacaaggagatcggcctgctgacctgcgaggccaccgtgaacggccacctgtacaagaccaactacctgacccacagacagaccaacaccatcatcgacgtgcagatcagcacccccagacccgtgaagctgctgagaggccacaccctggtgctgaactgcaccgccaccacccccctgaacaccagagtgcagatgacctggagctaccccgacgagaagaacaagagagccagcgtgagaagaagaatcgaccagagcaacagccacgccaacatcttctacagcgtgctgaccatcgacaagatgcagaacaaggacaagggcctgtacacctgcagagtgagaagcggccccagcttcaagagcgtgaacaccagcgtgcacatctacgacaaggccttcatcaccgtgaagcacagaaagcagcaggtgctggagaccgtggccggcaagagaagctacagactgagcatgaaggtgaaggccttccccagccccgaggtggtgtggctgaaggacggcctgcccgccaccgagaagagcgccagatacctgaccagaggctacagcctgatcatcaaggacgtgaccgaggaggacgccggcaactacaccatcctgctgagcatcaagcagagcaacgtgttcaagaacctgaccgccaccctgatcgtgaacgtgaagccccagatctacgagaaggccgtgagcagcttccccgaccccgccctgtaccccctgggcagcagacagatcctgacctgcaccgcctacggcatcccccagcccaccatcaagtggttctggcacccctgcaaccacaaccacagcgaggccagatgcgacttctgcagcaacaacgaggagagcttcatcctggacgccgacagcaacatgggcaacagaatcgagagcatcacccagagaatggccatcatcgagggcaagaacaagatggccagcaccctggtggtggccgacagcagaatcagcggcatctacatctgcatcgccagcaacaaggtgggcaccgtgggcagaaacatcagcttctacatcaccgacgtgcccaacggcttccacgtgaacctggagaagatgcccaccgagggcgaggacctgaagctgagctgcaccgtgaacaagttcctgtacagagacgtgacctggatcctgctgagaaccgtgaacaacagaaccatgcactacagcatcagcaagcagaagatggccatcaccaaggagcacagcatcaccctgaacctgaccatcatgaacgtgagcctgcaggacagcggcacctacgcctgcagagccagaaacgtgtacaccggcgaggagatcctgcagaagaaggagatcaccatcagagaccaggaggccccctacctgctgagaaacctgagcgaccacaccgtggccatcagcagcagcaccaccctggactgccacgccaacggcgtgcccgagccccagatcacctggttcaagaacaaccacaagatccagcaggagcccgagctgtacaccagcaccagccccagcagcagcagcagcagccccctgagcagcagcagcagcagcagcagcagcagcagcagctag

SEQ ID NO: 60606 - DNA, 2202 bp, Artificial Sequence
  derived and/or modified sequence
atggtgtcatactgggacacgggggtactgctttgtgcccttttaagctgcctgttgctcacaggaagcagttcgggctccaagcttaaggacccagaattatctttgaagggaacacagcatattatgcaggcaggacagaccttgcatcttcagtgtagaggcgaggcggcccataagtggtctttgccagagatggtctctaaagaatcagagcgtctgtccattaccaagtctgcttgcggtcggaacgggaaacaattttgctcaaccctgaccttaaacaccgcccaggcaaaccatactgggttttactcatgcaaatacttggctgtccctactagtaaaaaaaaggagactgagagtgccatttacatcttcataagtgacacgggaaggccctttgttgagatgtactctgaaattcccgagatcattcatatgactgaagggcgcgagctggtgataccttgtagagttacaagcccaaatattaccgtcaccctcaagaaattccctctagatacgctgattcctgatgggaaacgcattatttgggatagtaggaagggctttatcatttctaacgccacttacaaggaaatcgggctgctaacttgcgaggccacagtgaacggccatctgtacaagacgaattatcttactcacagacagacaaacactatcattgacgtgcagatcagcaccccacggcctgttaaactgttaaggggacatacactggtgctgaattgcactgctactactccccttaacacacgagtgcagatgacttggagttacccagatgaaaagaacaagagagcctccgtccgtcgcaggatagatcagtcaaatagccacgccaatatcttttactcggtgctgaccattgataagatgcagaacaaagacaagggcctctacacatgccgcgtccgctccggtccgtcctttaagtcagtgaacactagtgtgcacatctacgataaggccttcattacagtaaagcacagaaaacaacaggtgctggagaccgtggctggcaaaagatcttaccggctgtcaatgaaggttaaggctttcccatcccccgaggttgtctggcttaaagacggcctgccagccactgagaaatctgctaggtacctcactcgggggtacagcctcattattaaggatgtgaccgaggaggatgctggtaattatacgattctcctatcgattaagcagtcaaatgtgtttaagaatctgaccgcaaccttaatcgtgaacgtgaagccccaaatttatgaaaaagccgtttcttcttttccagacccagctctctatccgcttggttcgcggcaaatactgacctgcacagcctacggtattccacaaccaaccatcaaatggttctggcatccctgcaaccataaccactctgaggcgcgctgtgatttttgctcaaacaacgaggagagttttattctggacgccgactcaaatatgggcaacaggattgaatcaatcacccagcgcatggctattatcgagggcaagaataagatggcaagtacgttagttgttgccgactctcgcatcagcggtatttatatttgtattgcgagtaacaaagtcgggaccgtcggcagaaatatctccttctatattaccgatgtacccaatgggttccatgtgaacttggagaagatgccaactgaaggggaggacctgaaactcagctgcaccgttaacaagtttttgtacagagacgtgacgtggatacttcttcgcactgtcaataaccgaacaatgcattacagcatttcaaagcagaagatggccataaccaaggaacattccatcaccttaaaccttacaatcatgaacgtatcgttgcaagattcggggacctatgcctgccgcgctagaaacgtgtacactggtgaggagatactgcagaagaaggaaatcaccattagggatcaggaggcgccctacctgctgcgaaacctcagtgaccacaccgtggcaatttctagctccacaactttggactgccatgctaatggcgtccccgagccacagatcacctggttcaaaaataaccataagattcaacaagagcccgaactgtatacaagtacttcaccctcaagcagttctagctcccccctctcctccagcagttcaagcagctcctcctcatcatcttag

SEQ ID NO: 60607 - DNA, 2668 bp, Artificial Sequence
  derived and/or modified sequence
atcgaggtccgcgggaggctcggagcgcgccaggcggacactcctctcggctcctccccggcagcggcggcggctcggagcgggctccggggctcgggtgcagcggccagcgggcgcctggcggcgaggattacccggggaagtggttgtctcctggctggagccgcgagacgggcgctcagggcgcggggccggcggcggcgaacgagaggacggactctggcggccgggtcgttggccgcggggagcgcgggcaccgggcgagcaggccgcgtcgcgctcaccatggtcagctactgggacaccggggtcctgctgtgcgcgctgctcagctgtctgcttctcacaggatctagttcaggttcaaaattaaaagatcctgaactgagtttaaaaggcacccagcacatcatgcaagcaggccagacactgcatctccaatgcaggggggaagcagcccataaatggtctttgcctgaaatggtgagtaaggaaagcgaaaggctgagcataactaaatctgcctgtggaagaaatggcaaacaattctgcagtactttaaccttgaacacagctcaagcaaaccacactggcttctacagctgcaaatatctagctgtacctacttcaaagaagaaggaaacagaatctgcaatctatatatttattagtgatacaggtagacctttcgtagagatgtacagtgaaatccccgaaattatacacatgactgaaggaagggagctcgtcattccctgccgggttacgtcacctaacatcactgttactttaaaaaagaaaaataagagagcttccgtaaggcgacgaattgaccaaagcaattcccatgccaacatattctacagtgttcttactattgacaaaatgcagaacaaagacaaaggactttatacttgtcgtgtaaggagtggaccatcattcaaatctgttaacacctcagtgcatatatatgataaagcattcatcactgtgaaacatcgaaaacagcaggtgcttgaaaccgtagctggcaagcggtcttaccggctctctatgaaagtgaaggcatttccctcgccggaagttgtatggttaaaagatgggttacctgcgactgagaaatctgctcgctatttgactcgtggctactcgttaattatcaaggacgtaactgaagaggatgcagggaattatacaatcttgctgagcataaaacagtcaaatgtgtttaaaaacctcactgccactctaattgtcaatgtgaaaccccagatttacgaaaaggccgtgtcatcgtttccagacccggctctctacccactgggcagcagacaaatcctgacttgtaccgcatatggtatccctcaacctacaatcaagtggttctggcacccctgtaaccataatcattccgaagcaaggtgtgacttttgttccaataatgaagagtcctttatcctggatgctgacagcaacatgggaaacagaattgagagcatcactcagcgcatggcaataatagaaggaaagaataagatggctagcaccttggttgtggctgactctagaatttctggaatctacatttgcatagcttccaataaagttgggactgtgggaagaaacataagcttttatatcacagatgtgccaaatgggtttcatgttaacttggaaaaaatgccgacggaaggagaggacctgaaactgtcttgcacagttaacaagttcttatacagagacgttacttggattttactgcggacagttaataacagaacaatgcactacagtattagcaagcaaaaaatggccatcactaaggagcactccatcactcttaatcttaccatcatgaatgtttccctgcaagattcaggcacctatgcctgcagagccaggaatgtatacacaggggaagaaatcctccagaagaaagaaattacaatcagagatcaggaagcaccatacctcctgcgaaacctcagtgatcacacagtggccatcagcagttccaccactttagactgtcatgctaatggtgtccccgagcctcagatcacttggtttaaaaacaaccacaaaatacaacaagagcctgaactgtatacatcaacgtcaccatcgtcatcgtcatcatcaccattgtcatcatcatcatcatcgtcatcatcatcatcatcatagctatcatcattatcatcatcatcatcatcatcatcatagctaccatttattgaaaactattatgtgtcaacttcaaagaacttatcctttagttggagagccaagacaatcataacaataacaaatggccgggcatggtggctcacgcctgtaatcccagcactttgggaggccaaggcaggtggatcatttgaggtcaggagttcaagaccagcctgaccaagatggtgaaatgctgtctctattaaaaatacaaaattagccaggcatggtggctcatgcctgtaatgccagctactcgggaggctgagacaggagaatcacttgaacccaggaggcagaggttgcagggagccgagatcgtgtactgcactccagcctgggcaacaagagcgaaactccgtctcaaaaaacaaataaataaataaataaataaacagacaaaattcactttttattctattaaacttaacatacatgc

SEQ ID NO: 60608 - DNA, 2968 bp, Artificial Sequence
  derived and/or modified sequence
atcgaggtccgcgggaggctcggagcgcgccaggcggacactcctctcggctcctccccggcagcggcggcggctcggagcgggctccggggctcgggtgcagcggccagcgggcgcctggcggcgaggattacccggggaagtggttgtctcctggctggagccgcgagacgggcgctcagggcgcggggccggcggcggcgaacgagaggacggactctggcggccgggtcgttggccgcggggagcgcgggcaccgggcgagcaggccgcgtcgcgctcaccatggtcagctactgggacaccggggtcctgctgtgcgcgctgctcagctgtctgcttctcacaggatctagttcaggttcaaaattaaaagatcctgaactgagtttaaaaggcacccagcacatcatgcaagcaggccagacactgcatctccaatgcaggggggaagcagcccataaatggtctttgcctgaaatggtgagtaaggaaagcgaaaggctgagcataactaaatctgcctgtggaagaaatggcaaacaattctgcagtactttaaccttgaacacagctcaagcaaaccacactggcttctacagctgcaaatatctagctgtacctacttcaaagaagaaggaaacagaatctgcaatctatatatttattagtgatacaggtagacctttcgtagagatgtacagtgaaatccccgaaattatacacatgactgaaggaagggagctcgtcattccctgccgggttacgtcacctaacatcactgttactttaaaaaagtttccacttgacactttgatccctgatggaaaacgcataatctgggacagtagaaagggcttcatcatatcaaatgcaacgtacaaagaaatagggcttctgacctgtgaagcaacagtcaatgggcatttgtataagacaaactatctcacacatcgacaaaccaatacaatcatagatgtccaaataagcacaccacgcccagtcaaattacttagaggccatactcttgtcctcaattgtactgctaccactcccttgaacacgagagttcaaatgacctggagttaccctgatgaaaaaaataagagagcttccgtaaggcgacgaattgaccaaagcaattcccatgccaacatattctacagtgttcttactattgacaaaatgcagaacaaagacaaaggactttatacttgtcgtgtaaggagtggaccatcattcaaatctgttaacacctcagtgcatatatatgataaagcattcatcactgtgaaacatcgaaaacagcaggtgcttgaaaccgtagctggcaagcggtcttaccggctctctatgaaagtgaaggcatttccctcgccggaagttgtatggttaaaagatgggttacctgcgactgagaaatctgctcgctatttgactcgtggctactcgttaattatcaaggacgtaactgaagaggatgcagggaattatacaatcttgctgagcataaaacagtcaaatgtgtttaaaaacctcactgccactctaattgtcaatgtgaaaccccagatttacgaaaaggccgtgtcatcgtttccagacccggctctctacccactgggcagcagacaaatcctgacttgtaccgcatatggtatccctcaacctacaatcaagtggttctggcacccctgtaaccataatcattccgaagcaaggtgtgacttttgttccaataatgaagagtcctttatcctggatgctgacagcaacatgggaaacagaattgagagcatcactcagcgcatggcaataatagaaggaaagaataagatggctagcaccttggttgtggctgactctagaatttctggaatctacatttgcatagcttccaataaagttgggactgtgggaagaaacataagcttttatatcacagatgtgccaaatgggtttcatgttaacttggaaaaaatgccgacggaaggagaggacctgaaactgtcttgcacagttaacaagttcttatacagagacgttacttggattttactgcggacagttaataacagaacaatgcactacagtattagcaagcaaaaaatggccatcactaaggagcactccatcactcttaatcttaccatcatgaatgtttccctgcaagattcaggcacctatgcctgcagagccaggaatgtatacacaggggaagaaatcctccagaagaaagaaattacaatcagagatcaggaagcaccatacctcctgcgaaacctcagtgatcacacagtggccatcagcagttccaccactttagactgtcatgctaatggtgtccccgagcctcagatcacttggtttaaaaacaaccacaaaatacaacaagagcctgaactgtatacatcaacgtcaccatcgtcatcgtcatcatcaccattgtcatcatcatcatcatcgtcatcatcatcatcatcatagctatcatcattatcatcatcatcatcatcatcatcatagctaccatttattgaaaactattatgtgtcaacttcaaagaacttatcctttagttggagagccaagacaatcataacaataacaaatggccgggcatggtggctcacgcctgtaatcccagcactttgggaggccaaggcaggtggatcatttgaggtcaggagttcaagaccagcctgaccaagatggtgaaatgctgtctctattaaaaatacaaaattagccaggcatggtggctcatgcctgtaatgccagctactcgggaggctgagacaggagaatcacttgaacccaggaggcagaggttgcagggagccgagatcgtgtactgcactccagcctgggcaacaagagcgaaactccgtctcaaaaaacaaataaataaataaataaataaacagacaaaattcactttttattctattaaacttaacatacatgc

SEQ ID NO: 60609 - DNA, 2202 bp, Artificial Sequence
  derived and/or modified sequence
atggtgtcctactgggacacaggagtgctgctgtgtgccctgctgagctgcctgctgctgaccggcagcagcagcggcagcaagctgaaggaccctgagctgagcctgaagggcacccagcacatcatgcaggccggccagaccctgcacctgcagtgccgcggggaggccgcccacaagtggagcctgcctgagatggtgtccaaggagagcgagcggctgagcatcaccaagagcgcctgtggcagaaatggcaagcagttctgcagcaccctgaccctgaacacagcccaggccaaccacacaggcttctacagctgcaagtacctggccgtgcccaccagcaagaagaaggagacagagagcgccatctacatcttcatcagtgacaccggccggccctttgtggagatgtacagcgagatccctgagatcatccacatgacagagggccgggagctggtgatcccctgccgggtgaccagccccaacatcaccgtgaccctgaagaagttccccctggacaccctcatcccagatggcaagaggatcatctgggacagcaggaagggcttcatcatcagcaatgccacctacaaggagatcggcctgctgacctgtgaggccaccgtgaatggccacctgtacaagaccaactacctgacccaccggcagaccaacaccatcattgatgtgcagatcagcacccccaggcctgtgaagctgctgcggggccacaccctggtgctgaactgcacagccaccacccccctgaacaccagggtgcagatgacctggagctacccagatgagaagaacaagagggcctctgtgagaagaagaattgaccagagcaacagccacgccaacatcttctacagcgtgctgaccatcgacaagatgcagaacaaggacaagggcctgtacacctgccgggtgcgcagcggccccagcttcaagtctgtgaacacctctgtgcacatctatgacaaggccttcatcaccgtgaagcacaggaagcagcaggtgctggagaccgtggccggcaagaggagctaccgcctgtccatgaaggtgaaggccttccccagccctgaggtggtgtggctgaaggatggcctgcctgccacagagaagagcgcccgctacctgacccggggctacagcctcatcatcaaggatgtgacagaggaggatgctggcaactacaccatcctgctgagcatcaagcagagcaatgtgttcaagaacctgacagccaccctgattgtgaatgtgaagccccagatctatgagaaggctgtgtcctccttcccagaccctgccctgtaccccctgggcagccggcagatcctgacctgcacagcctacggcatcccccagcccaccatcaagtggttctggcacccctgcaaccacaaccacagcgaggcccgctgtgacttctgcagcaacaatgaggagagcttcatcctggatgctgacagcaacatgggcaaccgcatcgagagcatcacccagaggatggccatcatcgagggcaagaacaagatggccagcaccctggtggtggccgacagccgcatcagcggcatctacatctgcatcgccagcaacaaggtgggcaccgtgggcaggaacatctccttctacatcacagatgtgcccaacggcttccacgtgaacctggagaagatgcccacagaaggagaggacctgaagctgagctgcaccgtgaacaagttcctgtacagagatgtgacctggatcctgctgaggacagtgaacaacagaaccatgcactacagcatcagcaagcagaagatggccatcaccaaggagcacagcatcaccctgaacctgaccatcatgaatgtgtccctgcaggacagcggcacctacgcctgccgggccagaaatgtgtacacaggagaggagatcctgcagaagaaggagatcaccatccgggaccaggaggccccctacctgctgaggaacctgagtgaccacacagtggccatcagcagcagcaccaccctggactgccacgccaatggagtgcctgagccccagatcacctggttcaagaacaaccacaagatccagcaggagcctgagctgtacaccagcaccagccccagcagcagcagcagcagccccctgagcagcagcagcagcagcagcagcagcagcagcagctag

SEQ ID NO: 60610 - DNA, 2202 bp, Artificial Sequence
  derived and/or modified sequence
atggtgagctactgggacaccggcgtgctgctgtgcgccctgctgagttgtttgcttctgactggcagcagttctggttctaagcttaaagaccccgagttaagtctgaagggaacccaacacatcatgcaggcaggccagacactgcacctccagtgcagaggcgaagccgcccacaaatggtccctgcccgaaatggtcagtaaagagtcagaaaggctttctattacaaaatctgcttgtggacgcaacggcaagcagttctgtagtaccctcacacttaataccgcccaggcaaatcacactggattttactcatgcaaatacctggctgtgcccacaagtaaaaagaaagagacggaaagtgccatctatatattcatcagcgataccggtagaccatttgttgagatgtactctgagatcccggagataattcatatgacggaggggagggaattggtcatcccatgcagagttacgtccccaaatataacagttacactaaagaagtttccgctcgatacgctgattccagatgggaaacgcatcatctgggactctcggaaaggattcatcatttcaaatgccacgtacaaggaaattggcctactgacctgtgaggcaaccgtaaatggtcacctgtataagacaaattatctcacccaccgccagacaaacacaattatcgatgtacagatctctactccacgccccgtgaaactgctgagagggcatactttggtactgaactgtacagcaaccacacctctcaatactcgcgtacaaatgacctggtcctacccagatgagaaaaacaagcgggcgagtgtcaggcggcggatcgaccagtccaattcacacgcaaacattttctactctgttctgaccattgacaaaatgcagaacaaagacaaaggactttatacttgcagagtccgcagcggtccctcatttaaaagcgtcaacacatcagtccacatctatgacaaagcctttataaccgtcaagcaccggaagcaacaagtgcttgagacggtcgccggaaagcgatcataccgcctgtcaatgaaggtgaaggccttcccatcacccgaagtcgtctggctcaaagacggtctgccagccacagagaaatccgcacgatatcttacaagagggtactctctgataatcaaggacgttaccgaagaagatgccggcaattataccatcttgctgtccattaaacaatccaatgtgtttaagaacctgacagcgactttgattgtcaatgttaaaccacagatttatgaaaaagccgtctcttcctttccagacccggcactttatccactggggtccaggcagattctgacctgcactgcttacggcattcctcaaccaacgatcaagtggttttggcacccgtgtaaccataaccacagcgaggccaggtgtgatttctgctctaataatgaggaatcattcatcttagatgccgatagcaacatgggtaacagaatcgaatctatcacccagaggatggctatcattgaaggcaaaaataaaatggcttctaccctcgttgtggcggattcaagaatatccgggatctacatctgtatagcttcaaacaaagtggggaccgtgggccggaacatttcattttacattacggatgttcccaatggattccacgtgaacctggagaaaatgcccacagagggcgaagatctgaagctctcctgcactgtgaacaaattcctgtatagagacgtcacttggattttgctcaggactgtcaacaaccggactatgcattactcaatctccaaacagaagatggccattacaaaggagcacagtatcactctcaaccttactatcatgaacgtgtccctgcaggactccggcacctatgcttgtagggcacgtaatgtgtacacaggtgaagagatattgcagaaaaaagaaatcacgatccgagaccaggaagccccgtatctgctgcgcaatcttagcgatcacaccgtggccatttcttcttctacaacactcgattgtcatgctaacggagtgcccgagccacaaatcacatggttcaaaaacaaccacaagattcagcaggaaccagagctgtacacaagtacatctcctagttccagttccagttcacccctgtcttccagttcctcctccagtagttcaagcagtagctag

SEQ ID NO: 60611 - DNA, 2202 bp, Artificial Sequence
  derived and/or modified sequence
atggtttcatattgggacactggagtgctgctgtgcgcccttctatcctgccttcttctgaccggtagttcatccggcagcaaattgaaagacccagaactatctctgaaagggacccagcacattatgcaggcagggcagacattgcatttgcagtgtcgtggcgaagctgcccacaagtggtcactgcctgagatggtatcaaaggagtcggaacggctttctatcactaagtctgcatgtggtcgcaatggtaaacagttctgtagcacgcttactttgaacactgcacaagccaatcacacaggcttttattcatgtaagtacctcgcagttcccacttccaaaaaaaaagagacagaatcagcaatctatatctttatatccgacacaggcaggccatttgtggagatgtactctgagatcccggaaatcatccatatgacggagggcagggagctggtgattccctgccgggttactagtccgaacatcaccgtaaccctgaagaagttccctctcgacactctgataccagacggaaaaagaatcatctgggacagcaggaagggttttattatctcaaatgccacatataaagagataggattactcacttgcgaggccactgtgaacggccatctgtacaaaacgaattatctcacccaccggcaaacaaacaccattatagatgtgcaaatcagtactcccaggcctgtgaagctgcttcggggtcatacacttgtcctcaactgcacggcaaccacacctttaaatacaagggtgcagatgacctggtcgtaccccgatgagaaaaacaaaagggcaagcgtgagaaggaggattgatcagtcaaatagtcacgcaaatattttttattcagtcctgaccatcgacaaaatgcagaacaaggataagggtctctacacttgtcgcgtacgcagcgggcctagctttaagtccgtgaatacatccgtccacatttacgataaggccttcatcactgtgaaacacagaaaacagcaggtgctggagacggtggcaggaaaaagatcctatcgattaagtatgaaggtgaaagccttccctagccccgaggtcgtctggctcaaagatgggctgcctgcgactgaaaagtccgcccgatatctgacaaggggttactccctgattattaaggatgtgaccgaagaagacgctggcaactatacaatcttactgagtataaagcagagtaatgttttcaagaacctgactgctactctcatcgtcaatgtgaagccgcaaatctatgagaaggctgtctccagttttcccgaccccgcactgtaccccctggggagcaggcaaattctgacctgtactgcctatggaatcccccagcccacaatcaagtggttctggcatccttgcaaccacaatcacagcgaagcccgttgcgatttttgtagcaataacgaagaaagttttatactggatgccgactctaacatgggtaaccggatagaaagtatcacgcagcgtatggctatcatagaaggtaagaataagatggcctcgacgttagtcgtggcagattccaggatcagtgggatctatatttgcattgcctccaataaggtcggcacagtgggaaggaatatttcattttacattacggacgtgccaaatggattccacgtgaatctggagaagatgccaactgagggtgaagatctcaaactgtcctgtaccgtgaacaagtttctttaccgcgacgtgacctggattctgctgcgcacagtgaataatcgtactatgcattatagcatctctaaacagaaaatggccatcaccaaggaacacagtataaccctgaacttgacgatcatgaatgtttccctacaagacagcggaacatacgcgtgcagagcgagaaacgtgtacaccggagaggaaattctccagaaaaaggaaatcacaatcagggaccaggaggctccttacttactaagaaatcttagcgaccatacagtggccatttcctcatccacaacactggattgccacgcaaacggagtgcctgaacctcagattacatggttcaagaacaatcacaagatccagcaggagcccgaactatatactagtacttcgccttctagcagcagctcttctccactttcctcctcgagctcatcctctagtagctcctccagttag

SEQ ID NO: 60612 - protein, 541 aa, Artificial Sequence
  derived and/or modified sequence
MVSYWDTGVLLCALLSCLLLTGSSSGSKLKDPELSLKGTQHIMQAGQTLHLQCRGEAAHKWSLPEMVSKESERLSITKSACGRNGKQFCSTLTLNTAQANHTGFYSCKYLAVPTSKKKETESAIYIFISDTGRPFVEMYSEIPEIIHMTEGRELVIPCRVTSPNITVTLKKFPLDTLIPDGKRIIWDSRKGFIISNATYKEIGLLTCEATVNGHLYKTNYLTHRQTNTIIDVQISTPRPVKLLRGHTLVLNCTATTPLNTRVQMTWSYPDEKNKRASVRRRIDQSNSHANIFYSVLTIDKMQNKDKGLYTCRVRSGPSFKSVNTSVHIYDKAFITVKHRKQQVLETVAGKRSYRLSMKVKAFPSPEVVWLKDGLPATEKSARYLTRGYSLIIKDVTEEDAGNYTILLSIKQSNVFKNLTATLIVNVKPQIYEKAVSSFPDPALYPLGSRQILTCTAYGIPQPTIKWFWHPCNHNHSEARCDFCSNNEESFILDADSNMGNRIESITQRMAIIEGKNKLPPANSSFMLPPTSFSSNYFHFLP

SEQ ID NO: 60613 - protein, 24 aa, Artificial Sequence
  derived and/or modified sequence
LPPANSSFMLPPTSFSSNYFHFLP

SEQ ID NO: 60614 - DNA, 531 bp, Artificial Sequence
  derived and/or modified sequence
atggtgagctactgggacaccggcgtgctgctgtgcgccctgctgagctgcctgctgctgaccggcagcagcagcggcagcaagctgaaggaccccgagctgagcctgaagggcacccagcacatcatgcaggccggccagaccctgcacctgcagtgcagaggcgaggccgcccacaagtggagcctgcccgagatggtgagcaaggagagcgagagactgagcatcaccaagagcgcctgcggcagaaacggcaagcagttctgcagcaccctgaccctgaacaccgcccaggccaaccacaccggcttctacagctgcaagtacctggccgtgcccaccagcaagaagaaggagaccgagagcgccatctacatcttcatcagcgacaccggcagacccttcgtggagatgtacagcgagatccccgagatcatccacatgaccgagggcagagagctggtgatcccctgcagagtgaccagccccaacatcaccgtgaccctgaagaagaagaacaagagagcctag

SEQ ID NO: 60615 - DNA, 1626 bp, Artificial Sequence
  derived and/or modified sequence
atggtgagctactgggacaccggcgtgctgctgtgcgccctgctgagctgcctgctgctgaccggcagcagcagcggcagcaagctgaaggaccccgagctgagcctgaagggcacccagcacatcatgcaggccggccagaccctgcacctgcagtgcagaggcgaggccgcccacaagtggagcctgcccgagatggtgagcaaggagagcgagagactgagcatcaccaagagcgcctgcggcagaaacggcaagcagttctgcagcaccctgaccctgaacaccgcccaggccaaccacaccggcttctacagctgcaagtacctggccgtgcccaccagcaagaagaaggagaccgagagcgccatctacatcttcatcagcgacaccggcagacccttcgtggagatgtacagcgagatccccgagatcatccacatgaccgagggcagagagctggtgatcccctgcagagtgaccagccccaacatcaccgtgaccctgaagaagttccccctggacaccctgatccccgacggcaagagaatcatctgggacagcagaaagggcttcatcatcagcaacgccacctacaaggagatcggcctgctgacctgcgaggccaccgtgaacggccacctgtacaagaccaactacctgacccacagacagaccaacaccatcatcgacgtgcagatcagcacccccagacccgtgaagctgctgagaggccacaccctggtgctgaactgcaccgccaccacccccctgaacaccagagtgcagatgacctggagctaccccgacgagaagaacaagagagccagcgtgagaagaagaatcgaccagagcaacagccacgccaacatcttctacagcgtgctgaccatcgacaagatgcagaacaaggacaagggcctgtacacctgcagagtgagaagcggccccagcttcaagagcgtgaacaccagcgtgcacatctacgacaaggccttcatcaccgtgaagcacagaaagcagcaggtgctggagaccgtggccggcaagagaagctacagactgagcatgaaggtgaaggccttccccagccccgaggtggtgtggctgaaggacggcctgcccgccaccgagaagagcgccagatacctgaccagaggctacagcctgatcatcaaggacgtgaccgaggaggacgccggcaactacaccatcctgctgagcatcaagcagagcaacgtgttcaagaacctgaccgccaccctgatcgtgaacgtgaagccccagatctacgagaaggccgtgagcagcttccccgaccccgccctgtaccccctgggcagcagacagatcctgacctgcaccgcctacggcatcccccagcccaccatcaagtggttctggcacccctgcaaccacaaccacagcgaggccagatgcgacttctgcagcaacaacgaggagagcttcatcctggacgccgacagcaacatgggcaacagaatcgagagcatcacccagagaatggccatcatcgagggcaagaacaagctgccccccgccaacagcagcttcatgctgccccccaccagcttcagcagcaactacttccacttcctgccctag

SEQ ID NO: 60616 - DNA, 75 bp, Artificial Sequence
  derived and/or modified sequence
ctgccccccgccaacagcagcttcatgctgccccccaccagcttcagcagcaactacttccacttcctgccctag

SEQ ID NO: 60617 - DNA, 531 bp, Artificial Sequence
  derived and/or modified sequence
atggtaagctactgggacacaggagtactcttatgcgctctgctgagctgtctgctgctcacaggctcgagctctggcagtaagctcaaagacccggagctgtctttgaagggcacacaacatatcatgcaggccggccaaacgctacacctgcaatgtcggggcgaggcggcccataaatggagcctgcctgaaatggtgtctaaagaatctgaacggttgagcatcaccaaatccgcctgtggccggaacgggaagcagttctgttctactctgaccttgaatactgcacaggctaatcataccggcttttatagctgtaaatatctggctgtccccacaagtaagaagaaggagactgaatctgccatctatatctttatcagtgacactggcagacctttcgtggaaatgtactcggagattcctgaaatcattcatatgaccgagggaagagaattggtaatcccttgtcgcgtaacctcccctaatatcaccgtgaccttgaagaaaaaaaacaaaagggcttag

SEQ ID NO: 60618 - DNA, 1626 bp, Artificial Sequence
  derived and/or modified sequence
atggtaagctactgggacaccggcgtcctgctctgcgcattactcagctgtctgttgttgaccggctcctcgtccggatctaaactgaaggatcctgagttgtcactgaaagggacccagcatattatgcaagctggacagacccttcacctgcagtgccggggcgaggccgctcacaaatggtccctgccggaaatggtgtcaaaagaaagcgagcgactgagtatcacaaagtcagcctgcggccgaaatggcaaacagttttgttctaccctcacattgaacaccgctcaggcaaatcacactggattctactcttgcaaatacctggctgtacctacttccaaaaagaaggaaacagagtctgccatctatatttttatctcagataccggccgccccttcgttgaaatgtacagcgaaattccagagatcattcacatgacagagggcagggagctcgtcataccttgtcgagtgacgtcccctaacatcacagtgacactcaagaaatttccactggacactctcatcccagacgggaagcggattatttgggactctcgtaaaggattcatcataagcaacgcaacctataaggagattgggcttctgacatgcgaagccaccgttaatggtcacctctataagacaaactatttgacccatcgccaaaccaacactattattgacgtgcagatttcgacccctagacccgtgaagctgctgcggggtcacacccttgtgctaaattgcaccgccaccacgccgttgaacacaagagtgcagatgacatggtcatacccagacgaaaagaataagagagcctctgtgcggagacggattgatcagtcgaattcccacgctaatattttttatagcgtgctgaccatagataagatgcagaacaaggacaagggcctatacacgtgccgagtaaggtcaggtccaagctttaaaagcgtcaacacgtccgtgcacatctatgacaaagctttcattacagttaagcaccggaaacaacaggtgctggaaactgtggccggcaaacgcagctacagacttagcatgaaggttaaggccttcccttctcccgaggtggtctggctcaaagacgggctgcccgctaccgaaaaaagtgcaagatacctaacccgcggttactctttgattattaaggacgtgaccgaggaggatgctggaaactacaccattctccttagcattaagcagagtaatgtgtttaagaacctgaccgccacactgatagtgaatgttaaaccgcagatttatgagaaagcggtgagttccttccctgacccggcactctaccccctgggcagtcgccagattttaacttgcaccgcctatggaatcccacagccaaccattaagtggttctggcatccatgtaaccacaaccatagtgaagctcgctgcgatttctgcagtaataatgaagagagttttattttagacgcagattcaaacatgggcaatcgtattgaatcaatcacccagcgcatggccattatagagggcaaaaataagttacctccagctaattcttctttcatgttgccaccgacaagcttctcttcaaactattttcatttcttgccttag

SEQ ID NO: 60619 - DNA, 75 bp, Artificial Sequence
  derived and/or modified sequence
ctgccgccagcgaactcttccttcatgctgcccccaacttctttctcgtcgaattatttccatttccttccctag

SEQ ID NO: 60620 - DNA, 1911 bp, Artificial Sequence
  derived and/or modified sequence
atcgaggtccgcgggaggctcggagcgcgccaggcggacactcctctcggctcctccccggcagcggcggcggctcggagcgggctccggggctcgggtgcagcggccagcgggcgcctggcggcgaggattacccggggaagtggttgtctcctggctggagccgcgagacgggcgctcagggcgcggggccggcggcggcgaacgagaggacggactctggcggccgggtcgttggccgcggggagcgcgggcaccgggcgagcaggccgcgtcgcgctcaccatggtcagctactgggacaccggggtcctgctgtgcgcgctgctcagctgtctgcttctcacaggatctagttcaggttcaaaattaaaagatcctgaactgagtttaaaaggcacccagcacatcatgcaagcaggccagacactgcatctccaatgcaggggggaagcagcccataaatggtctttgcctgaaatggtgagtaaggaaagcgaaaggctgagcataactaaatctgcctgtggaagaaatggcaaacaattctgcagtactttaaccttgaacacagctcaagcaaaccacactggcttctacagctgcaaatatctagctgtacctacttcaaagaagaaggaaacagaatctgcaatctatatatttattagtgatacaggtagacctttcgtagagatgtacagtgaaatccccgaaattatacacatgactgaaggaagggagctcgtcattccctgccgggttacgtcacctaacatcactgttactttaaaaaagtttccacttgacactttgatccctgatggaaaacgcataatctgggacagtagaaagggcttcatcatatcaaatgcaacgtacaaagaaatagggcttctgacctgtgaagcaacagtcaatgggcatttgtataagacaaactatctcacacatcgacaaaccaatacaatcatagatgtccaaataagcacaccacgcccagtcaaattacttagaggccatactcttgtcctcaattgtactgctaccactcccttgaacacgagagttcaaatgacctggagttaccctgatgaaaaaaataagagagcttccgtaaggcgacgaattgaccaaagcaattcccatgccaacatattctacagtgttcttactattgacaaaatgcagaacaaagacaaaggactttatacttgtcgtgtaaggagtggaccatcattcaaatctgttaacacctcagtgcatatatatgataaagcattcatcactgtgaaacatcgaaaacagcaggtgcttgaaaccgtagctggcaagcggtcttaccggctctctatgaaagtgaaggcatttccctcgccggaagttgtatggttaaaagatgggttacctgcgactgagaaatctgctcgctatttgactcgtggctactcgttaattatcaaggacgtaactgaagaggatgcagggaattatacaatcttgctgagcataaaacagtcaaatgtgtttaaaaacctcactgccactctaattgtcaatgtgaaaccccagatttacgaaaaggccgtgtcatcgtttccagacccggctctctacccactgggcagcagacaaatcctgacttgtaccgcatatggtatccctcaacctacaatcaagtggttctggcacccctgtaaccataatcattccgaagcaaggtgtgacttttgttccaataatgaagagtcctttatcctggatgctgacagcaacatgggaaacagaattgagagcatcactcagcgcatggcaataatagaaggaaagaataagcttccaccagctaacagttctttcatgttgccacctacaagcttctcttccaactacttccatttccttccgtga

SEQ ID NO: 60621 - DNA, 531 bp, Artificial Sequence
  derived and/or modified sequence
atggtgtcctactgggacacaggagtgctgctgtgtgccctgctgagctgcctgctgctgaccggcagcagcagcggcagcaagctgaaggaccctgagctgagcctgaagggcacccagcacatcatgcaggccggccagaccctgcacctgcagtgccgcggggaggccgcccacaagtggagcctgcctgagatggtgtccaaggagagcgagcggctgagcatcaccaagagcgcctgtggcagaaatggcaagcagttctgcagcaccctgaccctgaacacagcccaggccaaccacacaggcttctacagctgcaagtacctggccgtgcccaccagcaagaagaaggagacagagagcgccatctacatcttcatcagtgacaccggccggccctttgtggagatgtacagcgagatccctgagatcatccacatgacagagggccgggagctggtgatcccctgccgggtgaccagccccaacatcaccgtgaccctgaagaagaagaacaagagggcctag

SEQ ID NO: 60622 - DNA, 1626 bp, Artificial Sequence
  derived and/or modified sequence
atggtgtcctactgggacacaggagtgctgctgtgtgccctgctgagctgcctgctgctgaccggcagcagcagcggcagcaagctgaaggaccctgagctgagcctgaagggcacccagcacatcatgcaggccggccagaccctgcacctgcagtgccgcggggaggccgcccacaagtggagcctgcctgagatggtgtccaaggagagcgagcggctgagcatcaccaagagcgcctgtggcagaaatggcaagcagttctgcagcaccctgaccctgaacacagcccaggccaaccacacaggcttctacagctgcaagtacctggccgtgcccaccagcaagaagaaggagacagagagcgccatctacatcttcatcagtgacaccggccggccctttgtggagatgtacagcgagatccctgagatcatccacatgacagagggccgggagctggtgatcccctgccgggtgaccagccccaacatcaccgtgaccctgaagaagttccccctggacaccctcatcccagatggcaagaggatcatctgggacagcaggaagggcttcatcatcagcaatgccacctacaaggagatcggcctgctgacctgtgaggccaccgtgaatggccacctgtacaagaccaactacctgacccaccggcagaccaacaccatcattgatgtgcagatcagcacccccaggcctgtgaagctgctgcggggccacaccctggtgctgaactgcacagccaccacccccctgaacaccagggtgcagatgacctggagctacccagatgagaagaacaagagggcctctgtgagaagaagaattgaccagagcaacagccacgccaacatcttctacagcgtgctgaccatcgacaagatgcagaacaaggacaagggcctgtacacctgccgggtgcgcagcggccccagcttcaagtctgtgaacacctctgtgcacatctatgacaaggccttcatcaccgtgaagcacaggaagcagcaggtgctggagaccgtggccggcaagaggagctaccgcctgtccatgaaggtgaaggccttccccagccctgaggtggtgtggctgaaggatggcctgcctgccacagagaagagcgcccgctacctgacccggggctacagcctcatcatcaaggatgtgacagaggaggatgctggcaactacaccatcctgctgagcatcaagcagagcaatgtgttcaagaacctgacagccaccctgattgtgaatgtgaagccccagatctatgagaaggctgtgtcctccttcccagaccctgccctgtaccccctgggcagccggcagatcctgacctgcacagcctacggcatcccccagcccaccatcaagtggttctggcacccctgcaaccacaaccacagcgaggcccgctgtgacttctgcagcaacaatgaggagagcttcatcctggatgctgacagcaacatgggcaaccgcatcgagagcatcacccagaggatggccatcatcgagggcaagaacaagctgcccccagccaacagcagcttcatgctgccccccaccagcttcagcagcaactacttccacttcctgccctag

SEQ ID NO: 60623 - DNA, 75 bp, Artificial Sequence
  derived and/or modified sequence
ctgcccccagccaacagcagcttcatgctgccccccaccagcttcagcagcaactacttccacttcctgccctag

SEQ ID NO: 60624 - DNA, 531 bp, Artificial Sequence
  derived and/or modified sequence
atggtgagctactgggacaccggcgtgctgctgtgcgccctgctgtcctgtctgctgctgactggtagttctagcggctccaaactcaaggaccctgaattgtcacttaaagggacgcagcacatcatgcaggccggtcagaccctacatctgcagtgccgcggcgaagctgcgcacaaatggagtctccccgagatggtgtcaaaggagtcagagcggttgtccattactaaatccgcctgtggcagaaatgggaagcagttttgtagcacattgactctgaacaccgcacaagcaaatcataccggattttacagttgcaagtacttagcagtgcccacctcaaaaaaaaaggagacagagagtgctatatatatcttcattagcgacaccggacgtcctttcgttgagatgtattcagagatcccggaaattatccacatgaccgagggacgagagttggtgatcccatgccgggtcacatccccaaacataactgtcactctaaagaagaagaataaacgcgcctag

SEQ ID NO: 60625 - DNA, 1626 bp, Artificial Sequence
  derived and/or modified sequence
atggtgagctactgggacaccggcgtgctgctgtgcgccctgctgagttgcttactgctgacaggatcttcatccggatctaaactgaaggaccctgagttgtccctgaaaggtactcagcacattatgcaagctggccagacactgcatcttcagtgtcgcggagaggcggcacacaagtggtcgctgcccgagatggtgtcgaaggaaagcgaacggttgagcataactaagtccgcttgcgggcgaaatggcaagcagttctgctctacattaaccctgaacaccgcacaagctaatcacacggggttctattcatgtaagtatctcgctgtgcccactagcaaaaagaaagagacagagagtgctatttatatctttatcagtgacaccggcagaccttttgtggagatgtattctgaaattcctgagattatccatatgactgaggggcgggagctggttataccctgccgcgtcactagccctaatattacagtgaccctgaagaagttccctctggatacactgatccccgacggtaaaagaatcatttgggacagtagaaaaggcttcatcattagtaatgccacgtacaaggagatagggctgttgacgtgcgaagcgaccgtcaatggccacctctataaaaccaactacctaacacacagacagaccaatacgatcatcgacgtgcagattagtacccctcggcctgtaaagttactcagaggccatactctggttttgaactgcaccgccaccacaccgttgaataccagggttcagatgacctggtcttatcccgacgagaagaacaagagagctagtgttcgtcggcggatagaccagagtaattctcatgccaatatattttactctgtcctcaccatcgacaagatgcagaataaagataaaggactgtacacttgcagagtcagatcgggtcctagttttaagagcgtgaacacctcagtacatatttatgacaaggcgttcattaccgtgaagcacaggaagcaacaggtgcttgaaacggtggccggaaagcggtcataccgcttgagtatgaaagtaaaagcatttcccagcccagaggtggtttggctgaaagacggcctgccggccacagaaaagagcgctcggtatctgactcgtggttacagcctgatcatcaaggacgtcaccgaggaggacgccggaaactataccatcctgctttccataaagcagagcaatgtcttcaagaatctcaccgccaccctcatcgtcaacgtaaaaccccagatatatgaaaaagccgtatccagcttccccgacccagcactttatccgctagggtcccggcagattctcacgtgtacggcctacggcattcctcagcctacaataaaatggttctggcatccttgtaaccacaaccactctgaggctcgctgtgacttctgctctaacaacgaggaatccttcatcttggatgcagatagcaacatggggaatagaatcgaatctattacccagcggatggcaattattgagggcaagaacaaactgccccccgccaatagttcttttatgttgccccctactagcttcagctcaaattatttccattttctaccatag

SEQ ID NO: 60626 - DNA, 75 bp, Artificial Sequence
  derived and/or modified sequence
ctgccccccgccaacagcagcttcatgctgccccccaccagcttctcctctaactatttccattttctgccctag

SEQ ID NO: 60627 - DNA, 531 bp, Artificial Sequence
  derived and/or modified sequence
atggtcagttactgggataccggagtattgctgtgcgcactcctgtcttgtttacttttgaccggctctagctcaggatcaaaactcaaagatccagaattaagtctgaagggtacccagcatataatgcaggccggacaaaccctgcatctgcagtgtaggggtgaagccgcacacaaatggagcctgcctgagatggtgtccaaagagagcgagcggctgagcatcaccaaaagcgcgtgcgggcgaaacgggaaacagttttgttctaccctaacactaaatactgctcaggctaatcataccggcttctactcctgcaagtatctcgccgtccctaccagtaaaaaaaaagagactgagagcgccatctatattttcataagcgacaccgggagacctttcgtggagatgtattccgaaattccagagattatccacatgactgaaggcagagagctagtcatcccttgcagagtgactagtccaaatatcacggtaacactcaagaaaaagaataagagagcctag

SEQ ID NO: 60628 - DNA, 1626 bp, Artificial Sequence
  derived and/or modified sequence
atggtgtcttattgggacaccggcgtactgctgtgtgcgttgctatcttgcctgcttctgactggctccagtagtggctccaagctgaaggacccagagctgtccctaaaaggaacccaacacataatgcaggccggacagacgctgcatcttcaatgccgcggagaggcagcacacaagtggtcccttcctgagatggtgagcaaagagagcgagcgcctgagtataactaagagcgcttgcggcaggaatgggaagcaattttgtagcacattgaccctcaataccgcccaggcgaatcacacgggtttttatagctgtaaatacctagcagtgccaacctctaaaaagaaggaaactgagtcagcaatctacatcttcatcagcgatacgggtcggccatttgttgaaatgtactccgaaatccctgagatcattcacatgaccgaaggcagggaactcgtgataccatgccgcgtaacatcaccaaatatcacagtgacactgaaaaagttcccactggacacactgatccccgatgggaaaagaattatatgggattcgcggaaaggcttcattatctccaatgctacgtataaagaaattggactactcacctgtgaagccactgtgaacggccacctgtacaagaccaactatctgacgcataggcagacaaataccatcattgacgtgcagatctctacaccacggccagttaaacttttaagagggcacaccctggtgctgaactgcaccgccacaactccgcttaacactagggtgcaaatgacatggtcttatcccgatgagaagaacaagcgcgcttcagtgcggcgacggattgatcaatcaaactctcatgctaacatcttttattctgtcctgactatcgataaaatgcagaataaggataaaggactatacacgtgcagagtgcggtccggacccagcttcaagtccgtcaatacctcagtgcacatttatgacaaggctttcatcaccgtcaaacatcgcaagcagcaggtgctggaaaccgtcgccggaaagcgcagttataggttgagcatgaaggtcaaagcatttccgtcccctgaagtggtgtggcttaaagatgggctgcctgccactgaaaaaagtgcgaggtacctcacccggggatactcccttatcatcaaggacgtcaccgaggaggatgcgggaaattataccatccttttatctattaaacaatctaacgtatttaaaaatctaacagccacactcatcgttaacgtgaaaccccagatatacgagaaagccgtctcaagcttccctgaccccgcactctaccctctgggttcccgccagatcctgacgtgtactgcctatgggattccccagccaactatcaagtggttctggcacccctgtaatcataaccattccgaggctcgttgcgatttttgttctaataacgaggaatccttcatattggacgccgacagtaacatgggcaaccggatcgaatccatcacacagaggatggctattatcgaggggaaaaacaaactgcctccagctaactcgtcattcatgctccccccaacctccttcagctccaattactttcacttcttgccttag

SEQ ID NO: 60629 - DNA, 75 bp, Artificial Sequence
  derived and/or modified sequence
ctgcctcctgccaattctagtttcatgctacctcctaccagtttttccagcaattatttccacttcttaccttag

SEQ ID NO: 60630 - protein, 749 aa, Artificial Sequence
  derived and/or modified sequence
MQAWRKGPDGPQKTSSDSMSRLMDSDMDYERPNVETIKCVVVGDNAVGKTRLICARACNATLTQYQLLATHVPTVWAIDQYRVCQEVLERSRDVVDDVSVSLRLWDTFGDHHKDRRFAYGRSDVVVLCFSIANPNSLHHVKTMWYPEIKHFCPRAPVILVGCQLDLRYADLEAVNRARRPLARPIKPNEILPPEKGREVAKELGIPYYETSVVAQFGIKDVFDNAIRAALISRRHLQFWKSHLRNVQRPLLQAPFLPPKPPPPIIVVPDPPSSSEECPAHLLEDPLCADVILVLQERVRIFAHKIYLSTSSSKFYDLFLMDLSEGELGGPSEPGGTHPEDHQGHSDQHHHHHHHHHGRDFLLRAASFDVCESVDEAGGSGPAGLRASTSDGILRGNGTGYLPGRGRVLSSWSRAFVSIQEEMAEDPLTYKSRLMVVVKMDSSIQPGPFRAVLKYLYTGELDENERDLMHIAHIAELLEVFDLRMMVANILNNEAFMNQEITKAFHVRRTNRVKECLAKGTFSDVTFILDDGTISAHKPLLISSCDWMAAMFGGPFVESSTREVVFPYTSKSCMRAVLEYLYTGMFTSSPDLDDMKLIILANRLCLPHLVALTEQYTVTGLMEATQMMVDIDGDVLVFLELAQFHCAYQLADWCLHHICTNYNNVCRKFPRDMKAMSPENQEYFEKHRWPPVWYLKEEDHYQRARKEREKEDYLHLKRQPKRRWLFWNSPSSPSSSAASSSSPSSSSAVV

SEQ ID NO: 60631 - DNA, 2250 bp, Artificial Sequence
  derived and/or modified sequence
atgcaggcttggcgcaaggggcccgacgggccacagaaaacatcatctgatagcatgagtaggctcatggacagcgatatggattacgaacgcccgaacgtagaaaccatcaaatgtgttgtcgtgggcgataatgcagtggggaagacacgattgatttgtgcacgggcatgtaatgccacactgacacagtaccaactcctcgctactcatgtgcccaccgtgtgggccatcgaccaatatagggtatgccaggaggttttggaaaggtcaagagatgttgtggacgatgtgtctgtcagtcttcgcctttgggacaccttcggggaccatcacaaggaccgccggttcgcctacggacgttccgatgtagtcgtactgtgctttagcattgctaatcccaattccttgcaccacgtcaagacaatgtggtaccctgagatcaaacacttttgtccaagagcaccagtgattctcgtgggctgtcagctggacttgcgatatgcggatctggaggccgttaaccgggcccgccgtcccctcgcacggcctattaagccgaacgaaattctgcctcccgaaaagggtagagaagtggccaaagagctggggataccatattacgaaacaagcgtggttgcacaatttggcatcaaggacgtctttgacaatgccattagagctgctctaatctctaggcgacatctccagttctggaagtcgcatctcaggaatgtccaacgcccactcctgcaggcacccttcctgccaccaaaaccacctcccccgattatcgttgttcctgaccccccaagctccagcgaggagtgccctgcccatttattggaagaccctctgtgcgcggatgtcatacttgtcctgcaggagcgggtacgaatattcgcccataagatctatctctccactagttcctcaaagttctacgatttgttcctgatggatctttcggaaggagagctcggcgggccttcagagccagggggaacacacccagaggatcaccaggggcactctgaccagcatcatcatcatcaccaccaccaccacggaagagacttcctgttacgggccgccagttttgacgtgtgcgagagcgtggatgaggcgggcggatctggaccagccggcttacgcgcctccaccagcgacgggatcctccggggcaacggcacaggatatctccctggcaggggtagagtgttgagcagctggtcgagagctttcgtttctattcaggaagagatggctgaagatccactgacctataaatcgcggctgatggttgttgtcaaaatggactccagtatacagcccggtcccttccgtgccgtgttaaaatacctgtacactggagagctcgacgagaacgagcgagatctgatgcacatagctcacatcgccgagttgcttgaagtctttgacttaagaatgatggtggcaaacatcctgaacaacgaggcctttatgaatcaggaaatcaccaaagcattccacgtgcgccgtaccaatcgagtgaaggaatgtctcgccaaggggacttttagcgatgtcaccttcattctggacgatggaacaatctcagctcataaacccctgctaatttcctcctgtgactggatggccgccatgttcggaggaccgtttgtggaatcgtctacacgagaggttgtgttcccgtatactagtaagagttgcatgcgcgccgtactggagtatttatacaccggtatgttcacttcttccccagatctcgacgatatgaaactgatcattctggccaacaggctgtgcttgccacacttagtagctctgaccgaacagtacactgtgacggggttaatggaagctacacagatgatggtggacatagacggggacgtcctcgtatttctcgagttggcccagttccattgcgcttaccaattggctgactggtgcttacatcacatttgcacgaattacaataatgtctgtaggaaattccctagagacatgaaagcaatgtcccccgaaaaccaagaatactttgaaaaacaccgctggcctcctgtctggtatctgaaagaggaggatcactatcagagggcgaggaaggagcgcgagaaagaggattacctccatctaaagcgtcaacccaaacggcgttggttgttctggaatagcccatcaagtccatctagcagcgccgcttcaagcagcagcccttcttcgtcctctgcggttgtgtag

SEQ ID NO: 60632 - DNA, 2250 bp, Artificial Sequence
  derived and/or modified sequence
atgcaggcctggaggaagggcccagatggcccccagaagaccagcagtgacagcatgagccggctgatggacagcgacatggactatgagcggcccaacgtggagaccatcaagtgtgtggtggtgggggacaatgctgtgggcaagaccaggctcatctgtgcccgggcctgcaatgccaccctgacccagtaccagctgctggccacccacgtgcccaccgtgtgggccatcgaccagtacagagtgtgccaggaggtgctggagaggagcagagatgtggtggatgatgtgtctgtgtccctgcggctgtgggacaccttcggggaccaccacaaggacagaagatttgcctacggccgcagtgatgtggtggtgctgtgcttcagcatcgccaaccccaacagcctgcaccacgtgaagaccatgtggtacccagagatcaagcacttctgcccccgggcccctgtgatcctggtgggctgccagctggacctgcgctatgctgacctggaggccgtgaacagagcccggcggcccctggcccggcccatcaagcccaatgagatcctgcccccagagaagggccgggaggtggccaaggagctgggcatcccctactatgagacctctgtggtggcccagtttggcatcaaggatgtgtttgacaatgccatccgggccgccctgatcagcagaagacacctgcagttctggaagagccacctgagaaatgtgcagaggcccctgctgcaggcccccttcctgccccccaagcccccaccacccatcatcgtggtgcctgacccccccagcagcagcgaggagtgcccagcccacctgctggaggaccccctgtgtgctgatgtgatcctggtgctgcaggagcgggtgcgcatctttgcccacaagatctacctgagcaccagcagcagcaagttctatgacctcttcctgatggacctgtctgagggggagctgggcggccccagcgagcccggcggcacccaccctgaggaccaccagggccacagcgaccagcaccaccaccaccaccaccaccaccacggccgggacttcctgctgcgggccgccagctttgatgtgtgtgagagcgtggatgaggccggcggcagcggccctgctggcctgcgggccagcaccagtgatggcatcctgcggggaaatggcaccggctacctgcccggccggggccgggtgctgagctcctggagccgggcctttgtgtccatccaggaggagatggccgaggaccccctgacctacaagagccggctgatggtggtggtgaagatggacagcagcatccagcccggccccttccgggctgtgctgaagtacctgtacacaggagagctggatgaaaatgaaagagacctgatgcacatcgcccacatcgccgagctgctggaggtgtttgacctgaggatgatggtggccaacatcctgaacaatgaggccttcatgaaccaggagatcaccaaggccttccacgtgcggaggaccaacagagtgaaggagtgcctggccaagggcaccttcagtgatgtgaccttcatcctggatgatggcaccatcagcgcccacaagcccctgctgatcagcagctgtgactggatggccgccatgtttggaggcccctttgtggagagcagcacccgggaggtggtgttcccctacaccagcaagagctgcatgagagctgtgctggagtacctgtacacaggcatgttcaccagcagcccagacctggatgacatgaagctgatcatcctggccaaccggctgtgcctgccccacctggtggccctgacagagcagtacacagtgacaggcctgatggaggccacccagatgatggtggacattgatggagatgtgctggtgttcctggagctggcccagttccactgtgcctaccagctggccgactggtgcctgcaccacatctgcaccaactacaacaacgtgtgcaggaagttcccccgggacatgaaggccatgagccctgagaaccaggagtactttgagaagcaccgctggccccctgtgtggtacctgaaggaggaggaccactaccagagggccaggaaggagcgggagaaggaggactacctgcacctgaagaggcagcccaagaggcgctggctgttctggaacagccccagcagccccagcagcagcgctgccagcagcagcagccccagcagcagcagcgctgtggtgtag

SEQ ID NO: 60633 - DNA, 2250 bp, Artificial Sequence
  derived and/or modified sequence
atgcaggcctggcggaagggccccgacggcccccagaagaccagctctgattcaatgtcccggcttatggattctgacatggattatgagaggcctaacgtggaaactattaagtgcgtcgtggttggcgataatgcagtgggcaaaactcggctcatctgcgccagagcttgcaatgcaacgttgacacagtaccagcttctggcaactcacgtgccaactgtatgggctatcgaccagtaccgggtctgtcaggaggtgctggaaagaagcagagacgtcgtggacgatgtcagtgtgagcttaaggctgtgggacacgtttggtgaccatcataaggatagacgcttcgcatatggtcgcagtgatgtggtggtgctgtgtttctccattgccaatcccaactcgctgcaccatgttaagaccatgtggtacccggaaatcaagcacttctgccctcgcgctccagtcatccttgtgggctgtcagctcgatctgagatacgcagatttagaggccgtgaacagagcccggcgaccgctggcacgacccattaagcctaacgaaattctgccgcccgagaaagggagggaggtggcgaaggagctgggaattccttattatgagacgtctgtggtggcccagttcggtataaaagacgttttcgacaacgccattcgcgccgctcttatttcgcgtagacatttacaattctggaaatcccatcttcgcaatgtccagcgcccgcttttgcaagcaccttttctccccccaaagccaccgccccccatcatagttgtgcccgatcccccttcgagcagtgaagaatgcccagctcatctgctggaggacccactgtgcgccgacgtgatcttagtgctgcaggaacgggtcaggatcttcgctcacaaaatctatctaagcacctcctccagcaagttctatgacttgttcctgatggacctgtcagaaggtgaattgggcggcccctcagaaccaggggggacccatccagaagaccatcagggccattccgatcaacaccaccaccatcatcatcaccatcacggccgtgactttctcctgcgcgcagcatcctttgacgtgtgcgagtcggtggacgaggccgggggcagcggacctgccggactccgcgctagcacatcggatggcatcctaagaggaaacggcacaggctatctccctggaaggggccgagtcctgagctcttggtcccgggctttcgtttccatccaagaagaaatggccgaagacccactgacatacaagtctcgtctaatggtcgtggtcaaaatggattcgagcattcagcctggcccattccgagcagttctgaaatatttgtacaccggagagttggacgagaatgaacgggacttaatgcatatcgcacacatcgccgaactgctggaggtgttcgacctgcgtatgatggtggctaatattctgaacaacgaagcattcatgaatcaggagatcaccaaagcatttcacgtccgcaggacaaaccgcgtaaaagagtgccttgccaaaggaacgtttagcgacgtgacatttatcttggatgacggtactatttctgctcacaagcctttattaatatcctcatgcgattggatggccgcaatgttcggtgggcctttcgtcgaatcgtccacaagagaagtggtgttcccctacacgtctaagtcctgtatgagagcagtgttagagtacctctacaccggaatgttcaccagctctcctgacctcgacgacatgaagctcattatactagccaaccgcctctgtctaccacatctcgtcgctctgaccgagcagtatacagtaactggactgatggaagctactcagatgatggtcgacattgacggggacgtgttagtgttcctggagctggctcagtttcactgcgcgtaccagctggctgactggtgccttcaccatatttgcactaattataacaatgtatgccggaagtttccccgtgatatgaaagcgatgtctcccgagaatcaggaatactttgagaagcatagatggccgccggtctggtacctgaaggaagaggatcactaccagcgtgcaaggaaagagcgggaaaaggaggattacctgcatttgaagcgccaacctaagagaagatggctgttctggaattccccaagtagccccagttcttccgccgcaagctcttctagtccatcaagctcttcggcagttgtgtag

SEQ ID NO: 60634 - DNA, 2250 bp, Artificial Sequence
  derived and/or modified sequence
atgcaggcttggcggaaagggcctgacggaccacagaagacttcatcagactctatgagtcgcctgatggattcggatatggattatgaacgacctaatgttgagaccattaaatgtgtggtggtcggggacaacgccgtgggaaagacccgactgatctgtgcgagagcttgcaatgccacactgacccaataccaactgctcgccacccacgttcctacggtgtgggccatagatcaataccgggtctgtcaagaagtcttggaaaggagcagggacgtcgtggacgacgtcagcgtgtcactgagactgtgggataccttcggggaccatcataaagacagacgttttgcctatggcagatcggacgtggtggtgttgtgtttcagcatagctaacccaaattctctgcatcatgtaaagaccatgtggtatccagaaattaaacacttttgccccagggcaccagtcattctcgtcggctgccaactagatctgagatacgcagatctggaggccgtgaatcgggcacgcaggcccctcgcaaggcctataaagcctaatgagatactgcctccagagaagggtcgcgaagtcgctaaagagttgggtatcccttattacgagactagtgtagtggctcagtttggaataaaagatgtcttcgacaacgctataagggccgctctgatttcccggaggcacctgcagttctggaaatcacacctgcggaatgtccaacgtccattgctccaggcaccatttctacctcccaaacctccccctccaatcattgttgtgcccgatcctccaagctcatccgaggaatgcccagcgcatcttttagaagatccgttgtgcgccgatgtgattctggtgctgcaggaacgtgtgagaatcttcgcccacaaaatctacctgtccacatcaagtagcaagttctacgaccttttccttatggatttgtctgagggcgaactggggggtccgtccgaacccggtgggacacatcccgaagatcatcagggacacagtgaccagcatcaccaccatcatcaccatcatcatgggagagatttcctcctacgtgcggctagtttcgatgtctgcgaaagcgttgatgaggcaggcggaagcggcccagccggattgcgtgcatctacttctgacggcatcctgaggggcaacggaaccggatacctgccgggtcgcggaagagtgttatcctcttggtctcgcgcttttgtctccatccaggaagagatggccgaagacccactgacatacaaatccagactgatggtcgtcgtcaagatggatagtagtatccagcctgggccttttcgggcagttcttaaatacctgtacacgggagagctcgacgaaaatgagagggaccttatgcatatagcccacatcgcagaactcttggaggtctttgacctcaggatgatggtggcaaacatacttaataatgaagcttttatgaatcaggagattactaaagcctttcatgtgcggaggaccaatagggtgaaggagtgcctggctaaggggaccttctccgacgtaacctttattctggacgacgggacaataagcgcccacaaacctctgcttatcagcagctgcgattggatggcagccatgttcggaggacccttcgtggagagtagtacacgcgaggtggttttcccctatacgagcaaaagttgtatgcgggcagtcctggagtatctgtacaccggaatgtttaccagtagcccagatctggatgatatgaaattgattatcctcgccaataggttatgtttgcctcacctcgtggcactgacagaacaatatacagtgacagggctcatggaagcaacccagatgatggtagacattgatggtgatgtcctggtgtttctagaactggcccagtttcactgcgcctaccagctcgccgactggtgtctgcatcatatttgcacaaactataacaacgtgtgtcggaaatttccgcgagacatgaaggcaatgagtccagaaaatcaggagtattttgaaaaacacagatggccccctgtgtggtacctgaaagaggaagaccactaccagcgcgctaggaaggaaagagagaaggaagattatttgcaccttaagcgacagcccaagcggcgttggctgttttggaattcaccctcttccccgtccagcagcgctgcaagctcctcttctccgagttccagcagcgcagtcgtttag

SEQ ID NO: 60635 - DNA, 5451 bp, Artificial Sequence
  derived and/or modified sequence
atttttttctcctcctttttttaccctcccgtttttttcttttcttttttttttccctatcctttttttgtgaatgaaaaaaggaggtcgcgagcggtacctgggactgcagcgccaggcgtcttcgcggcagcgccttcgccgcgggcccgggcgcgtagcggcggcggcctcgcccctctcccggcgcccctgcgcgccgcccgctgcctccgcagcccggctccgcgcgccgccgtgacattgggcgcctggcgcgcggggcgatgctgatccggaaggggcagcggctgcagtgcagcgcgcgcgtccgctcctgggcccacgtccggcctgggctgccctgccggagtttctgagtggccgcgagctggccgggaggctggagcccagcagcagcgcggcggcgccggcgtcgtcccaacttgcaggcgcggagggacccctgacatttcactaaaatgagcgtgctcagcaggaagagatgtgttcctcacgctagaagccaccccgtcacatgtagtggtgtcccgtttaatggattctgacatggattatgaaaggccaaacgtagagaccatcaagtgcgttgtggtgggggacaacgccgtgggtaagaccaggctcatctgtgcccgcgcttgcaatgccaccctcacccagtaccagctgctggccacgcatgtgcccacagtatgggccatcgaccaatatcgtgtgtgccaggaggtgctggaacgctcccgagacgtggtagatgatgtcagcgtctctctgcgcctctgggacacctttggagaccaccacaaagaccgtcgctttgcttatgggagatctgatgtggtggttctgtgcttctccattgccaaccccaattccctccaccatgtcaagaccatgtggtacccagaaatcaagcacttctgcccccgagcacctgtcatcttggtgggctgccagttggacctgcgctacgctgacctggaggctgtcaacagggctaggcgacccttggctaggcccatcaaacctaatgaaatcctgcccccagagaagggtcgggaggtggccaaggagctgggcatcccctactatgagaccagcgtggtggcccagttcggcatcaaggacgtctttgacaacgccatccgagctgcactcatctcccgccgccacctgcagttctggaagtcccacctccgcaatgtgcagcggcctctgctgcaggcacccttcctaccccccaagccaccgcccccgatcatcgtggtgcccgaccctccctccagcagcgaggagtgccccgcccacctcctggaggacccgctctgcgcggacgtcatcctggtgctgcaggagcgggtgcgcatctttgcccacaagatctacctctccacctcttcctccaagttctatgacctgttcctcatggacctgagtgagggggagctggggggcccctcggagccagggggcacccacccagaggaccaccagggccactctgatcaacaccaccaccatcaccaccaccaccatgggcgagacttcctgctccgagcagccagctttgacgtgtgcgagagcgtggatgaggctgggggctccggtcctgctggcctccgtgcttccaccagcgacgggatcttacggggcaacggaacagggtacctaccgggcaggggtcgtgtgctgtcttcctggagccgagcttttgtgagcatccaggaagagatggcagaagatcctctcacctacaaatcccggctgatggtggtggtgaagatggacagttccatccagccggggcccttccgggctgtcctcaagtacctgtacacgggggagctagatgagaacgagcgtgacctcatgcacattgcccacattgctgagctgctcgaggtctttgatctgcgcatgatggtggccaacattctcaacaatgaggccttcatgaaccaggagatcaccaaggccttccacgtccgccggaccaaccgggttaaggagtgcttggcaaaaggcaccttctcagatgtgaccttcatcctggatgatggcaccatcagcgcccacaagcccctgttgatttccagctgtgactggatggctgccatgtttggggggccatttgtggagagctccacccgggaggtggtgtttccctacacaagcaagagctgcatgcgggccgtgctggaatacctctacaccggcatgttcacctccagccccgacctggatgacatgaagctcatcattctagccaaccgcctctgcctgccacacctggttgccctcacagagcagtacacagtgaccgggctgatggaagcgacccagatgatggtggacatcgatggggacgtccttgtgttcctggaactggctcagttccactgtgcgtaccagctggccgactggtgtctccaccacatctgcaccaactacaacaacgtgtgccgcaagttcccccgagacatgaaggccatgtccccagaaaaccaggagtatttcgagaagcatcggtggccacctgtgtggtacctgaaggaggaagatcattaccagcgggcacggaaggagcgtgagaaggaggactacctccacctcaagcggcagcccaaacggcgttggctcttctggaacagtccatcctccccgtcttcctcggcagcctcctcctcatccccatcttcctcctcggctgtggtctgagatgctgccaccctcttctgaccctgctgctgttgtccccatccgccttcacccctctgctcttccgcatcaccccatccaccttacagggaccagggggcccacgtaaccaggacccagagggtggagctcttcttaccagccaccgtggctcagccagagaggagctgagccctgtggagcagaacgggaaccacctgcagaggtccccagacccaaagcaggacgggagacaactgcttggaggagcgaagagccctggcattttatctctgggtttgagagccctagagtcaaagggaaagcctcccagcctccagggcttctctgtgtgtcttggttgctgctctggccagggaggcagccccactcccagcaagcagaagtgatcctcgagggtcctgcccctgttggccatatctttccaccgacggacttgagtgttgcatttgttttgtgggcatttccacacgaagcctactcacaccctcactggagaagtcagggtagaaattgagccttcagagcccaactcaaggcttctacatcctggggtgcagctgcaaaaggccagacgtggaaaggcctgtatcctgccagtgtccctccgtcccagggggctgtgctagcacagacctgagaatggggacacaggtcattcagagctccaggcctggaagcagtgcctcttggtgcaacaagaaacttctccctcaccccctcctttaccctcagatttggagatggtaaccaaaggaagcagctgggacaggtggagaaggaagtaggaatgagtgcacggcgaccccgtgctcctcagggccctcccctgcctctgggtggcactgctttttatagggtggggcaaaattagcaaaaaacaaaaaccaatgacaaccaaactgaaaccgaaacgaaaaatcaacaaacactctgtcctctatccctccaaagaatgaaaatcagaaaaagcccctgcctagctcacatttctataaacagaggcccccatgatgaggaggtgaagatttaggttgcagaatcgactccaatgcctttcaggaaaggactcggcacttctctgactgcggaggccctgaccctgccagctggctccgagggcaacacaggggcctggcctctagagggctggtgattgaggggcccgggctggcggcaaagaggggtttggtctcggggcttaaatggcaccagactcttgcttttgcccatctggagactgcaggctcccttccttaccctcagagagtgcttatggtgggtgtttttgcggggctgcaataggggccaaaagtcagggaaaggggcactgacctgtagtgaaaggccacaggacacagccttattactgctggggtgggataaggggaaggagaagagggagaatggagcaggaggaaaagcagagttggtctagagaggaggagggcggggctggaggaatgtgggggattgaaactagctcccagcccccatggggcagcagctgggccacaattgcccctttccgttttctaaccccgactcagatttcaccacccacactctttttaggtgtaaaagatggagtcccacggaggaggggcagagccaggaggcagtggggctgtgggctcagagctcaggagtcgccttacctgagagagatgttctagctgagagggcctggccctggggtgggctccaggaaaacgctggttaggcctgggattgagctaacctgaaacaaaggtagcaggcaggacctaatgaccagaggttaaatcctcatcaagagagaccaggcggctggaggacaagcggctctaaccctgggggcggccatgttgtccaggcccaggcccctccaggactgtggctgcctcccctccacggcctccagggcggctggctggaaagccacgcgtatgctgccctctacaggctgctcggcctccctgcagctcagcgcagcccagggctccaagtgaggcccagaagcccatgggcagggctggggggacgaagggggaacccggagcacctccacttctagggaagatggacagcgtgggggcacacctgggcctcccggaagctgtggacgaaagggagagcgggtcctccagggcaaggggaacgggaaataggtctcctaggtgcctgaagcgctgagcaacctgggtaccctggtggggatgcagggaaggccggggcagagaaagtgaaggtcgacccagggctgtaggaagccataggagagtgaccacgggattccctgagaaacagggccggccccccaacttcagggacccaccgcccattccccgagagctgtcggaaccagatgcaacccggcagcccagagaactctcctgggaggctgtgggtgagccaggccaacattggtgtccctgtccccagagggaggagcaggcaggagagagaggggaaggaggtatgaatcccagtccccaggaacctagctctttaaactctggggagtcggattcaggaaacacccccaggaggccaagcctgaaaacagaggggagggaggaaggaaggagtcccagcaggagcacagccctggtttcctgtcactcagagctgattcacaggaggaggggaggttggggggcgggagacaaaaaccacacctctttttatataaggtttcatatttaatttggtcatggattcataaatacataagtattttgtacacaa

SEQ ID NO: 60636 - DNA, 3505 bp, Artificial Sequence
  derived and/or modified sequence
gtccttcacctgccttcccataagctggactttggatcccagcccttaaaacccttgtgttgtttcttcctgcagacctggtcgagaacactacttcaggacagggaatagtgacaggccagcagagccccagaggcgaggtggcagtaaacaagaatatgcacgcgcagtggaccacttctgaaggtcaacatataactttctcatccctgacatcaactgtcatccctgtgagcagaaccaactaccaaaggagagaggagcctggagggaacacagagcgatgcaagcctggagaaaaggccccgatggcccccagaagacctcttcagacagcatgtcccgtttaatggattctgacatggattatgaaaggccaaacgtagagaccatcaagtgcgttgtggtgggggacaacgccgtgggtaagaccaggctcatctgtgcccgcgcttgcaatgccaccctcacccagtaccagctgctggccacgcatgtgcccacagtatgggccatcgaccaatatcgtgtgtgccaggaggtgctggaacgctcccgagacgtggtagatgatgtcagcgtctctctgcgcctctgggacacctttggagaccaccacaaagaccgtcgctttgcttatgggagatctgatgtggtggttctgtgcttctccattgccaaccccaattccctccaccatgtcaagaccatgtggtacccagaaatcaagcacttctgcccccgagcacctgtcatcttggtgggctgccagttggacctgcgctacgctgacctggaggctgtcaacagggctaggcgacccttggctaggcccatcaaacctaatgaaatcctgcccccagagaagggtcgggaggtggccaaggagctgggcatcccctactatgagaccagcgtggtggcccagttcggcatcaaggacgtctttgacaacgccatccgagctgcactcatctcccgccgccacctgcagttctggaagtcccacctccgcaatgtgcagcggcctctgctgcaggcacccttcctaccccccaagccaccgcccccgatcatcgtggtgcccgaccctccctccagcagcgaggagtgccccgcccacctcctggaggacccgctctgcgcggacgtcatcctggtgctgcaggagcgggtgcgcatctttgcccacaagatctacctctccacctcttcctccaagttctatgacctgttcctcatggacctgagtgagggggagctggggggcccctcggagccagggggcacccacccagaggaccaccagggccactctgatcaacaccaccaccatcaccaccaccaccatgggcgagacttcctgctccgagcagccagctttgacgtgtgcgagagcgtggatgaggctgggggctccggtcctgctggcctccgtgcttccaccagcgacgggatcttacggggcaacggaacagggtacctaccgggcaggggtcgtgtgctgtcttcctggagccgagcttttgtgagcatccaggaagagatggcagaagatcctctcacctacaaatcccggctgatggtggtggtgaagatggacagttccatccagccggggcccttccgggctgtcctcaagtacctgtacacgggggagctagatgagaacgagcgtgacctcatgcacattgcccacattgctgagctgctcgaggtctttgatctgcgcatgatggtggccaacattctcaacaatgaggccttcatgaaccaggagatcaccaaggccttccacgtccgccggaccaaccgggttaaggagtgcttggcaaaaggcaccttctcagatgtgaccttcatcctggatgatggcaccatcagcgcccacaagcccctgttgatttccagctgtgactggatggctgccatgtttggggggccatttgtggagagctccacccgggaggtggtgtttccctacacaagcaagagctgcatgcgggccgtgctggaatacctctacaccggcatgttcacctccagccccgacctggatgacatgaagctcatcattctagccaaccgcctctgcctgccacacctggttgccctcacagagcagtacacagtgaccgggctgatggaagcgacccagatgatggtggacatcgatggggacgtccttgtgttcctggaactggctcagttccactgtgcgtaccagctggccgactggtgtctccaccacatctgcaccaactacaacaacgtgtgccgcaagttcccccgagacatgaaggccatgtccccagaaaaccaggagtatttcgagaagcatcggtggccacctgtgtggtacctgaaggaggaagatcattaccagcgggcacggaaggagcgtgagaaggaggactacctccacctcaagcggcagcccaaacggcgttggctcttctggaacagtccatcctccccgtcttcctcggcagcctcctcctcatccccatcttcctcctcggctgtggtctgagatgctgccaccctcttctgaccctgctgctgttgtccccatccgccttcacccctctgctcttccgcatcaccccatccaccttacagggaccagggggcccacgtaaccaggacccagagggtggagctcttcttaccagccaccgtggctcagccagagaggagctgagccctgtggagcagaacgggaaccacctgcagaggtccccagacccaaagcaggacgggagacaactgcttggaggagcgaagagccctggcattttatctctgggtttgagagccctagagtcaaagggaaagcctcccagcctccagggcttctctgtgtgtcttggttgctgctctggccagggaggcagccccactcccagcaagcagaagtgatcctcgagggtcctgcccctgttggccatatctttccaccgacggacttgagtgttgcatttgttttgtgggcatttccacacgaagcctactcacaccctcactggagaagtcagggtagaaattgagccttcagagcccaactcaaggcttctacatcctggggtgcagctgcaaaaggccagacgtggaaaggcctgtatcctgccagtgtccctccgtcccagggggctgtgctagcacagacctgagaatggggacacaggtcattcagagctccaggcctggaagcagtgcctcttggtgcaacaagaaacttctccctcaccccctcctttaccctcagatttggagatggtaaccaaaggaagcagctgggacaggtggagaaggaagtaggaatgagtgcacggcgaccccgtgctcctcagggccctcccctgcctctgggtggcactgctttttatagggtggggcaaaattagcaaaaaacaaaaaccaatgacaaccaaactgaaaccgaaacgaaaaatcaacaaacactctgtcctctatccctccaaagaatgaaaatcagaaaaag

SEQ ID NO: 60637 - DNA, 2250 bp, Artificial Sequence
  derived and/or modified sequence
atgcaggcctggagaaagggccccgacggcccccagaagaccagcagcgacagcatgagcagactgatggacagcgacatggactacgagagacccaacgtggagaccatcaagtgcgtggtggtgggcgacaacgccgtgggcaagaccagactgatctgcgccagagcctgcaacgccaccctgacccagtaccagctgctggccacccacgtgcccaccgtgtgggccatcgaccagtacagagtgtgccaggaggtgctggagagaagcagagacgtggtggacgacgtgagcgtgagcctgagactgtgggacaccttcggcgaccaccacaaggacagaagattcgcctacggcagaagcgacgtggtggtgctgtgcttcagcatcgccaaccccaacagcctgcaccacgtgaagaccatgtggtaccccgagatcaagcacttctgccccagagcccccgtgatcctggtgggctgccagctggacctgagatacgccgacctggaggccgtgaacagagccagaagacccctggccagacccatcaagcccaacgagatcctgccccccgagaagggcagagaggtggccaaggagctgggcatcccctactacgagaccagcgtggtggcccagttcggcatcaaggacgtgttcgacaacgccatcagagccgccctgatcagcagaagacacctgcagttctggaagagccacctgagaaacgtgcagagacccctgctgcaggcccccttcctgccccccaagccccccccccccatcatcgtggtgcccgacccccccagcagcagcgaggagtgccccgcccacctgctggaggaccccctgtgcgccgacgtgatcctggtgctgcaggagagagtgagaatcttcgcccacaagatctacctgagcaccagcagcagcaagttctacgacctgttcctgatggacctgagcgagggcgagctgggcggccccagcgagcccggcggcacccaccccgaggaccaccagggccacagcgaccagcaccaccaccaccaccaccaccaccacggcagagacttcctgctgagagccgccagcttcgacgtgtgcgagagcgtggacgaggccggcggcagcggccccgccggcctgagagccagcaccagcgacggcatcctgagaggcaacggcaccggctacctgcccggcagaggcagagtgctgagcagctggagcagagccttcgtgagcatccaggaggagatggccgaggaccccctgacctacaagagcagactgatggtggtggtgaagatggacagcagcatccagcccggccccttcagagccgtgctgaagtacctgtacaccggcgagctggacgagaacgagagagacctgatgcacatcgcccacatcgccgagctgctggaggtgttcgacctgagaatgatggtggccaacatcctgaacaacgaggccttcatgaaccaggagatcaccaaggccttccacgtgagaagaaccaacagagtgaaggagtgcctggccaagggcaccttcagcgacgtgaccttcatcctggacgacggcaccatcagcgcccacaagcccctgctgatcagcagctgcgactggatggccgccatgttcggcggccccttcgtggagagcagcaccagagaggtggtgttcccctacaccagcaagagctgcatgagagccgtgctggagtacctgtacaccggcatgttcaccagcagccccgacctggacgacatgaagctgatcatcctggccaacagactgtgcctgccccacctggtggccctgaccgagcagtacaccgtgaccggcctgatggaggccacccagatgatggtggacatcgacggcgacgtgctggtgttcctggagctggcccagttccactgcgcctaccagctggccgactggtgcctgcaccacatctgcaccaactacaacaacgtgtgcagaaagttccccagagacatgaaggccatgagccccgagaaccaggagtacttcgagaagcacagatggccccccgtgtggtacctgaaggaggaggaccactaccagagagccagaaaggagagagagaaggaggactacctgcacctgaagagacagcccaagagaagatggctgttctggaacagccccagcagccccagcagcagcgccgccagcagcagcagccccagcagcagcagcgccgtggtgtag

SEQ ID NO: 60638 - protein, 734 aa, Artificial Sequence
  derived and/or modified sequence
MKARSRLMDSDMDYERPNVETIKCVVVGDNAVGKTRLICARACNATLTQYQLLATHVPTVWAIDQYRVCQEVLERSRDVVDDVSVSLRLWDTFGDHHKDRRFAYGRSDVVVLCFSIANPNSLHHVKTMWYPEIKHFCPRAPVILVGCQLDLRYADLEAVNRARRPLARPIKPNEILPPEKGREVAKELGIPYYETSVVAQFGIKDVFDNAIRAALISRRHLQFWKSHLRNVQRPLLQAPFLPPKPPPPIIVVPDPPSSSEECPAHLLEDPLCADVILVLQERVRIFAHKIYLSTSSSKFYDLFLMDLSEGELGGPSEPGGTHPEDHQGHSDQHHHHHHHHHGRDFLLRAASFDVCESVDEAGGSGPAGLRASTSDGILRGNGTGYLPGRGRVLSSWSRAFVSIQEEMAEDPLTYKSRLMVVVKMDSSIQPGPFRAVLKYLYTGELDENERDLMHIAHIAELLEVFDLRMMVANILNNEAFMNQEITKAFHVRRTNRVKECLAKGTFSDVTFILDDGTISAHKPLLISSCDWMAAMFGGPFVESSTREVVFPYTSKSCMRAVLEYLYTGMFTSSPDLDDMKLIILANRLCLPHLVALTEQYTVTGLMEATQMMVDIDGDVLVFLELAQFHCAYQLADWCLHHICTNYNNVCRKFPRDMKAMSPENQEYFEKHRWPPVWYLKEEDHYQRARKEREKEDYLHLKRQPKRRWLFWNSPSSPSSSAASSSSPSSSSAVV

SEQ ID NO: 60639 - DNA, 2184 bp, Artificial Sequence
  derived and/or modified sequence
atggacagcgatatggactatgaaagaccaaatgtggagactattaaatgcgtcgtggtcggggataacgcagtcgggaaaacacgcttgatatgtgcaagggcttgtaacgctacattgacgcagtatcagctcttagctacccacgtcccaactgtgtgggctattgaccagtatcgcgtctgtcaggaggtgctggagagaagcagggatgtcgtcgatgacgtgtccgtgagccttcggctgtgggataccttcggggaccatcacaaggacaggcgctttgcctacggccggtctgacgtcgtggttttatgtttcagcattgcaaaccctaatagcctgcaccacgttaagaccatgtggtaccctgagattaaacacttctgtccgcgcgcccccgtcatacttgtaggatgccagctggacttgaggtatgccgacctggaggccgtgaacagagcccgaaggcccttggccagacctattaaaccaaatgagatccttccccccgagaaggggagagaggttgcgaaagagttgggcattccatactatgagacaagcgtagtcgcgcaatttggcattaaggacgtcttcgataatgctattagggccgctttaatttcgcggcggcaccttcagttctggaagagtcatctgagaaacgtgcagaggcccctgctgcaagcaccctttctcccccccaaaccccccccaccaataatagtcgtgcccgaccccccatcctcgtccgaagagtgcccagcgcacttgcttgaggaccctctatgtgccgacgtgattctggtcttgcaggagagagtacggatttttgctcataaaatttatctgtccacatcctcaagtaaattctacgatttattcctgatggacctgagcgagggtgagctgggcggccccagtgaacctgggggtacccacccagaggatcaccaggggcactccgaccagcatcatcatcaccaccaccaccaccatgggcgcgactttcttttacgggccgcgtcctttgacgtctgtgagtcagttgatgaagcaggcgggtcaggtcctgccggattgagagccagcacctccgacggaatcttgcgggggaatggcactggataccttccaggaagaggcagggtgctcagcagctggagtcgagcttttgtttcaatccaggaagagatggctgaggatccgttgacttacaaatcacgccttatggtggtcgtcaagatggactcatccatccaacccgggcctttccgcgctgtgctgaaatacttatacactggagaactggacgaaaatgagcgcgatttgatgcacatagcacatatcgctgagctgcttgaagttttcgatctgcggatgatggtcgcgaacatccttaataatgaagcattcatgaatcaagagataacaaaagcattccacgtgcgcagaactaaccgtgtgaaagaatgcttagccaagggcaccttttcagacgtgacttttatcctcgacgatgggacgattagtgctcacaagcccctgctaatttcttcttgtgactggatggcagcaatgtttgggggcccattcgttgaatctagtactcgagaggtcgtctttccctacacctctaagagttgtatgagagcagtgctggagtacctgtataccggaatgttcacttcaagtcccgatctggacgacatgaaattgatcatcctggcaaatcggctttgcttgccgcatttagtcgccctcacagaacagtacaccgtcaccgggctgatggaagctactcagatgatggtcgacatcgatggcgacgtgctggtcttcttggagttggcacaatttcattgcgcttaccaactggctgactggtgtcttcaccatatctgcacaaactataataacgtctgtcgtaagttcccccgcgatatgaaagcaatgagtccggaaaaccaggagtattttgaaaaacaccgctggccccccgtttggtacctgaaggaggaggatcactaccagcgagcacgtaaggagcgcgagaaggaagattacttgcatttaaagcgacaacctaagcgacgttggttgttctggaactcaccctctagccctagcagtagcgccgcctcttctagttccccaagttcctcaagcgcagtcgtatag

SEQ ID NO: 60640 - DNA, 2205 bp, Artificial Sequence
  derived and/or modified sequence
atgaaagcccggagcaggttgatggactccgatatggattacgaaagacccaacgtggagactattaagtgcgttgtggtcggagacaatgctgtgggaaaaacgcgcctgatatgcgcacgagcctgcaacgccacattaactcagtaccagttgcttgctacacacgtgcccacagtttgggccattgatcagtaccgggtctgtcaggaagttctggagcgatcgcgggacgtggtggatgatgtcagcgtttcactccgtctatgggacactttcggagaccaccacaaagatcggagattcgcttatggacgctcagacgtcgttgtcttgtgtttcagcattgctaatccaaatagcctgcatcatgtgaagactatgtggtatcctgaaattaagcacttctgccctcgcgcccctgtgatactggtaggatgtcaattagatctgcgttacgccgatttggaggcagtaaacagagcgcgacggccgctcgcccggccaattaagcccaatgagatccttccacctgagaaagggagagaggtcgccaaggagctcggcatcccttactacgagacctcggtggtagcgcagtttggtatcaaggatgttttcgacaacgccatccgggctgcactgatttcgcggcggcaccttcagttttggaagagtcatctgcgcaacgttcagaggcccctcttacaggccccatttctgccacctaagccgccccctcccatcatcgtggtgccagacccccctagttcctcagaagaatgtcccgctcacctactcgaggaccccctctgcgcggacgtcatcctcgttctgcaggaacgcgtgagaatattcgcacacaagatctacctgtctacttcttcatccaagttctacgacctcttcctgatggacctgagcgagggagagctgggcggtccaagcgaacccgggggcactcacccggaagatcaccaaggacactctgaccagcatcaccaccaccatcatcaccaccatggacgtgattttttgctgagggcagcatccttcgacgtgtgtgaatcagtggacgaggcgggggggagtggacccgctggtcttagggcaagcacgtctgatggcatcctgcgagggaatggcacaggctatctgccaggtagagggcgcgtgctcagttcctggagtagggcctttgtctccatccaggaggagatggcggaggaccctctgacgtataaatcccggctgatggtggtcgtcaaaatggactcctcaattcaaccggggcccttccgggccgtcctcaagtacttatatacgggtgaactggacgaaaatgaacgggacctaatgcatatcgctcatattgccgaacttctggaggtgttcgatctgaggatgatggtggccaacattcttaacaacgaggcttttatgaaccaagagatcacaaaggcctttcatgtgcgccggactaatcgcgtgaaggaatgcctggccaaggggaccttctccgacgtcacattcatcctcgacgacggtaccatcagtgcccacaagcctttgttgatcagctcctgtgattggatggccgcaatgtttggcggcccctttgtggaaagtagtacccgcgaagtggtgtttccgtacacgtcaaagtcatgtatgcgcgcagtgcttgagtacctctacacagggatgttcacaagttctcctgatctagacgatatgaaactcattattttagccaaccgcctgtgcctgccccatctcgtggcacttaccgaacaatacacagtcaccgggctcatggaggccacccagatgatggtcgacatcgatggggacgttctggtgttcttagaactggcacaatttcattgtgcctatcagctggctgactggtgtctccaccacatttgtactaactacaacaatgtctgtagaaagtttcctagagacatgaaagcgatgtctcccgagaaccaggagtattttgaaaagcatcggtggccgcctgtctggtatcttaaggaagaagatcattatcagagggcacgcaaggagagggagaaagaggactacttgcacctcaaacgtcagcctaaaagaaggtggttgttttggaatagccctagctccccgtcatcaagcgcggcgtctagttcatctccctcgagcagttctgccgtcgtatag

SEQ ID NO: 60641 - DNA, 2184 bp, Artificial Sequence
  derived and/or modified sequence
atggacagcgacatggactatgagcggcccaacgtggagaccatcaagtgtgtggtggtgggggacaatgctgtgggcaagaccaggctcatctgtgcccgggcctgcaatgccaccctgacccagtaccagctgctggccacccacgtgcccaccgtgtgggccatcgaccagtacagagtgtgccaggaggtgctggagaggagcagagatgtggtggatgatgtgtctgtgtccctgcggctgtgggacaccttcggggaccaccacaaggacagaagatttgcctacggccgcagtgatgtggtggtgctgtgcttcagcatcgccaaccccaacagcctgcaccacgtgaagaccatgtggtacccagagatcaagcacttctgcccccgggcccctgtgatcctggtgggctgccagctggacctgcgctatgctgacctggaggccgtgaacagagcccggcggcccctggcccggcccatcaagcccaatgagatcctgcccccagagaagggccgggaggtggccaaggagctgggcatcccctactatgagacctctgtggtggcccagtttggcatcaaggatgtgtttgacaatgccatccgggccgccctgatcagcagaagacacctgcagttctggaagagccacctgagaaatgtgcagaggcccctgctgcaggcccccttcctgccccccaagcccccaccacccatcatcgtggtgcctgacccccccagcagcagcgaggagtgcccagcccacctgctggaggaccccctgtgtgctgatgtgatcctggtgctgcaggagcgggtgcgcatctttgcccacaagatctacctgagcaccagcagcagcaagttctatgacctcttcctgatggacctgtctgagggggagctgggcggccccagcgagcccggcggcacccaccctgaggaccaccagggccacagcgaccagcaccaccaccaccaccaccaccaccacggccgggacttcctgctgcgggccgccagctttgatgtgtgtgagagcgtggatgaggccggcggcagcggccctgctggcctgcgggccagcaccagtgatggcatcctgcggggaaatggcaccggctacctgcccggccggggccgggtgctgagctcctggagccgggcctttgtgtccatccaggaggagatggccgaggaccccctgacctacaagagccggctgatggtggtggtgaagatggacagcagcatccagcccggccccttccgggctgtgctgaagtacctgtacacaggagagctggatgaaaatgaaagagacctgatgcacatcgcccacatcgccgagctgctggaggtgtttgacctgaggatgatggtggccaacatcctgaacaatgaggccttcatgaaccaggagatcaccaaggccttccacgtgcggaggaccaacagagtgaaggagtgcctggccaagggcaccttcagtgatgtgaccttcatcctggatgatggcaccatcagcgcccacaagcccctgctgatcagcagctgtgactggatggccgccatgtttggaggcccctttgtggagagcagcacccgggaggtggtgttcccctacaccagcaagagctgcatgagagctgtgctggagtacctgtacacaggcatgttcaccagcagcccagacctggatgacatgaagctgatcatcctggccaaccggctgtgcctgccccacctggtggccctgacagagcagtacacagtgacaggcctgatggaggccacccagatgatggtggacattgatggagatgtgctggtgttcctggagctggcccagttccactgtgcctaccagctggccgactggtgcctgcaccacatctgcaccaactacaacaacgtgtgcaggaagttcccccgggacatgaaggccatgagccctgagaaccaggagtactttgagaagcaccgctggccccctgtgtggtacctgaaggaggaggaccactaccagagggccaggaaggagcgggagaaggaggactacctgcacctgaagaggcagcccaagaggcgctggctgttctggaacagccccagcagccccagcagcagcgctgccagcagcagcagccccagcagcagcagcgctgtggtgtag

SEQ ID NO: 60642 - DNA, 2205 bp, Artificial Sequence
  derived and/or modified sequence
atgaaggcccggagccggctgatggacagcgacatggactatgaaagacccaacgtggagaccatcaagtgtgtggtggtgggggacaatgctgtgggcaagaccaggctcatctgtgcccgggcctgcaatgccaccctgacccagtaccagctgctggccacccacgtgcccaccgtgtgggccatcgaccagtacagagtgtgccaggaggtgctggagaggagcagagatgtggtggatgatgtgtctgtgtccctgcggctgtgggacacctttggagaccaccacaaggacagaagatttgcctacggccgcagtgatgtggtggtgctgtgcttcagcatcgccaaccccaacagcctgcaccacgtgaagaccatgtggtacccagagatcaagcacttctgcccccgggcccctgtgatcctggtgggctgccagctggacctgcgctatgctgacctggaggccgtgaacagagcccggcggcccctggcccggcccatcaagcccaatgagatcctgcccccagagaagggccgggaggtggccaaggagctgggcatcccctactatgagacctctgtggtggcccagtttggcatcaaggatgtgtttgacaatgccatccgggccgccctgatcagccgccgccacctgcagttctggaagagccacctgagaaatgtgcagaggcccctgctgcaggcccccttcctgccccccaagcccccaccacccatcatcgtggtgcctgacccccccagcagcagtgaagaatgtcctgcccacctgctggaggaccccctgtgtgctgatgtgatcctggtgctgcaggagcgggtgcgcatctttgcccacaagatctacctgagcaccagcagcagcaagttctatgacctcttcctgatggacctgtctgagggggagctgggcggccccagcgagcccggcggcacccaccctgaggaccaccagggccacagcgaccagcaccaccaccaccaccaccaccaccacggccgggacttcctgctgcgggccgccagctttgatgtgtgtgagagcgtggatgaagctgggggcagcggccctgctggcctgcgggccagcaccagtgatggcatcctgcggggaaatggaacaggctacctgcccggccggggccgggtgctgagctcctggagccgggcctttgtgtccatccaggaggagatggccgaggaccccctgacctacaagagccggctgatggtggtggtgaagatggacagcagcatccagcccggccccttccgggctgtgctgaagtacctgtacaccggggagctggatgaaaatgaaagagacctgatgcacatcgcccacatcgccgagctgctggaggtgtttgacctgaggatgatggtggccaacatcctgaacaatgaggccttcatgaaccaggagatcaccaaggccttccacgtgcggaggaccaacagagtgaaggaatgtctggccaagggcaccttcagtgatgtgaccttcatcctggatgatggcaccatcagcgcccacaagcccctgctgatcagcagctgtgactggatggccgccatgtttggaggcccctttgtggagagcagcacccgggaggtggtgttcccctacaccagcaagagctgcatgagagctgtgctggagtacctgtacacaggcatgttcaccagcagcccagacctggatgacatgaagctgatcatcctggccaaccggctgtgcctgccccacctggtggccctgacagagcagtacacagtgacaggcctgatggaggccacccagatgatggtggacattgatggagatgtgctggtgttcctggagctggcccagttccactgtgcctaccagctggccgactggtgcctgcaccacatctgcaccaactacaacaacgtgtgcaggaagttcccccgggacatgaaggccatgagccctgagaaccaggagtactttgagaagcaccgctggccccctgtgtggtacctgaaggaggaggaccactaccagagggccaggaaggagcgggagaaggaggactacctgcacctgaagaggcagcccaagaggcgctggctgttctggaacagccccagcagccccagcagcagcgctgccagcagcagcagccccagcagcagcagcgctgtggtgtag

SEQ ID NO: 60643 - DNA, 2184 bp, Artificial Sequence
  derived and/or modified sequence
atggacagcgacatggactacgagcggcccaacgtggagaccatcaagtgcgtcgttgttggagataacgccgtgggtaaaacccggctaatctgcgcccgcgcatgcaatgccacgcttactcagtaccaactgcttgcaacacacgttccaacagtgtgggccatcgaccagtatcgagtctgtcaggaagtattagagcggagccgggacgttgtcgatgacgtatcagtgtccctccgcctttgggacacttttggtgaccatcataaggacaggcgctttgcgtatggacgctccgacgtcgtggttctttgcttcagtatcgccaaccctaactctctccaccacgttaagaccatgtggtacccagaaatcaagcatttttgtccccgagctcccgtgatactggtgggatgccaattggatttgcggtacgcagatcttgaagccgtaaatagagcaaggcgtcctctagcaaggccaatcaagcccaatgaaatcttgccacccgaaaaaggtcgggaggtggccaaggagctggggatcccatactatgagacatcagtcgtggctcagttcggaattaaagacgtgtttgataacgccattcgggccgcgctaatctcccgccggcaccttcagttctggaagtcccatttacggaatgttcaacgccccctccttcaagcgccttttctgcctcctaaaccgccccctcctattatcgtagtgcctgaccctccaagtagtagcgaagagtgcccagcacatctgttggaggatccactgtgtgctgacgtcatcctggtcctgcaggagcgtgttcggatcttcgcccacaagatctacctgtccacctcctctagcaagttttacgatctgtttctcatggacctcagcgagggcgaactgggtggcccatctgagcctggcggcacacatccagaagatcaccaggggcactctgaccagcatcaccaccatcaccaccaccatcacggaagggatttcttgctccgcgcggctagttttgatgtgtgtgaatccgtcgatgaggctggaggcagcgggcctgccggtctgcgagcttctacgtccgacggtatcctcaggggcaatggcaccggatatctgcccggacgaggtcgggtcctgagtagctggtcgcgggcgtttgtatccatccaggaggaaatggccgaagatccattaacgtacaagagccgcctgatggtggttgtcaagatggacagctcaatccagccaggaccgtttagagctgtgttaaagtacctctacacaggtgagctcgatgagaatgagcgggatcttatgcacattgcacacatcgctgaattactggaggtgtttgacctgaggatgatggtggctaacattttgaataacgaggctttcatgaatcaggagattacaaaggccttccacgttcggcggacaaaccgggtgaaggagtgtctggctaagggcacatttagcgatgtcacatttattcttgacgatggcacaatcagcgcccataagcctctgttgatttcgagctgtgactggatggcagccatgttcggcggccctttcgtcgagtcttcaactcgtgaggtcgtgttcccgtatacatcaaaatcctgcatgcgtgcagtgttagagtacctctataccggcatgttcacatccagtccggacttggacgatatgaagctcattatcctcgctaatcgattgtgtctaccccatttggtcgccctaacggagcagtacactgtgacagggttgatggaggctactcagatgatggtggacattgatggcgatgtactggtcttcctcgaactggcacagtttcactgtgcctaccagctcgccgattggtgccttcaccacatctgcacaaactacaataacgtatgcaggaaatttccgagggatatgaaggccatgtcccctgaaaatcaggaatatttcgaaaagcatcgttggcctcctgtctggtacctgaaggaggaagaccattaccagagggctaggaaggaacgtgaaaaagaggattacctgcatttaaagagacagcccaagcgcaggtggctgttctggaacagtccttcgtcccccagcagctcggccgccagttcctccagtccatcaagtagctccgctgttgtttag

SEQ ID NO: 60644 - DNA, 2205 bp, Artificial Sequence
  derived and/or modified sequence
atgaaggcccggagccggctgatggacagcgacatggactacgagcgtcctaatgttgagaccatcaaatgcgtggtcgttggagataacgctgtggggaaaacccggctgatttgcgctagggcttgcaatgcaacactcacccagtaccagctcctggcaacccacgtgcccactgtgtgggccatcgatcagtaccgggtctgccaggaggtgctggaacgctctagagacgtagttgatgatgttagcgtgtccctgcggctgtgggacacttttggtgaccatcacaaagatcgtcgcttcgcatatggacgatccgacgttgtagtactatgttttagtatcgccaacccaaactctctgcaccacgtaaagacaatgtggtacccagaaatcaaacacttttgcccaagagctcccgtcatcttggtcgggtgtcagctcgatttgcgctacgcagacttggaggccgtgaaccgcgcacgcaggccactggccagaccgattaaacccaatgagattctgccacctgagaaggggcgagaggttgccaaggaattggggatcccttattacgaaacaagcgtcgtggctcagttcgggattaaggatgtattcgacaacgctatccgggccgccctgatttcccgtcggcatctgcagttctggaagtctcatcttcggaatgtgcagcggcccctccttcaagcaccttttctgccccccaagcctccccctcccatcatcgtcgttccggaccctccgtccagttctgaggagtgcccagcacatttattagaagaccccctctgcgcggacgtgatactggtcctgcaggaaagagtacgcatctttgctcataagatttatttatccacctcctcttctaagttttatgatctctttctcatggatctgtctgagggggagctgggggggccctctgaacccggcgggacacaccctgaggaccaccagggccactccgatcagcaccatcatcaccaccatcaccaccacgggagggactttttgctgcgagcggcttccttcgacgtttgtgagagcgtggacgaagcagggggatccggcccagctggtctaagagccagcacctctgatgggatcctgcgcggtaatggcacggggtatctgcccggccgcgggcgggttctcagctcatggtcgcgtgccttcgtgagcatacaggaagaaatggcggaagacccactgacttacaagtctcgcttaatggtggtagtcaagatggacagcagcattcagcccggcccctttagggccgtactcaagtacctgtacaccggtgaactcgatgaaaatgaaagagacctgatgcatatcgcacacatcgccgaactacttgaagtgtttgacctgcggatgatggtagccaacatactgaacaatgaggcatttatgaatcaggagatcaccaaggccttccatgttcggaggaccaacagagttaaggaatgtttggccaagggtacatttagtgatgttacattcatacttgatgacgggactatctcagcacacaaaccgcttttgatctctagttgcgactggatggctgccatgttcggggggcccttcgtcgaatcctccactcgggaggtagtttttccatacacctccaagagttgtatgcgcgccgttttagagtacctgtataccggcatgttcacatcctcaccagacctggatgacatgaagctgatcattctcgccaatcggttgtgtttgcctcatctggtggccttgacagaacagtataccgttacaggactaatggaagccacccaaatgatggtcgatattgatggagacgtccttgttttcctagagctggcccagttccactgcgcctaccaactagctgattggtgtctgcatcacatatgtactaactataataatgtgtgccggaaattccccagagacatgaaagccatgtcccccgagaatcaggaatactttgagaagcacagatggccccccgtctggtatcttaaggaagaggaccattaccagagagccaggaaggagagagagaaggaagactatctgcatctcaaaagacagcccaagagaagatggctgttttggaactctccctcttcgcccagcagcagcgccgcctctagcagctcgccttcaagttcgtcagcagttgtgtag

SEQ ID NO: 60645 - DNA, 2184 bp, Artificial Sequence
  derived and/or modified sequence
atggactctgatatggattatgagcggccaaatgtggaaaccatcaagtgcgtagtcgtgggtgacaatgcagtaggcaaaactcgcctcatttgcgctagagcttgtaatgctacacttacccaataccagctgctcgctacgcacgttccgacagtctgggccattgaccagtatcgggtgtgccaagaagtgctggaaagaagtcgtgatgttgttgacgacgtgtccgtatcacttcgactgtgggacacttttggtgatcaccacaaggacagaaggttcgcttacggcagaagcgacgtggtagtgctgtgtttcagtattgctaaccccaactcattgcatcacgtgaagactatgtggtaccccgaaattaagcacttctgccctagagcccctgtcatactcgtcgggtgccagcttgatctcaggtatgctgatctggaggccgtcaatcgggcaaggagacccctggctcgtcctattaagcctaatgagatcctcccaccagaaaaggggagagaggtggcgaaggagctggggatcccatattacgaaacctccgtcgtggctcagttcggaatcaaggacgtcttcgacaatgcaatccgagctgcccttatatcccgcagacacctgcagttctggaagtcccatttgaggaacgtgcaaaggcctcttctgcaggctcccttcttacccccaaaacctcctcctccgatcatcgttgtccccgacccaccatcctcttcggaggaatgcccagctcacctgctggaagatcccctctgcgccgacgttatactggtgctgcaagagcgcgtcagaatcttcgcccataaaatttacctgagcacttcgtccagtaaattctacgacctctttctgatggatctcagcgagggagagctaggcggaccttccgagcctggcggtacgcatccggaagatcaccagggccacagtgatcaacaccaccatcatcaccaccaccatcacggcagagacttcctgttgagagccgcttcattcgacgtatgtgaatctgtcgacgaggccggagggagcggacccgcaggcctccgagcaagcacctctgacggtattctgcgagggaatgggaccgggtaccttcctggacggggtcgagtattatcttcatggagccgcgctttcgtgagcatccaggaggaaatggctgaagatccgcttacctataagagccgcctcatggtcgtggtgaagatggactcatccatacaacctggacccttccgcgcagtcctgaagtacttgtacactggagaactggatgaaaatgaacgggacttgatgcacattgctcacatagccgagcttcttgaagtgttcgacctgcgcatgatggttgcgaatattctcaacaacgaggcatttatgaaccaggagatcacgaaggcatttcatgtgcgtagaacgaaccgggtcaaagaatgtctcgccaagggtacattcagcgacgtcacctttatacttgatgatgggaccatatccgcccataagccactgttgatctcatcttgcgactggatggccgctatgttcgggggaccgttcgtcgagtcatccacccgcgaggtggtgttcccatacacctctaaatcctgcatgcgggctgttctcgagtacctgtacaccggcatgtttacgtccagtcctgacttggacgatatgaaacttattatattagccaaccgcctgtgtctcccccacttagtggctcttactgagcagtacacggtgaccggcctaatggaagccactcagatgatggtcgatatagatggcgatgtgttggtttttttggagctggcgcaatttcactgtgcataccagctcgccgactggtgtctgcaccacatctgtaccaactacaataatgtatgtcggaaattccctcgtgacatgaaagccatgtcgccagagaatcaggagtatttcgaaaagcacagatggccacccgtctggtacctgaaagaggaagaccactatcagcgcgctagaaaggagcgcgaaaaagaggattacctgcacttgaagaggcagcctaagcggagatggttgttttggaacagccccagtagccctagcagctcggcagcgtctagcagcagccccagttcatccagtgcggttgtgtag

SEQ ID NO: 60646 - DNA, 2205 bp, Artificial Sequence
  derived and/or modified sequence
atgaaggccaggagcaggctaatggattcagacatggactacgagaggccaaacgtggagacaatcaaatgcgtggtagtcggtgacaatgccgttggcaaaacaagactgatctgtgcccgagcatgtaatgctacacttacccaatatcagctccttgccacccatgtgcctacagtgtgggccatagatcagtaccgagtgtgccaggaagttcttgagcggagcagggatgtcgtcgatgacgtgtctgtcagtcttagactgtgggataccttcggagatcatcacaaagacaggagattcgcatacggtcggagtgacgttgtggtcctctgctttagcatagccaatcccaactccctgcaccacgttaaaactatgtggtaccctgagatcaagcatttttgcccaagagcacctgtgatcctcgtgggctgccaactcgacctgagatatgcagatctggaggccgttaaccgcgctcggaggccgctggcaaggcccataaaaccaaacgaaattctgcctcctgagaaggggagagaggtggccaaagaactcggcatcccctactacgagacaagcgtggtcgcccagttcggcatcaaggacgtgtttgacaacgcaatccgcgcagcattgattagtcgccgacatctgcaattctggaagtctcacctcagaaatgtgcagcggcctttactccaagcgccttttcttcccccaaagcccccaccgccaattatagtggtgcccgacccaccgagttcctcggaggagtgccctgcacacttactcgaagaccctctttgtgcagatgtgatcctggtacttcaagaaagagtaaggattttcgctcataaaatatacctctctacctcgagcagcaagttttacgacctgttcctcatggacctctctgagggcgaactcggcggacccagtgagccaggcggtactcaccccgaggaccaccagggccatagtgaccagcatcatcaccaccaccatcaccatcacggcagggactttctgctccgagccgcatcatttgacgtctgcgagagcgtggatgaggccggaggatctggccctgctggactgagagcatcgacaagtgatggaatcctgcgcggaaacggcaccggatatctccccggtagagggagagtactctccagctggtcacgcgctttcgtaagcattcaggaggagatggctgaggatcctctgacctataagtcacggctcatggtagtagtgaagatggactcatccatccaaccaggcccattccgcgcagtgctcaaatatttgtataccggtgaactggatgagaacgagagggaccttatgcacattgctcacatcgccgagctgctcgaggttttcgatttgcgaatgatggtggctaacattctgaataacgaggcctttatgaatcaggaaataaccaaggcatttcatgttagacggacgaatagggtgaaagagtgcctggctaagggaaccttctccgatgttacatttatactcgatgacggcacaatttcagcgcataagccgcttctgatctctagctgtgattggatggctgcaatgtttggaggcccatttgttgaatcctccacacgcgaggtcgtgttcccctacacctctaaaagctgcatgcgagccgtgctggagtatctgtatacaggcatgttcaccagctcaccagatctcgacgacatgaagctcatcatactggcgaatcggctatgccttccgcacttggtggccctgacggagcagtacactgtgacgggtctgatggaggcaacccagatgatggtggatattgatggggacgtcctcgtttttctggaacttgcgcagttccattgtgcctatcagctcgctgactggtgcctccatcatatctgtacaaactacaataacgtgtgccgcaagttcccccgagacatgaaagccatgtcacctgagaatcaagaatatttcgagaagcacaggtggcccccagtatggtacctaaaagaggaggatcattaccagcgcgcacggaaagagagggagaaggaggattacttacaccttaagcgccagcccaaacggcgatggctgttctggaactctccctcttcacctagctcctctgccgctagcagcagttctccaagtagtagctctgcagtagtgtag

SEQ ID NO: 60647 - DNA, 4959 bp, Artificial Sequence
  derived and/or modified sequence
agaggctgtagtgttccaggagaggggtgccatgaaagcgcggtcccgtttaatggattctgacatggattatgaaaggccaaacgtagagaccatcaagtgcgttgtggtgggggacaacgccgtgggtaagaccaggctcatctgtgcccgcgcttgcaatgccaccctcacccagtaccagctgctggccacgcatgtgcccacagtatgggccatcgaccaatatcgtgtgtgccaggaggtgctggaacgctcccgagacgtggtagatgatgtcagcgtctctctgcgcctctgggacacctttggagaccaccacaaagaccgtcgctttgcttatgggagatctgatgtggtggttctgtgcttctccattgccaaccccaattccctccaccatgtcaagaccatgtggtacccagaaatcaagcacttctgcccccgagcacctgtcatcttggtgggctgccagttggacctgcgctacgctgacctggaggctgtcaacagggctaggcgacccttggctaggcccatcaaacctaatgaaatcctgcccccagagaagggtcgggaggtggccaaggagctgggcatcccctactatgagaccagcgtggtggcccagttcggcatcaaggacgtctttgacaacgccatccgagctgcactcatctcccgccgccacctgcagttctggaagtcccacctccgcaatgtgcagcggcctctgctgcaggcacccttcctaccccccaagccaccgcccccgatcatcgtggtgcccgaccctccctccagcagcgaggagtgccccgcccacctcctggaggacccgctctgcgcggacgtcatcctggtgctgcaggagcgggtgcgcatctttgcccacaagatctacctctccacctcttcctccaagttctatgacctgttcctcatggacctgagtgagggggagctggggggcccctcggagccagggggcacccacccagaggaccaccagggccactctgatcaacaccaccaccatcaccaccaccaccatgggcgagacttcctgctccgagcagccagctttgacgtgtgcgagagcgtggatgaggctgggggctccggtcctgctggcctccgtgcttccaccagcgacgggatcttacggggcaacggaacagggtacctaccgggcaggggtcgtgtgctgtcttcctggagccgagcttttgtgagcatccaggaagagatggcagaagatcctctcacctacaaatcccggctgatggtggtggtgaagatggacagttccatccagccggggcccttccgggctgtcctcaagtacctgtacacgggggagctagatgagaacgagcgtgacctcatgcacattgcccacattgctgagctgctcgaggtctttgatctgcgcatgatggtggccaacattctcaacaatgaggccttcatgaaccaggagatcaccaaggccttccacgtccgccggaccaaccgggttaaggagtgcttggcaaaaggcaccttctcagatgtgaccttcatcctggatgatggcaccatcagcgcccacaagcccctgttgatttccagctgtgactggatggctgccatgtttggggggccatttgtggagagctccacccgggaggtggtgtttccctacacaagcaagagctgcatgcgggccgtgctggaatacctctacaccggcatgttcacctccagccccgacctggatgacatgaagctcatcattctagccaaccgcctctgcctgccacacctggttgccctcacagagcagtacacagtgaccgggctgatggaagcgacccagatgatggtggacatcgatggggacgtccttgtgttcctggaactggctcagttccactgtgcgtaccagctggccgactggtgtctccaccacatctgcaccaactacaacaacgtgtgccgcaagttcccccgagacatgaaggccatgtccccagaaaaccaggagtatttcgagaagcatcggtggccacctgtgtggtacctgaaggaggaagatcattaccagcgggcacggaaggagcgtgagaaggaggactacctccacctcaagcggcagcccaaacggcgttggctcttctggaacagtccatcctccccgtcttcctcggcagcctcctcctcatccccatcttcctcctcggctgtggtctgagatgctgccaccctcttctgaccctgctgctgttgtccccatccgccttcacccctctgctcttccgcatcaccccatccaccttacagggaccagggggcccacgtaaccaggacccagagggtggagctcttcttaccagccaccgtggctcagccagagaggagctgagccctgtggagcagaacgggaaccacctgcagaggtccccagacccaaagcaggacgggagacaactgcttggaggagcgaagagccctggcattttatctctgggtttgagagccctagagtcaaagggaaagcctcccagcctccagggcttctctgtgtgtcttggttgctgctctggccagggaggcagccccactcccagcaagcagaagtgatcctcgagggtcctgcccctgttggccatatctttccaccgacggacttgagtgttgcatttgttttgtgggcatttccacacgaagcctactcacaccctcactggagaagtcagggtagaaattgagccttcagagcccaactcaaggcttctacatcctggggtgcagctgcaaaaggccagacgtggaaaggcctgtatcctgccagtgtccctccgtcccagggggctgtgctagcacagacctgagaatggggacacaggtcattcagagctccaggcctggaagcagtgcctcttggtgcaacaagaaacttctccctcaccccctcctttaccctcagatttggagatggtaaccaaaggaagcagctgggacaggtggagaaggaagtaggaatgagtgcacggcgaccccgtgctcctcagggccctcccctgcctctgggtggcactgctttttatagggtggggcaaaattagcaaaaaacaaaaaccaatgacaaccaaactgaaaccgaaacgaaaaatcaacaaacactctgtcctctatccctccaaagaatgaaaatcagaaaaagcccctgcctagctcacatttctataaacagaggcccccatgatgaggaggtgaagatttaggttgcagaatcgactccaatgcctttcaggaaaggactcggcacttctctgactgcggaggccctgaccctgccagctggctccgagggcaacacaggggcctggcctctagagggctggtgattgaggggcccgggctggcggcaaagaggggtttggtctcggggcttaaatggcaccagactcttgcttttgcccatctggagactgcaggctcccttccttaccctcagagagtgcttatggtgggtgtttttgcggggctgcaataggggccaaaagtcagggaaaggggcactgacctgtagtgaaaggccacaggacacagccttattactgctggggtgggataaggggaaggagaagagggagaatggagcaggaggaaaagcagagttggtctagagaggaggagggcggggctggaggaatgtgggggattgaaactagctcccagcccccatggggcagcagctgggccacaattgcccctttccgttttctaaccccgactcagatttcaccacccacactctttttaggtgtaaaagatggagtcccacggaggaggggcagagccaggaggcagtggggctgtgggctcagagctcaggagtcgccttacctgagagagatgttctagctgagagggcctggccctggggtgggctccaggaaaacgctggttaggcctgggattgagctaacctgaaacaaaggtagcaggcaggacctaatgaccagaggttaaatcctcatcaagagagaccaggcggctggaggacaagcggctctaaccctgggggcggccatgttgtccaggcccaggcccctccaggactgtggctgcctcccctccacggcctccagggcggctggctggaaagccacgcgtatgctgccctctacaggctgctcggcctccctgcagctcagcgcagcccagggctccaagtgaggcccagaagcccatgggcagggctggggggacgaagggggaacccggagcacctccacttctagggaagatggacagcgtgggggcacacctgggcctcccggaagctgtggacgaaagggagagcgggtcctccagggcaaggggaacgggaaataggtctcctaggtgcctgaagcgctgagcaacctgggtaccctggtggggatgcagggaaggccggggcagagaaagtgaaggtcgacccagggctgtaggaagccataggagagtgaccacgggattccctgagaaacagggccggccccccaacttcagggacccaccgcccattccccgagagctgtcggaaccagatgcaacccggcagcccagagaactctcctgggaggctgtgggtgagccaggccaacattggtgtccctgtccccagagggaggagcaggcaggagagagaggggaaggaggtatgaatcccagtccccaggaacctagctctttaaactctggggagtcggattcaggaaacacccccaggaggccaagcctgaaaacagaggggagggaggaaggaaggagtcccagcaggagcacagccctggtttcctgtcactcagagctgattcacaggaggaggggaggttggggggcgggagacaaaaaccacacctctttttatataaggtttcatatttaatttggtcatggattcataaatacataagtattttg

SEQ ID NO: 60648 - DNA, 2184 bp, Artificial Sequence
  derived and/or modified sequence
atggacagcgacatggactacgagagacccaacgtggagaccatcaagtgcgtggtggtgggcgacaacgccgtgggcaagaccagactgatctgcgccagagcctgcaacgccaccctgacccagtaccagctgctggccacccacgtgcccaccgtgtgggccatcgaccagtacagagtgtgccaggaggtgctggagagaagcagagacgtggtggacgacgtgagcgtgagcctgagactgtgggacaccttcggcgaccaccacaaggacagaagattcgcctacggcagaagcgacgtggtggtgctgtgcttcagcatcgccaaccccaacagcctgcaccacgtgaagaccatgtggtaccccgagatcaagcacttctgccccagagcccccgtgatcctggtgggctgccagctggacctgagatacgccgacctggaggccgtgaacagagccagaagacccctggccagacccatcaagcccaacgagatcctgccccccgagaagggcagagaggtggccaaggagctgggcatcccctactacgagaccagcgtggtggcccagttcggcatcaaggacgtgttcgacaacgccatcagagccgccctgatcagcagaagacacctgcagttctggaagagccacctgagaaacgtgcagagacccctgctgcaggcccccttcctgccccccaagccccccccccccatcatcgtggtgcccgacccccccagcagcagcgaggagtgccccgcccacctgctggaggaccccctgtgcgccgacgtgatcctggtgctgcaggagagagtgagaatcttcgcccacaagatctacctgagcaccagcagcagcaagttctacgacctgttcctgatggacctgagcgagggcgagctgggcggccccagcgagcccggcggcacccaccccgaggaccaccagggccacagcgaccagcaccaccaccaccaccaccaccaccacggcagagacttcctgctgagagccgccagcttcgacgtgtgcgagagcgtggacgaggccggcggcagcggccccgccggcctgagagccagcaccagcgacggcatcctgagaggcaacggcaccggctacctgcccggcagaggcagagtgctgagcagctggagcagagccttcgtgagcatccaggaggagatggccgaggaccccctgacctacaagagcagactgatggtggtggtgaagatggacagcagcatccagcccggccccttcagagccgtgctgaagtacctgtacaccggcgagctggacgagaacgagagagacctgatgcacatcgcccacatcgccgagctgctggaggtgttcgacctgagaatgatggtggccaacatcctgaacaacgaggccttcatgaaccaggagatcaccaaggccttccacgtgagaagaaccaacagagtgaaggagtgcctggccaagggcaccttcagcgacgtgaccttcatcctggacgacggcaccatcagcgcccacaagcccctgctgatcagcagctgcgactggatggccgccatgttcggcggccccttcgtggagagcagcaccagagaggtggtgttcccctacaccagcaagagctgcatgagagccgtgctggagtacctgtacaccggcatgttcaccagcagccccgacctggacgacatgaagctgatcatcctggccaacagactgtgcctgccccacctggtggccctgaccgagcagtacaccgtgaccggcctgatggaggccacccagatgatggtggacatcgacggcgacgtgctggtgttcctggagctggcccagttccactgcgcctaccagctggccgactggtgcctgcaccacatctgcaccaactacaacaacgtgtgcagaaagttccccagagacatgaaggccatgagccccgagaaccaggagtacttcgagaagcacagatggccccccgtgtggtacctgaaggaggaggaccactaccagagagccagaaaggagagagagaaggaggactacctgcacctgaagagacagcccaagagaagatggctgttctggaacagccccagcagccccagcagcagcgccgccagcagcagcagccccagcagcagcagcgccgtggtgtag

SEQ ID NO: 60649 - DNA, 2205 bp, Artificial Sequence
  derived and/or modified sequence
atgaaggccagaagcagactgatggacagcgacatggactacgagagacccaacgtggagaccatcaagtgcgtggtggtgggcgacaacgccgtgggcaagaccagactgatctgcgccagagcctgcaacgccaccctgacccagtaccagctgctggccacccacgtgcccaccgtgtgggccatcgaccagtacagagtgtgccaggaggtgctggagagaagcagagacgtggtggacgacgtgagcgtgagcctgagactgtgggacaccttcggcgaccaccacaaggacagaagattcgcctacggcagaagcgacgtggtggtgctgtgcttcagcatcgccaaccccaacagcctgcaccacgtgaagaccatgtggtaccccgagatcaagcacttctgccccagagcccccgtgatcctggtgggctgccagctggacctgagatacgccgacctggaggccgtgaacagagccagaagacccctggccagacccatcaagcccaacgagatcctgccccccgagaagggcagagaggtggccaaggagctgggcatcccctactacgagaccagcgtggtggcccagttcggcatcaaggacgtgttcgacaacgccatcagagccgccctgatcagcagaagacacctgcagttctggaagagccacctgagaaacgtgcagagacccctgctgcaggcccccttcctgccccccaagccccccccccccatcatcgtggtgcccgacccccccagcagcagcgaggagtgccccgcccacctgctggaggaccccctgtgcgccgacgtgatcctggtgctgcaggagagagtgagaatcttcgcccacaagatctacctgagcaccagcagcagcaagttctacgacctgttcctgatggacctgagcgagggcgagctgggcggccccagcgagcccggcggcacccaccccgaggaccaccagggccacagcgaccagcaccaccaccaccaccaccaccaccacggcagagacttcctgctgagagccgccagcttcgacgtgtgcgagagcgtggacgaggccggcggcagcggccccgccggcctgagagccagcaccagcgacggcatcctgagaggcaacggcaccggctacctgcccggcagaggcagagtgctgagcagctggagcagagccttcgtgagcatccaggaggagatggccgaggaccccctgacctacaagagcagactgatggtggtggtgaagatggacagcagcatccagcccggccccttcagagccgtgctgaagtacctgtacaccggcgagctggacgagaacgagagagacctgatgcacatcgcccacatcgccgagctgctggaggtgttcgacctgagaatgatggtggccaacatcctgaacaacgaggccttcatgaaccaggagatcaccaaggccttccacgtgagaagaaccaacagagtgaaggagtgcctggccaagggcaccttcagcgacgtgaccttcatcctggacgacggcaccatcagcgcccacaagcccctgctgatcagcagctgcgactggatggccgccatgttcggcggccccttcgtggagagcagcaccagagaggtggtgttcccctacaccagcaagagctgcatgagagccgtgctggagtacctgtacaccggcatgttcaccagcagccccgacctggacgacatgaagctgatcatcctggccaacagactgtgcctgccccacctggtggccctgaccgagcagtacaccgtgaccggcctgatggaggccacccagatgatggtggacatcgacggcgacgtgctggtgttcctggagctggcccagttccactgcgcctaccagctggccgactggtgcctgcaccacatctgcaccaactacaacaacgtgtgcagaaagttccccagagacatgaaggccatgagccccgagaaccaggagtacttcgagaagcacagatggccccccgtgtggtacctgaaggaggaggaccactaccagagagccagaaaggagagagagaaggaggactacctgcacctgaagagacagcccaagagaagatggctgttctggaacagccccagcagccccagcagcagcgccgccagcagcagcagccccagcagcagcagcgccgtggtgtag

SEQ ID NO: 60650 - protein, 117 aa, Artificial Sequence
  derived and/or modified sequence
MVRKITLVSAAPGKVICEMKVEEEHTNAIGTLHGGLTATLVDNISTMALLCTERGAPGVSVDMNITYMSPAKLGEDIVITAHVLKQGKTLAFTSVDLTNKATGKLIAQGRHTKHLGN

SEQ ID NO: 60651 - DNA, 354 bp, Artificial Sequence
  derived and/or modified sequence
atggtgagaaagatcaccctggtgagcgccgcccccggcaaggtgatctgcgagatgaaggtggaggaggagcacaccaacgccatcggcaccctgcacggcggcctgaccgccaccctggtggacaacatcagcaccatggccctgctgtgcaccgagagaggcgcccccggcgtgagcgtggacatgaacatcacctacatgagccccgccaagctgggcgaggacatcgtgatcaccgcccacgtgctgaagcagggcaagaccctggccttcaccagcgtggacctgaccaacaaggccaccggcaagctgatcgcccagggcagacacaccaagcacctgggcaactag

SEQ ID NO: 60652 - DNA, 354 bp, Artificial Sequence
  derived and/or modified sequence
atggttagaaaaattaccctagtatccgccgctcccgggaaagtgatatgcgaaatgaaagtcgaagaggaacacactaatgcaattggcactttgcacggcggtctcacagccactttagtagacaacatatcaacaatggctctcttgtgtaccgagagaggcgctcctggcgtctcggttgacatgaacattacctatatgagccctgcaaagctgggcgaagacatcgtgataacagcccacgttttgaagcagggaaaaacattggcgttcacaagcgtggatctgaccaataaggccacaggcaaactcattgctcagggaaggcacaccaagcatctgggcaattag

SEQ ID NO: 60653 - DNA, 354 bp, Artificial Sequence
  derived and/or modified sequence
atggtgaggaagatcaccctggtgtctgctgcccctgggaaggtgatctgtgagatgaaggtggaggaggagcacaccaatgccatcggcaccctgcatggaggcctgacagccaccctggtggacaacatcagcaccatggccctgctgtgcacagagcggggggcccctggggtgtctgtggacatgaacatcacctacatgagccctgccaagctgggagaagatattgtcatcacagcccacgtgctgaagcagggcaagaccctggccttcacctctgtggacctgaccaacaaggccaccgggaagctgattgcccagggccgccacaccaagcacctgggcaactag

SEQ ID NO: 60654 - DNA, 354 bp, Artificial Sequence
  derived and/or modified sequence
atggtgcggaagatcaccctggtgagcgccgcccccggcaaggtgatctgcgaaatgaaagtcgaagaggaacacactaacgctattggtaccctgcacggcgggctgacagcaacgctggtagataatatttccaccatggcactgctgtgtacagaacgcggcgcaccaggagtgtcagtggatatgaatatcacctacatgtcgccagcgaaactgggcgaggacattgtcattaccgcccacgtactaaagcagggtaaaactctcgctttcactagcgtcgacttaacaaataaggctactgggaaactgatcgcccaggggcggcacactaagcacttaggcaattag

SEQ ID NO: 60655 - DNA, 354 bp, Artificial Sequence
  derived and/or modified sequence
atggtcagaaaaattactctcgtgagcgctgccccaggaaaggttatctgcgagatgaaggtggaggaagagcacactaacgccatcggtactcttcatggaggactgaccgcaacgctcgtggacaatatctcaacaatggcgctgctgtgcacggagcgtggggcacctggagtcagcgtcgacatgaacatcacttatatgtcccctgcaaagctcggagaggacattgtaattaccgcacatgtcctgaagcaggggaagacactagccttcactagtgtcgacttgacaaacaaggccactggaaagctgatcgctcagggccgacacactaagcacctgggtaactag

SEQ ID NO: 60656 - DNA, 4391 bp, Artificial Sequence
  derived and/or modified sequence
aagcgcgcatgcgcgcttcgtcacaagggtgcgaggaaagtcagtgagcaaatcgcggaccaccggggctgccagctcgcctgactcccggcctcttgcgctcctaggggcggagaagggtgcgggctcttcgccctttgtgtcctccttctttcactaacttctggactttccagctcttccgaagttcgttcttgcgcaaagcccaaaggctggaaaaccgtccacgatgaccagcatgactcagtctctgcgggaggtgataaaggccatgaccaaggctcgcaattttgagagagttttgggaaagtaacacgtggaggaacatacgttgggaatatcaactgacacgcactgtgctaggatctagaaataccatgtggactccaacacacatagaaataaggaagtggaattccaaaggaaggcaaagtgtaaagtcatctttatggaaatgagtgatgaaggtgaatacctgaatgagatgtcaagaggaggaacacactggagagaagcagtaaagatttaggactgaaccttaaagacatacaggcttgagagaaagaaagcatgtaaagaagacagaaatggttagaaagattactcttgtctctgctgctcctgggaaagtgatttgtgaaatgaaagtagaagaagagcataccaatgcaataggcactctccacggcggtttgacagccacgttagtagataacatatcaacaatggctctgctatgcacggaaaggggagcacccggagtcagtgtcgatatgaacataacgtacatgtcacctgcaaaattaggagaagatatagtgattacagcacatgttctgaagcaaggaaaaacacttgcatttacctctgtggatctgaccaacaaggccacaggaaaattaatagcacaaggaagacacacaaaacacctgggaaactgagagaacagcagaatgacctaaagaaacccaacaatgaatatcaagtatagatttgactcaaacaattgtaatttttgaaataaactagcaaaaccagaagcagctagaaatattcttggaggaaaaggacctggatatcaagtagggtaaaggtgggggtgtcttttttcactttaagcatcttgttttctaatcatgtgtgataattgggtgaaaaattcttagctcaaagtgttttaaaaacaggtaaagcaaagaaactagcaggaccactctcagttaagattaaaactaaagtccagtgttaagctaaaggagaaatagaaattaatggttctaattctgtttgggctgctaggaacaacagaaatttttcatggttctagaagctggaaagtcctgggtcaaggcccagcagatcctgttaggtgagggcccgcttcctggctcatagatggtgccttctcactgtgtggtggaaggggcaagtgagccctctgggttctcgtttttgaaatggagtctcgctctgttgcccaggctggagtacagcagcacgatctcggctcactgcaatctctgccccctgggttcaagtgattctcctgcctcagcctcccaagtagctgggactataggcatgtgccatcacacctagctaatttttgtagttttttgtagaaacagggttcaccatgttggccaggctggtctcgaactcgtgacctcaggtgatccgcctgccttggccccccaaagtgctgggattacaggtgtgagccaatgtgcccagcctgggttctcttttgtaagggcacttactccaatcttgagggttctgccctcgtgatctaataacttcccaaagacccccacctgctaatatcaccttgggggttgggattttaacatacaaatttaggggaaacacatggagaccacagcaatggccaatccttagcgaatcttaggtccttcccagatctaaaatgccaagctacacttgcatttcctttttttaagattatgaaacttcaaaatatatgaactacagcccatattgaaaaataaaatagattgagccatatgcctaaaaaagacctcaagaaaagtttgaggctaagcatgttagtgttacaggaaatggtccaatagagggggaagaaaaaaagcatgctactagccccttttcttgtaccgagaataaaaccatgcagatctcaaacctccaagtctatagtattgaaaagaccaagttcacttctcagaagtctccaagttcagttgactgtggcactctgagacagcttctgtcactcaggctggagtgatacaatcacagcttcccatagcctcaaaatcccaggctcaagacattcttccacctcagtctcctgagtagctggaactacaggcgtgtgccaccacgcctaattttatttttgtagaaacaaggtctcactgttgcccagcctcgtctcaaactcctaggctcaagcaatcctcctgccttggccccccaagtactggacttacaggtgtgaaccactgcacccagctgactcttacttgatttctgtcagggaatcttaatgaacatttcatgactaaagactaaaaaggatgcagctttaagtaaatttaagtcaagttaacagttaaagacaaatcctttccctacattagatcgcctgctgatctgtccactgtgaaagggcagaagactccacagtagcaatagcagcagtgagcatacaggagtcccagatgtttacttctagtatttcccactaaaaggaagctgggctccttggagaaacagctgactccagggcttgaggctgggacagaaaggttacagtatcttatgcatgaaaggagatgctcaaaataataaaggcatgcaaattatgatttggagggaaaaaatatgaggccatagtgtttaggtagataataaatggcagagatagaacactctcttacaacaaatgctgtaaatggacaaagcattagatttggaaaatcactattttgtaaccatcatagttaaagactggtttgggttttagtctggaaagaatcgccaagggagctcctgataaaggaacagggtatttgcacattgcttcccagagattgctagtagtaagtaccacacatagggcaaaaccaggacaccttgaccaggcgctcaaaagtaacatcaatgaagagcagatggagagtatacttgagaagggcgttaagcatgaataaacaattcaaatgcaaaatgagtaacaatttacaagaaaaattgccctgtactccaaaaaacatagaggtcatggaacacataaaggctaaggaactgttccacattaaagacaactgagaacaactaaattcaatgatcctgtactctagagggggggatctaaaacaagctaccaaggatactgggacaacaaaacgaatatggatgataaagagtatcaacattccctgagtttggtaattttactctagttatatgaaatattcttgtacttggaacatatgccgaagtactaaggaaggggtaaggaagcacaaagtgtgcaacaaactcaaatagctcacaggtataagtgtacagagaaaatgaaaaaaatgtggcaaaataataaaaatgagggtaaagattacacaacagctttcatattactctggtaacttttctaaattattccaaaataaaaacgtaaacaatggctgccaaaatgcctaacttggtgaacataagtgtaattcaatatggtaaattaattcaacatggtaaattaagagcataggccttaagagccagccagcctggttttaaatcctccactacttatgatctgagcttgagcaagttacttaacctctgcatctatttccaccaaaggttgagaggttaagacaagagcttagaagagtacctggttataataaacattcaaaatgttatttcaaatagattctaatttttaaataagaggacacatgaaagcattttgaaatttaagaatggccctttcccatgaagcaaggcataaggccaggttgctaactgttgaaagctgacagtatgttcttgattcctgttcttgttgaagttacacactcaattgccaggtatttttcttctgaatttactatttagccacagactatgaaataattctctaaggtgaccagtaacatcagtgaaatggaaagaaaaagttaacacttcaaactttgtgtattcacctgaatagtcagggaactttcacctattttatttaggttttctttttctttttttctttttttttcaaattccaaccagaagctaaatacaattggaaactggtaagcactagttttactccaaaggagtaggatcattcagatttactccaataaaagtatgcaacccttaagcaaagcttttcttcattt

SEQ ID NO: 60657 - protein, 73 aa, Artificial Sequence
  derived and/or modified sequence
MIAAVSLGFFGSIFALFGMKCTKVGGSDKAKAKIACLAGIVFILSGLCSMTGCSLYANKITTEFFDPLFVEQK

SEQ ID NO: 60658 - DNA, 701 bp, Artificial Sequence
  derived and/or modified sequence
gaggacttatgatcgctgctgtcagcctgggcttctttggttccatatttgcgctctttggaatgaagtgtaccaaagtcggaggctccgataaagccaaagctaaaattgcttgtttggctgggattgtattcatactgtcagggctgtgctcaatgactggatgttccctatatgcaaacaaaatcacaacggaattctttgatcctctctttgttgagcaaaagtaagtactcttctcagtctgtttccagctcacaggaagtgtatataaattaatattctcaaccaagagacatgaatttcctatatgacttttgaaagtaagacatactgataaatggtaactgatgacatcattcaagattaaatgtgtcatatgccacatacgcaaaatatgcatttaattagtttgctagtgttgcagtgtcttgtctcgaaacagttcaaggcatcaaatttagaactataaacttcatcgtttgctgtacatcatgaaactgaggtcaagtagaggaaacgtgaaaggtgtcagacggagaggaaagaatgatgcggtgtgcgaatagaaaattaaaaccttgccttgattgttgcccactcaaaatgatatttgccagatgctagtttctgggtcttttaaatttgctgtattaactactgtcttaacaagctcctcctaataaacctttataaagaaa

SEQ ID NO: 60659 - DNA, 222 bp, Artificial Sequence
  derived and/or modified sequence
atgatcgccgccgtgagcctgggcttcttcggcagcatcttcgccctgttcggcatgaagtgcaccaaggtgggcggcagcgacaaggccaaggccaagatcgcctgcctggccggcatcgtgttcatcctgagcggcctgtgcagcatgaccggctgcagcctgtacgccaacaagatcaccaccgagttcttcgaccccctgttcgtggagcagaagtag

SEQ ID NO: 60660 - DNA, 222 bp, Artificial Sequence
  derived and/or modified sequence
atgatagccgccgtgtctctgggcttttttggatcaatatttgccctgttcggaatgaagtgtacaaaagtgggtggctctgacaaagctaaagccaaaatcgcctgcctcgccggtatcgtctttatcctgtccggcctctgtagcatgacggggtgctcactgtatgcaaacaaaatcacaaccgaattctttgatccactgttcgtcgagcagaaatag

SEQ ID NO: 60661 - DNA, 222 bp, Artificial Sequence
  derived and/or modified sequence
atgattgctgctgtgtccctgggcttcttcggcagcatctttgccctgtttggcatgaagtgcaccaaggtgggcggcagtgacaaggccaaggccaagatcgcctgcctggccggcatcgtgttcatcctgagcggcctgtgcagcatgacaggctgcagcctgtatgccaacaagatcaccacagagttctttgaccccctgtttgtggagcagaagtag

SEQ ID NO: 60662 - DNA, 222 bp, Artificial Sequence
  derived and/or modified sequence
atgatcgccgccgtgagcctgggcttcttcggcagcatcttcgccttatttgggatgaagtgtactaaggtgggcggctccgataaagcaaaagcgaaaattgcttgtttggccgggatcgtgttcatcctgagcggtctgtgcagcatgactgggtgttctttgtatgccaataagattaccaccgaattctttgatccgttattcgtggaacagaaatag

SEQ ID NO: 60663 - DNA, 222 bp, Artificial Sequence
  derived and/or modified sequence
atgatcgcggcagtttccctcggattctttggatccatctttgcgctattcgggatgaagtgcacaaaggtgggtggatctgacaaagctaaagctaagatcgcctgtctcgctggcatcgtgttcattttatcagggctttgctctatgaccggatgctctctttatgccaataaaatcactaccgaattctttgatcccctgttcgttgagcagaaatag

SEQ ID NO: 60664 - DNA, 411 bp, Artificial Sequence
  derived and/or modified sequence
atgggcgacagccggcgggacgtgctgcacgagcccgccatcgccctcttgagttccccgcaaacacaatcccgactgcagattgacgcctttatagctaggcgatgctggggctcacagtgggacattaccggatacatccatcaacaagattttccaaccgctgttttcataggtttttccaacgagttcaacatctgcataccccaccctttcacagaatggttgcagtgcgtgcgtaagtactcacagtcttggggtgttcggaagggccagcgccacattcggtatggcatgtgttccgagaggactcatcacctgtcccgcacctattcttctctgctggaacgggaagagaagcttgccttctacggggtgctcaccatgtgccagatctggtgcgagacctag

SEQ ID NO: 60665 - protein, 629 aa, Artificial Sequence
  derived and/or modified sequence
MRVLLHLPALLASLILLQAAASTTRDPSLDLTSLSLEVGCGAPAPVVRCDPCSPYRTITGDCNNRRKPALGAANRALARWLPAEYEDGLSLPFGWTPGKTRNGFPLPLAREVSNKIVGYLNEEGVLDQNRSLLFMQWGQIVDHDLDFAPDTELGSSEYSKAQCDEYCIQGDNCFPIMFPPNDPKAGTQGKCMPFFRAGFVCPTPPYKSLAREQINALTSFLDASFVYSSEPSLASRLRNLSSPLGLMAVNQEVSDHGLPYLPYDSKKPSPCEFINTTARVPCFLAGDSRASEHILLATSHTLFLREHNRLARELKRLNPQWDGEKLYQEARKILGAFVQIITFRDYLPILLGDHMQKWIPPYQGYSESVDPRISNVFTFAFRFGHLEVPSSMFRLDENYQPWGPEPELPLHTLFFNTWRMVKDGGIDPLVRGLLAKKSKLMKQNKMMTGELRNKLFQPTHRIHGFDLAAINTQRCRDHGQPGYNSWRAFCDLSQPQTLEELNTVLKSKMLAKKLLGLYGTPDNIDIWIGAIAEPLVERGRVGPLLACLLGKQFQQIRDGDRFWWENPGVFTNEQKDSLQKMSFSRLVCDNTRITKVPRDPFWANSYPYDFVDCSAIDKLDLSPWASVKN

SEQ ID NO: 60666 - DNA, 1890 bp, Artificial Sequence
  derived and/or modified sequence
atgcgggttctcttgcatctgccggcgctgctcgccagcctcatactccttcaggccgcagcctccactaccagggatcctagcctggacctcacctcactctcgctggaagttggttgcggggccccggcccccgtggttagatgcgatccttgctcaccttatcggactataacgggcgactgcaataaccgtcgcaagcccgcactgggagctgcaaacagggctctggctagatggctccctgccgagtacgaagacggcttgagcctgccgttcgggtggactcctgggaagacacgtaatggattccccctgccattagctcgagaggtgtcgaataagatcgtgggatacctgaacgaggaaggggtattagaccagaatcgctcactgctgtttatgcaatgggggcagattgtggaccatgacctcgacttcgcgcctgatacggagcttggctccagtgagtactccaaggctcagtgcgacgaatactgcattcaaggggacaactgctttccaatcatgtttcctccgaacgacccaaaagccggaacccagggaaaatgtatgccgttctttagggccgggttcgtgtgtccaactccaccttacaaatccctcgcaagagaacaaatcaacgcgctgacatccttcctcgacgcgagctttgtctattcatctgaaccttctctcgcctccagattacggaaccttagcagtccactgggcctgatggctgtaaaccaagaggtgtctgaccatggactcccctatctgccctacgattccaagaagccaagcccatgtgaatttataaacaccacagctcgcgtcccttgctttctggcgggggactcccgtgcttcagaacacatcctgctggccacctcgcacaccttgtttcttagagaacataataggctcgcccgagaattgaaaaggcttaatccacagtgggatggagaaaaactgtaccaggaggcacgcaaaattctgggcgcatttgtgcaaattatcacatttagggattacctgccaattctcctcggcgatcatatgcaaaaatggatcccgccttatcagggttatagtgaatctgtggaccccaggatttccaatgtgtttacgtttgcgttccgtttcgggcacctggaggtgccttccagcatgttccggctcgacgaaaactatcaaccttggggcccagagcctgagcttccactgcacaccctgtttttcaacacttggaggatggttaaggacggcggcattgacccactggtgcgtggacttctggctaagaagtcaaaacttatgaagcagaacaagatgatgaccggtgaattgcgtaataaactctttcagccgacgcatcgcatccacgggtttgatcttgcggccattaacacacagcgttgccgcgatcatgggcagcctggatataattcttggagagctttctgtgatcttagccagcctcagacacttgaggagttgaacaccgtgctgaagagcaaaatgctggctaaaaagctgctggggctgtacgggactcctgacaatattgatatctggatcggggcgattgccgaaccattggtcgagagaggacgagttggaccgctcttggcttgcttgttgggtaagcagttccaacagattagggacggcgatcgcttctggtgggaaaacccaggcgtctttacaaatgagcagaaagactcactgcagaaaatgtccttttcaaggttggtctgcgacaacactaggatcaccaaggtccctcgggatccattttgggcgaattcttatccctacgactttgtagattgttccgccatcgacaagcttgatctgagtccatgggctagcgtgaagaattag

SEQ ID NO: 60667 - DNA, 2729 bp, Artificial Sequence
  derived and/or modified sequence
cagggcatgcagtttttgccttccggaactagatcaggatcatgcatttaagctagaaaatggaaagaggagttgcttcacccacagtcagtgctattgcatcaaccaatccctgccattctgcagtttcctggtgtatctgcccggagtcacacagtctttcctgctaagcctcagcgtctcctccaagccacatcaaaatctttccttctgggcctttcccagaagtgaattcttgctggaaggtataaaagaccagctcctccaagcagagcaactccctggctgccgtgaaaagacaaggcactgggcagtgatgagggtccttctccatctcccagccctcctggcttccctcatcttgcttcaggctgcagcatctaccacaagagatcccagcctggacttgacttcactgtctctggaggtgggctgtggtgctcctgctcccgtggtgagatgcgacccgtgcagcccttaccgcaccattacgggagactgcaataacaggaggaagcctgcgctgggcgccgccaacagggctctggcgcgctggctgcccgcggagtacgaggacgggctctccctgcccttcggctggacgccggggaagacgcgcaacggcttccctctcccgctggcccgggaggtatctaacaagattgttggctatctgaatgaggagggtgttctggaccaaaacaggtccctgctcttcatgcagtggggtcagattgtggatcatgacctggactttgcccctgacaccgagctggggagtagcgagtactccaaagcccagtgtgatgagtactgtatccagggagacaactgcttccccatcatgttcccacccaatgaccccaaggcggggactcaagggaaatgcatgcctttcttccgagctgggttcgtctgccccactccaccctacaagtccctggcccgagagcagatcaacgctctgacctccttcctggatgccagctttgtgtacagctccgagccaagcctggccagccgcctccgcaacctcagcagccccctgggcctcatggctgtcaaccaggaggtctcagaccatggactaccctacctgccctatgacagcaagaagccaagcccctgtgagttcatcaacaccactgcccgtgtgccctgcttcctggcaggagattctcgagcctcagagcatattctgctggccacatcccacaccctctttctccgcgagcataaccggctggccagagaactaaagagactcaaccctcagtgggatggagagaagctctaccaggaagcccggaaaatcctgggagccttcgtgcagattatcacctttagggactacctacccattttgctaggtgaccacatgcagaagtggatacccccatatcaaggctacagtgaatctgtggatcccagaatttccaatgtcttcaccttcgccttccgctttggccacttggaggtcccctctagtatgttccgcctggatgagaattatcagccatgggggccagaaccagaactccccctccacaccctcttcttcaacacttggaggatggtcaaagatggtggaattgatcctctggtgcggggcctgctggccaagaaatccaagctgatgaaacagaataaaatgatgactggagagctgcgcaacaagcttttccagccaactcacaggatccatggctttgacctggctgccatcaacacacagcgttgccgggaccatgggcaacctgggtacaattcctggagagccttctgtgacctctcacagccgcagacactagaggagttgaacacagtgctgaagagcaagatgctggccaagaagttactgggtctctacgggacccctgacaacatcgacatctggataggggccattgctgagccgctggtggaaaggggtcgggtggggcctctcctggcctgcctcttgggcaagcagttccagcagatccgtgatggagacaggttctggtgggaaaaccctggggtcttcacgaacgagcagaaggactctctacagaaaatgtccttctcacgccttgtctgtgacaacacccgcatcaccaaggtcccacgggacccattctgggccaacagctacccctatgacttcgtggattgctcagccatcgacaagctggacctgtcaccctgggcctcagtgaagaattaggggcccgcgctgcacaggaaagttccctttggtccacagggccatttcaagcaagttcaatgacctggtcccttagagctccatatcccagtcccagcccttctttgcagctgggcctctctatacccctggatgaacagcttgctcaggccccagggtggctgcctcggccctcccagctcttacactcagctccagtggcttctcctttctgtcaagacttagccccgctgagatgcccttctgctccagcttgctggatgttacctgtcctcttccctccacaagtcttggcccttaacctttatctttcttcctgtcctctcacctagattgtaagctccctgggccaggacttcagcctgcctccgagggtcccctgtggcacctagcatggtgcacagcacattagaagtgctcaaaaacatctgatgactgactaaagatgctaggcgtgacaccgttccctccaaaagcagacctcggaatcactgccaaataagtaactagacgtttacaggcc

SEQ ID NO: 60668 - DNA, 1890 bp, Artificial Sequence
  derived and/or modified sequence
atgagggtgctgctgcacctgcctgccctgctggccagcctcatcctgctgcaggccgccgccagcaccacccgggaccccagcctggacctgaccagcctgagcctggaggtgggctgtggggccccagcccctgtggtgcgctgtgacccctgcagcccctaccgcaccatcactggagactgcaacaacagaaggaagccagccctgggcgccgccaacagagccctggcccgctggctgcctgcagaatatgaagatggcctgagcctgcccttcggctggaccccaggcaagaccagaaatggcttccccctgcccctggcccgggaggtgagcaacaagatcgtgggctacctgaatgaggagggcgtgctggaccagaacagaagcctgctcttcatgcagtggggccagatcgtggaccatgacctggactttgccccagacacagagctgggcagcagcgagtacagcaaggcccagtgtgatgagtactgcatccagggcgacaactgcttccccatcatgtttcctccaaatgaccccaaggccggcacccagggcaagtgcatgcccttcttccgggccggctttgtgtgccccaccccaccctacaagagcctggcccgggagcagatcaatgccctgaccagcttcctggatgccagctttgtgtacagcagcgagcccagcctggccagccggctgaggaacctgagcagccccctgggcctgatggctgtgaaccaggaggtgtctgaccacggcctgccctacctgccctatgacagcaagaagcccagcccctgtgagttcatcaacaccacagcccgggtgccctgcttcctggccggggacagccgggccagcgagcacatcctgctggccaccagccacaccctcttcctgcgggagcacaaccggctggcccgggagctgaagaggctgaacccccagtgggatggagagaagctgtaccaggaggccaggaagatcctgggcgcctttgtgcagatcatcaccttccgggactacctgcccatcctgctgggggaccacatgcagaagtggatccccccctaccagggctacagcgagagcgtggacccccgcatcagcaatgtgttcacctttgccttccgcttcggccacctggaggtgcccagctccatgttccggctggatgagaactaccagccctggggccctgagcctgagctgcccctgcacaccctcttcttcaacacctggaggatggtgaaggatggcggcatcgaccccctggtgcggggcctgctggccaagaagagcaagctgatgaagcagaacaagatgatgaccggggagctgaggaacaagctgttccagcccacccaccgcatccacggctttgacctggccgccatcaacacccagcgctgccgggaccacggccagcccggctacaacagctggagggccttctgtgacctgagccagccccagaccctggaggagctgaacacagtgctgaagagcaagatgctggccaagaagctgctgggcctgtatggcaccccagacaacatcgacatctggattggagccatcgccgagcccctggtggagcggggccgggtgggccccctgctggcctgcctgctgggcaagcagttccagcagatcagagatggagaccgcttctggtgggagaaccctggggtcttcaccaatgagcagaaggacagcctgcagaagatgtccttcagccggctggtgtgtgacaacacccgcatcaccaaggtgccccgggaccccttctgggccaacagctacccctatgactttgtggactgcagcgccatcgacaagctggacctgagcccctgggcctctgtgaagaactag

SEQ ID NO: 60669 - DNA, 1890 bp, Artificial Sequence
  derived and/or modified sequence
atgcgggtgctgctgcacctgcccgccctgctggccagcctgatcctgctacaggcagccgctagtaccacccgtgacccttcactagacctaactagcctaagtctggaagttggttgtggcgcccctgcgcctgtcgtgagatgcgatccatgctcaccttaccggacaatcacaggggactgcaataatcgccggaagccggctctgggtgcagccaatcgcgcactggcgcggtggttgcctgcagaatacgaggatggtctgtctcttccctttggctggacacctgggaaaacccgaaatggcttccccttgcccctggctagagaggtgagcaacaagattgtcggctatctgaatgaagagggcgtacttgatcaaaataggtccctcctattcatgcaatggggacagatcgttgaccacgacctggattttgctcccgacacagagctagggagctccgagtactcaaaagcccaatgtgacgagtattgcatccagggagacaactgctttcctataatgttcccccctaatgatcctaaagcgggcacacagggaaaatgtatgccatttttcagggctggcttcgtttgcccaactccgccttacaagtccctagcaagggagcagattaatgccctcaccagttttctagatgccagttttgtgtactcaagtgagccgtctcttgcttcacgtctacgtaacctgagtagcccgctggggctcatggctgtgaaccaggaagtctcggatcacggtttgccatatctgccctacgattcaaagaaaccctctccatgtgaatttatcaacacaactgcacgcgtgccgtgttttctagcaggagattcaagagcatccgagcatatcctattagccacatcacacactctgtttttgagagagcataaccgactggctagagagctgaagagactaaacccccaatgggacggagagaagctgtaccaggaggcgcgcaagatacttggcgcctttgtccagattatcacattccgagactatttaccaattctcctgggcgatcacatgcagaaatggattccgccatatcagggctattccgagtctgtggatccccgtatcagtaacgtgttcaccttcgcttttcgtttcggtcatttggaagtgccatcctctatgttccgcttagacgaaaactaccagccctggggtcccgaacccgagttaccgctgcacaccctcttctttaacacctggcgtatggtgaaggatggtggcattgaccctctcgtccgcgggctgctcgctaagaagtccaaattgatgaaacagaataagatgatgactggcgaactcaggaataagctcttccaaccgactcatcggatacacggttttgacctggccgcgatcaacacccaaagatgcagggaccacgggcagccaggatacaactcctggagagccttttgtgaccttagtcagcctcagacattggaggagctgaataccgtcctcaaatctaaaatgctggccaagaaactgctggggctatatggcacccccgataacatcgacatctggataggcgcaatagctgagcccctcgtggaacgaggacgtgtgggccccctgctcgcctgtctcttgggtaagcaatttcagcagatccgggacggggatcggttttggtgggagaatcctggtgtgtttacgaacgagcagaaggattccctgcaaaagatgtcgttttctaggttggtttgcgacaatactcgcatcactaaagtccctagagatcccttttgggctaacagctatccctatgatttcgtggattgcagtgcgatcgataagctggacctgagcccttgggctagtgtcaagaattag

SEQ ID NO: 60670 - DNA, 1890 bp, Artificial Sequence
  derived and/or modified sequence
atgcgggtcttgctccatctgccggcattactagcatccttgatccttctgcaggctgctgcctctaccacaagagacccttccctggacctgacttccttgtccctcgaggttggctgtggagcccctgcacccgtggtccggtgcgatccttgctccccttataggaccattactggggactgtaacaacagaaggaagcctgcccttggagccgctaatagagcattggccagatggctacccgctgaatatgaagacgggctaagcttgcctttcgggtggacccctggcaaaacacgcaatggtttcccattgccccttgctagggaagtgtctaataaaattgttgggtatcttaacgaggagggtgtgctggatcagaatcggagccttttgtttatgcaatggggccagattgtggaccatgacctggatttcgcaccagacaccgagctgggctcctccgaatattctaaagcccagtgtgacgaatattgtatccagggcgacaattgcttccctattatgttcccaccaaatgatccaaaggcaggtacccagggcaagtgtatgccttttttccgtgccggattcgtgtgccctacccctccttacaagtctcttgctagagaacagatcaacgcgctgacttctttccttgatgcctcttttgtgtattcgagcgagccttcactggcatctcggctgcgcaacctcagctcccccttaggcctgatggcagttaaccaggaggtcagcgatcatgggttgccctatctcccatacgactccaagaagcctagcccttgcgagttcatcaacacaacggctagggtgccctgctttttggctggggactctagggcttcggaacatatcttactggctacttcccacacactgttccttcgcgaacacaatcgtctggcaagggaattgaagagattgaatccacagtgggatggtgagaaactgtatcaagaggcacgaaagatcctgggtgcattcgtccagatcataaccttccgagactacttgcccattttgctgggcgaccatatgcaaaagtggatccccccttaccaggggtattcagagtccgtggatcccagaattagcaatgtgtttacattcgcttttagatttggccatctggaggtgccctcctcaatgtttcggctcgacgagaattaccagccctggggccctgagcctgagctcccgctacacaccttgttctttaatacatggcgcatggtgaaggacggcggaatcgatcctttagtgagggggctgctcgccaagaagtccaagttgatgaaacagaacaagatgatgacaggtgaactgagaaataaactgtttcaaccaacacataggattcatggctttgatctggctgccatcaacacccagcgttgcagagaccacggtcagcccggatacaactcctggcgagctttctgcgacctcagtcagccccagacgctggaggaactgaatacggtgctgaaaagcaagatgctcgccaagaagttgctaggattatatggaacgcctgataatattgatatttggatcggtgccatcgccgagccccttgtggagcggggtagggtgggccctctgctggcgtgccttctcggaaaacagtttcaacagattcgagatggggatagattctggtgggaaaaccctggggtatttactaatgagcagaaggactccttgcagaaaatgtccttttccagactggtatgtgataataccagaatcaccaaagttccccgagaccccttctgggctaacagctacccctatgactttgtggattgttctgccatagataaattggacctgagcccgtgggcctcggtaaagaactag

SEQ ID NO: 60671 - DNA, 1890 bp, Artificial Sequence
  derived and/or modified sequence
atgagagtgctgctgcacctgcccgccctgctggccagcctgatcctgctgcaggccgccgccagcaccaccagagaccccagcctggacctgaccagcctgagcctggaggtgggctgcggcgcccccgcccccgtggtgagatgcgacccctgcagcccctacagaaccatcaccggcgactgcaacaacagaagaaagcccgccctgggcgccgccaacagagccctggccagatggctgcccgccgagtacgaggacggcctgagcctgcccttcggctggacccccggcaagaccagaaacggcttccccctgcccctggccagagaggtgagcaacaagatcgtgggctacctgaacgaggagggcgtgctggaccagaacagaagcctgctgttcatgcagtggggccagatcgtggaccacgacctggacttcgcccccgacaccgagctgggcagcagcgagtacagcaaggcccagtgcgacgagtactgcatccagggcgacaactgcttccccatcatgttcccccccaacgaccccaaggccggcacccagggcaagtgcatgcccttcttcagagccggcttcgtgtgccccacccccccctacaagagcctggccagagagcagatcaacgccctgaccagcttcctggacgccagcttcgtgtacagcagcgagcccagcctggccagcagactgagaaacctgagcagccccctgggcctgatggccgtgaaccaggaggtgagcgaccacggcctgccctacctgccctacgacagcaagaagcccagcccctgcgagttcatcaacaccaccgccagagtgccctgcttcctggccggcgacagcagagccagcgagcacatcctgctggccaccagccacaccctgttcctgagagagcacaacagactggccagagagctgaagagactgaacccccagtgggacggcgagaagctgtaccaggaggccagaaagatcctgggcgccttcgtgcagatcatcaccttcagagactacctgcccatcctgctgggcgaccacatgcagaagtggatccccccctaccagggctacagcgagagcgtggaccccagaatcagcaacgtgttcaccttcgccttcagattcggccacctggaggtgcccagcagcatgttcagactggacgagaactaccagccctggggccccgagcccgagctgcccctgcacaccctgttcttcaacacctggagaatggtgaaggacggcggcatcgaccccctggtgagaggcctgctggccaagaagagcaagctgatgaagcagaacaagatgatgaccggcgagctgagaaacaagctgttccagcccacccacagaatccacggcttcgacctggccgccatcaacacccagagatgcagagaccacggccagcccggctacaacagctggagagccttctgcgacctgagccagccccagaccctggaggagctgaacaccgtgctgaagagcaagatgctggccaagaagctgctgggcctgtacggcacccccgacaacatcgacatctggatcggcgccatcgccgagcccctggtggagagaggcagagtgggccccctgctggcctgcctgctgggcaagcagttccagcagatcagagacggcgacagattctggtgggagaaccccggcgtgttcaccaacgagcagaaggacagcctgcagaagatgagcttcagcagactggtgtgcgacaacaccagaatcaccaaggtgcccagagaccccttctgggccaacagctacccctacgacttcgtggactgcagcgccatcgacaagctggacctgagcccctgggccagcgtgaagaactag

SEQ ID NO: 60672 - protein, 651 aa, Artificial Sequence
  derived and/or modified sequence
  misc_feature (1)..(1): Xaa can be any naturally occurring amino acid
XSDTNIFDSNVPSNKSNFSRGDERRHEAAVPPLAIPSARPEKRDSRVSTSSQESKTTNVRQTYDDGAATRLMSTVKPLREPAPSEDVIDIKPEPDDLIDEDLNFVQENPLSQKKPTVTLTYGSSRPSIEIYRPPASRNADSGVHLNRLQFQQQQNSIHAAKQLDMQSSWVYETGRLCEPEVLNSLEETYSPFFRNNSEKMSMEDENFRKRKLPVVSSVVKVKKFNHDGEEEEEDDDYGSRTGSISSSVSVPAKPERRPSLPPSKQANKNLILKAISEAQESVTKTTNYSTVPQKQTLPVAPRTRTSQEELLAEVVQGQSRTPRISPPIKEEETKGDSVEKNQGTQQRQLLSRLQIDPVMAETLQMSQDYYDMESMVHADTRSFILKKPKLSEEVVVAPNQESGMKTADSLRVLSGHLMQTRDLVQPDKPASPKFIVTLDGVPSPPGYMSDQEEDMCFEGMKPVNQTAASNKGLRGLLHPQQLHLLSRQLEDPNGSFSNAEMSELSVAQKPEKLLERCKYWPACKNGDECAYHHPISPCKAFPNCKFAEKCLFVHPNCKYDAKCTKPDCPFTHVSRRIPVLSPKPVAPPAPPSSSQLCRYFPACKKMECPFYHPKHCRFNTQCTRPDCTFYHPTINVPPRHALKWIRPQTSE

SEQ ID NO: 60673 - DNA, 1956 bp, Artificial Sequence
  derived and/or modified sequence
tgaagcgacaccaacatcttcgacagcaacgtgcccagcaacaagagcaacttcagcagaggcgacgagagaagacacgaggccgccgtgccccccctggccatccccagcgccagacccgagaagagagacagcagagtgagcaccagcagccaggagagcaagaccaccaacgtgagacagacctacgacgacggcgccgccaccagactgatgagcaccgtgaagcccctgagagagcccgcccccagcgaggacgtgatcgacatcaagcccgagcccgacgacctgatcgacgaggacctgaacttcgtgcaggagaaccccctgagccagaagaagcccaccgtgaccctgacctacggcagcagcagacccagcatcgagatctacagaccccccgccagcagaaacgccgacagcggcgtgcacctgaacagactgcagttccagcagcagcagaacagcatccacgccgccaagcagctggacatgcagagcagctgggtgtacgagaccggcagactgtgcgagcccgaggtgctgaacagcctggaggagacctacagccccttcttcagaaacaacagcgagaagatgagcatggaggacgagaacttcagaaagagaaagctgcccgtggtgagcagcgtggtgaaggtgaagaagttcaaccacgacggcgaggaggaggaggaggacgacgactacggcagcagaaccggcagcatcagcagcagcgtgagcgtgcccgccaagcccgagagaagacccagcctgccccccagcaagcaggccaacaagaacctgatcctgaaggccatcagcgaggcccaggagagcgtgaccaagaccaccaactacagcaccgtgccccagaagcagaccctgcccgtggcccccagaaccagaaccagccaggaggagctgctggccgaggtggtgcagggccagagcagaacccccagaatcagcccccccatcaaggaggaggagaccaagggcgacagcgtggagaagaaccagggcacccagcagagacagctgctgagcagactgcagatcgaccccgtgatggccgagaccctgcagatgagccaggactactacgacatggagagcatggtgcacgccgacaccagaagcttcatcctgaagaagcccaagctgagcgaggaggtggtggtggcccccaaccaggagagcggcatgaagaccgccgacagcctgagagtgctgagcggccacctgatgcagaccagagacctggtgcagcccgacaagcccgccagccccaagttcatcgtgaccctggacggcgtgcccagcccccccggctacatgagcgaccaggaggaggacatgtgcttcgagggcatgaagcccgtgaaccagaccgccgccagcaacaagggcctgagaggcctgctgcacccccagcagctgcacctgctgagcagacagctggaggaccccaacggcagcttcagcaacgccgagatgagcgagctgagcgtggcccagaagcccgagaagctgctggagagatgcaagtactggcccgcctgcaagaacggcgacgagtgcgcctaccaccaccccatcagcccctgcaaggccttccccaactgcaagttcgccgagaagtgcctgttcgtgcaccccaactgcaagtacgacgccaagtgcaccaagcccgactgccccttcacccacgtgagcagaagaatccccgtgctgagccccaagcccgtggccccccccgccccccccagcagcagccagctgtgcagatacttccccgcctgcaagaagatggagtgccccttctaccaccccaagcactgcagattcaacacccagtgcaccagacccgactgcaccttctaccaccccaccatcaacgtgccccccagacacgccctgaagtggatcagaccccagaccagcgagtag

SEQ ID NO: 60674 - DNA, 1956 bp, Artificial Sequence
  derived and/or modified sequence
tgaagcgacacgaacattttcgactcaaacgttccgtctaataaaagcaattttagcaggggggacgaaagaagacacgaggcagcggtgccccccctggcaattccaagcgctaggcctgaaaagcgagattctcgggtgtctacatcgagccaggaaagtaagactaccaacgtccgccagacttatgatgatggcgccgctacacggctgatgtccaccgtgaaacccctcagggagcctgcaccgtctgaagacgtaattgatatcaaacccgagccagatgatctgatcgacgaggacctcaatttcgtccaagaaaaccccctttctcagaaaaagccaaccgtgaccttgacttatggtagctctagaccctccatagagatctacagaccacccgcctccagaaatgctgactccggggtgcacctgaacaggctccagttccagcagcagcagaattcaatccacgccgcgaagcagctcgacatgcagtcctcctgggtgtatgagactggccgattgtgcgagccagaagtgctgaattccctggaggagacgtacagtccttttttccggaacaacagcgaaaagatgagtatggaggacgagaacttccgtaagaggaagctcccggtcgtgtcatcagtggtcaaggtaaagaagttcaaccatgatggcgaggaggaggaagaagatgacgactacgggagtcgaacaggtagcattagcagtagcgtgtctgtacccgcgaaacctgaacgccggccatccctccccccgagtaagcaggccaataaaaacctgattttaaaagcaattagcgaagcacaagaatccgtgaccaagaccacaaactacagcacggttcctcaaaaacaaactctgccggtggctccccggactcgtaccagccaggaagagttgctcgccgaggtcgtccaaggccaatcccgcactcctcggatttctccaccaatcaaggaggaggagactaagggagatagtgtggagaagaatcaaggcactcagcagaggcagctgctgagccgactccagattgaccctgttatggcggagaccctgcagatgtcccaggactattacgacatggagtccatggtacatgcagacacacgctcttttatcctaaagaaacccaaactgagcgaggaagtggtagtggctcccaatcaggaaagcggcatgaaaaccgccgattctctgcgggtactgagtgggcacttaatgcagacccgcgatctcgtgcagccagataagccggcgagtcccaaattcatcgtcactctcgacggagtacctagtccacctgggtacatgagtgaccaggaggaggacatgtgttttgagggcatgaaacccgtgaaccaaacagctgcatccaataagggtctccgggggttgctgcaccctcagcagcttcacctgctgtcgcgacagctggaggatcctaatggaagcttctctaacgcggagatgtcagagttaagcgtcgctcaaaaacctgaaaagctgctggaaagatgtaagtattggccagcatgcaagaatggagacgaatgcgcctatcatcaccctatcagtccatgtaaagctttccccaattgcaagttcgccgagaagtgtctgtttgttcatcctaactgcaaatatgacgccaaatgtaccaaaccggactgcccatttacccacgtgtcgcgccggatccctgtgctgtctccaaagccagtggccccgcctgcccccccatcctcgagccagctttgtcgctactttccagcatgcaagaagatggaatgccccttctaccaccccaaacactgccggttcaacacacagtgtactcggcccgactgcaccttctaccacccgactattaatgttccccctaggcacgcgctgaaatggatccgtcctcagaccagtgagtag

SEQ ID NO: 60675 - DNA, 1956 bp, Artificial Sequence
  derived and/or modified sequence
tgaagtgacaccaacatctttgacagcaatgtgcccagcaacaagagcaacttcagcagaggagatgagaggagacatgaggccgctgtgccccccctggccatccccagcgcccggcctgagaagagggacagccgggtgtccaccagcagccaggagagcaagaccaccaacgtgcggcagacctatgatgatggagctgccacccggctgatgagcacagtgaagcccctgcgggagcccgcccccagtgaagatgtgattgacatcaagccagagccagatgacctgattgatgaggacctgaactttgtgcaggagaaccccctgagccagaagaagcccaccgtgaccctgacctacggcagcagccggcccagcattgagatctacagacctccagccagcagaaatgctgacagcggcgtgcacctgaaccggctgcagttccagcagcagcagaacagcatccatgctgccaagcagctggacatgcagagctcctgggtgtatgaaacaggccgcctgtgtgagcctgaggtgctgaacagcctggaggagacctacagccccttcttcaggaacaacagcgagaagatgtccatggaggatgagaacttcaggaagaggaagctgcctgtggtgtcctctgtggtgaaggtgaagaagttcaaccatgatggagaggaggaggaggaggatgatgattatggcagcaggacaggcagcatcagcagctctgtgtctgtgcctgccaagccagagcggcggcccagcctgccccccagcaagcaggccaacaagaacctgatcctgaaggccatcagcgaggcccaggagagcgtgaccaagaccaccaactacagcacagtgccccagaagcagaccctgcctgtggcccccaggaccaggaccagccaggaggagctgctggccgaggtggtgcagggccagagcaggaccccccgcatcagcccccccatcaaggaggaggagaccaagggggacagcgtggagaagaaccagggcacccagcagaggcagctgctgagccggctgcagattgatcctgtgatggccgagaccctgcagatgagccaggactactatgacatggagagcatggtgcacgccgacaccaggagcttcatcctgaagaagcccaagctgtctgaggaggtggtggtggcccccaaccaggagagcggcatgaagacagctgacagcctgcgggtgctgagcggccacctgatgcagacccgggacctggtgcagcctgacaagccagccagccccaagttcatcgtgaccctggatggagtgcccagccccccaggctacatgtctgaccaggaggaggacatgtgctttgagggcatgaagcctgtgaaccagacagctgccagcaacaagggcctgcggggcctgctgcacccccagcagctgcacctgctgagccggcagctggaggaccccaacggcagcttcagcaatgctgagatgtctgagctgtctgtggcccagaagccagagaagctgctggagcgctgcaagtactggccagcctgcaagaatggagatgaatgtgcctaccaccaccccatcagcccctgcaaggccttccccaactgcaagtttgctgagaagtgcctgtttgtgcaccccaactgcaagtatgatgccaagtgcaccaagccagactgccccttcacccacgtgtcccggcgcatccctgtgctgagccccaagcctgtggcccccccagccccacccagcagcagccagctgtgccgctacttccctgcctgcaagaagatggagtgccccttctaccaccccaagcactgccgcttcaacacccagtgcaccaggccagactgcaccttctaccaccccaccatcaacgtgcccccaagacatgccctgaagtggatccggccccagaccagcgagtag

SEQ ID NO: 60676 - DNA, 1956 bp, Artificial Sequence
  derived and/or modified sequence
tgaagcgacaccaacatcttcgacagcaacgtgcccagcaacaagtctaatttcagcaggggagatgagaggcgtcacgaggccgccgttccccccttggcaattcctagcgcacgccccgaaaaacgggattcccgagtgtcaacctcctcccaggagtctaaaacaacaaatgttcgccagacctatgatgacggtgccgccaccaggctcatgtcaacagttaagccgctcagagagcccgctccaagcgaagacgtgatcgacatcaagccagagcccgacgacttaatcgacgaggacctgaactttgtccaggaaaatcctctgagccagaaaaaacctaccgtaacactcacttacgggagtagtcgcccatccattgaaatttaccgaccgcccgcgtctcgaaacgccgattcaggcgtgcacctgaaccggttacagttccagcaacagcagaattccatacatgccgcaaaacagctggatatgcaatctagttgggtctatgaaacaggacggttatgcgagcctgaggttctgaactcccttgaggaaacatacagcccctttttccgcaacaacagcgaaaagatgtcaatggaggatgagaattttaggaagaggaagcttcctgttgtgagttctgttgtgaaggtcaagaaatttaatcatgatggggaagaggaggaagaggacgatgactatggctcacgtacgggctcaatctcaagcagcgtcagtgttccagccaagcccgaacgcaggccatcccttccaccctctaaacaggccaacaaaaatcttattctgaaagccatttcagaggcccaggagtcagtgacaaaaaccactaactattccaccgttccccagaaacagacactccccgtggctccacggaccagaacctcccaggaggagctcttggccgaggtggtgcagggccagagcagaacgcctagaatttcaccgcctataaaagaagaggagaccaagggcgacagcgtcgaaaaaaaccagggaactcagcagcggcagctcctatccaggctgcagatcgacccagtgatggccgaaacactgcagatgagtcaggattactatgatatggagtctatggtccatgcagatactcgctcattcattttaaagaagccaaaactctccgaggaggtagtagtggccccaaatcaggaatccgggatgaagacagcagattctctgagagtgctcagcggccacctcatgcaaacgagagacttggtgcagccagacaaacctgcttcgccgaaatttattgtgaccctcgatggtgtaccctctcccccagggtacatgagcgaccaggaagaagacatgtgctttgagggaatgaagccagtgaaccagacagccgcctctaacaaaggactcagagggctgctccaccctcaacagctgcacctccttagcagacagctcgaagacccaaacggcagcttcagtaacgcggaaatgtccgagctctctgtggctcagaaacctgagaagctcctagaacgctgtaagtactggcctgcatgtaagaacggagacgagtgcgcctatcaccatcctataagtccctgcaaagcctttcccaattgcaaattcgcagagaaatgcctattcgtgcatcccaattgtaagtacgatgccaagtgcaccaagcccgactgcccctttacgcacgtgtcgcgccgcatccccgtcctgagtcctaagcccgttgcgcctcctgctcccccaagctcttcccagctgtgccggtactttcctgcatgcaaaaaaatggaatgccctttttatcatccaaaacactgcagattcaacacccaatgcaccagacccgattgcacattctatcatccgaccatcaatgtgcccccaagacacgcactaaaatggatccgtccccaaacgagtgagtag

SEQ ID NO: 60677 - DNA, 1956 bp, Artificial Sequence
  derived and/or modified sequence
tgatcagatactaacatatttgactccaacgtaccttcaaacaagtccaacttttctagaggagatgaaagaaggcatgaagccgcagtgccgccactggccatccccagcgccagaccggagaagagggacagccgggtgtcaacaagctcacaggaatccaagacaaccaatgttcgacagacatatgatgacggtgccgcaacaaggcttatgagtaccgtcaagcccctccgcgagcccgctccctcggaagatgtgatcgatattaaaccagagcctgacgatcttatcgacgaagacttgaactttgtgcaggaaaacccactgagccagaagaaaccaaccgtcactctaacgtatggctcatcacgtccgagtatagaaatctatcgccctcccgcatcgcgaaatgctgattctggcgtgcacctgaatcgtctgcagtttcagcagcagcagaacagcattcatgccgctaagcagctggatatgcagtctagctgggtctacgagactggtcgtttgtgcgaacctgaggtacttaattcattggaagaaacatatagcccattcttccgcaacaatagcgagaaaatgagcatggaggacgagaacttccgcaagcgcaagctgcccgtggtgagtagtgtggtaaaggttaaaaagttcaaccacgatggcgaggaggaggaggaggacgatgattacggctcaagaactgggtccataagttcaagcgtgtctgtgcccgctaagcccgagagacgaccctctctgcccccttctaaacaggcgaataagaaccttatcctgaaagcgattagtgaggcccaagaaagcgtgactaagactacaaattacagcacagtcccccagaagcagacactgccagttgccccacggacacggacttctcaggaggaactcctggctgaggtggtgcaggggcagagtaggacaccaaggatttcaccacctatcaaggaggaggaaaccaaaggggactccgtagagaagaatcagggcactcagcagcggcagctgctgtctagactgcagattgatcccgttatggccgagacgttgcagatgagccaggattactacgatatggaaagcatggtgcacgctgatactagaagctttattctcaagaaaccaaagctgtccgaggaggtagtcgtggcccctaatcaggagtccgggatgaagacggctgatagtcttagggtactctctggtcacctgatgcagactcgggaccttgttcaacccgataagcccgcatcccccaaattcatcgtcacactggatggcgtgcctagccctccgggatacatgtcagatcaggaggaggatatgtgttttgaaggcatgaagccagtgaatcagactgccgcttctaacaaaggactgagagggctgcttcacccccagcagctgcatttactcagcagacagttagaagacccaaacggttccttttcgaacgctgagatgtcggaactgtcggttgctcaaaaacctgaaaagctgcttgaacggtgcaagtattggcccgcatgtaaaaatggggatgagtgtgcctatcaccatccaatctccccatgcaaagccttcccaaactgtaagttcgcagaaaagtgcttgtttgtgcatcccaattgtaagtacgatgcaaagtgcaccaagccagactgcccgtttacacatgtatcaaggcggatccctgtcctgtcaccaaagccggtcgcacctcctgcccctccttcgagctcacagctgtgtcgctacttccctgcctgcaagaaaatggaatgtcccttttaccatccaaagcactgcaggttcaacactcagtgcactcgtcctgattgtactttctaccatcccacaatcaacgtgcccccacgccacgccctaaaatggatacgccctcagacaagcgaatag

SEQ ID NO: 60678 - DNA, 2092 bp, Artificial Sequence
  derived and/or modified sequence
cttctgataccaacatctttgatagtaacgtgccttcaaacaagagcaatttcagtcggggagatgagaggaggcatgaagctgcagtgccaccacttgccattcctagcgcgagacctgaaaaaagagattccagagtttctacaagttcgcaggagtcaaaaaccacaaatgtcagacagacttacgatgatggagctgcaacccgactaatgtcaacagtgaaacctttgagggagccagcaccctctgaagatgtgattgatattaagccagaaccagatgatctcattgacgaagacctcaactttgtgcaggagaatcccttatctcagaaaaaacctacagtgacacttacatatggttcttctcgcccttctattgaaatttatcgaccacctgcaagtagaaatgcagatagtggtgttcatttaaacaggttgcaatttcaacagcagcagaatagtattcatgctgccaagcagcttgatatgcagagtagttgggtatatgaaacaggacgtttgtgtgaaccagaggtgcttaacagcttagaagaaacgtatagtccgttctttagaaacaactcggagaaaatgagtatggaggatgaaaactttcggaagagaaagttgcctgtggtaagttcagttgttaaagtaaaaaaattcaatcatgatggagaagaggaggaagaagatgatgattacgggtctcgaacaggaagcatctccagcagtgtgtctgtgcctgcaaagcctgaaaggagaccttctcttccaccttctaaacaagctaacaagaatctgattttgaaggctatatctgaagctcaagaatccgtaacaaaaacaactaactactctacagttccacagaaacagacacttccagttgctcccagaactcgaacttctcaagaagaattgctagcagaagtggtccagggacaaagtaggacccccagaataagtccccccattaaagaagaggaaacaaaaggagattctgtagaaaaaaatcaaggaactcaacagaggcaattattatcccgactgcaaatcgacccagtaatggcagaaactctgcagatgagtcaagattactatgacatggaatccatggtccatgcagacacaagatcatttattctgaagaagccaaagctgtctgaggaagtagtagtggcaccaaaccaagagtcggggatgaagactgcagattcccttcgggtactttcaggacaccttatgcagacacgagatcttgtacaaccagataaacctgcaagtcccaagtttatagtgacgctggatggtgtccccagccccccaggatacatgtcagatcaagaggaggacatgtgctttgaaggaatgaaacccgtaaaccaaactgcagcctcaaacaagggactcagaggtctcctccacccacagcagttgcacttgctgagcaggcagcttgaggacccaaatggtagcttttctaacgctgagatgagtgaactgagtgtggcacagaaaccagaaaaacttttggagcgctgcaagtactggcctgcttgtaaaaatggggatgagtgtgcctaccatcaccccatctcaccctgcaaagccttccccaattgtaaatttgctgaaaaatgtttgtttgttcacccaaattgtaaatatgatgcaaagtgtactaaaccagattgtcccttcactcatgtgagtagaagaattccagtactgtctccaaaaccagttgcaccaccagcaccaccttccagtagtcagctctgccgttacttccctgcttgtaagaagatggaatgtcccttctatcatccaaaacattgtaggtttaacactcaatgtacaagaccggactgcacattctaccatcccaccattaatgtcccaccacgacatgccttgaaatggattcgacctcaaaccagcgaatagcacccagtcctgcctggcagaagatcatgcagtttggaagttttcatgtactgatgaaagatactctacagaacttgtcaaatctttgaaacttggaatatattgctttcataatatgaagttttattgcctatcta

SEQ ID NO: 60679 - protein, 730 aa, Artificial Sequence
  derived and/or modified sequence
MEIGTEISRKIRSAIKGKLQELGAYVDEELPDYIMVMVANKKSQDQMTEDLSLFLGNNTIRFTVWLHGVLDKLRSVTTEPSSLKSSDTNIFDSNVPSNKSNFSRGDERRHEAAVPPLAIPSARPEKRDSRVSTSSQESKTTNVRQTYDDGAATRLMSTVKPLREPAPSEDVIDIKPEPDDLIDEDLNFVQENPLSQKKPTVTLTYGSSRPSIEIYRPPASRNADSGVHLNRLQFQQQQNSIHAAKQLDMQSSWVYETGRLCEPEVLNSLEETYSPFFRNNSEKMSMEDENFRKRKLPVVSSVVKVKKFNHDGEEEEEDDDYGSRTGSISSSVSVPAKPERRPSLPPSKQANKNLILKAISEAQESVTKTTNYSTVPQKQTLPVAPRTRTSQEELLAEVVQGQSRTPRISPPIKEEETKGDSVEKNQGTQQRQLLSRLQIDPVMAETLQMSQDYYDMESMVHADTRSFILKKPKLSEEVVVAPNQESGMKTADSLRVLSGHLMQTRDLVQPDKPASPKFIVTLDGVPSPPGYMSDQEEDMCFEGMKPVNQTAASNKGLRGLLHPQQLHLLSRQLEDPNAEMSELSVAQKPEKLLERCKYWPACKNGDECAYHHPISPCKAFPNCKFAEKCLFVHPNCKYDAKCTKPDCPFTHVSRRIPVLSPKPVAPPAPPSSSQLCRYFPACKKMECPFYHPKHCRFNTQCTRPDCTFYHPTINVPPRHALKWIRPQTSE

SEQ ID NO: 60680 - DNA, 2193 bp, Artificial Sequence
  derived and/or modified sequence
atggagatcggcaccgagatcagcagaaagatcagaagcgccatcaagggcaagctgcaggagctgggcgcctacgtggacgaggagctgcccgactacatcatggtgatggtggccaacaagaagagccaggaccagatgaccgaggacctgagcctgttcctgggcaacaacaccatcagattcaccgtgtggctgcacggcgtgctggacaagctgagaagcgtgaccaccgagcccagcagcctgaagagcagcgacaccaacatcttcgacagcaacgtgcccagcaacaagagcaacttcagcagaggcgacgagagaagacacgaggccgccgtgccccccctggccatccccagcgccagacccgagaagagagacagcagagtgagcaccagcagccaggagagcaagaccaccaacgtgagacagacctacgacgacggcgccgccaccagactgatgagcaccgtgaagcccctgagagagcccgcccccagcgaggacgtgatcgacatcaagcccgagcccgacgacctgatcgacgaggacctgaacttcgtgcaggagaaccccctgagccagaagaagcccaccgtgaccctgacctacggcagcagcagacccagcatcgagatctacagaccccccgccagcagaaacgccgacagcggcgtgcacctgaacagactgcagttccagcagcagcagaacagcatccacgccgccaagcagctggacatgcagagcagctgggtgtacgagaccggcagactgtgcgagcccgaggtgctgaacagcctggaggagacctacagccccttcttcagaaacaacagcgagaagatgagcatggaggacgagaacttcagaaagagaaagctgcccgtggtgagcagcgtggtgaaggtgaagaagttcaaccacgacggcgaggaggaggaggaggacgacgactacggcagcagaaccggcagcatcagcagcagcgtgagcgtgcccgccaagcccgagagaagacccagcctgccccccagcaagcaggccaacaagaacctgatcctgaaggccatcagcgaggcccaggagagcgtgaccaagaccaccaactacagcaccgtgccccagaagcagaccctgcccgtggcccccagaaccagaaccagccaggaggagctgctggccgaggtggtgcagggccagagcagaacccccagaatcagcccccccatcaaggaggaggagaccaagggcgacagcgtggagaagaaccagggcacccagcagagacagctgctgagcagactgcagatcgaccccgtgatggccgagaccctgcagatgagccaggactactacgacatggagagcatggtgcacgccgacaccagaagcttcatcctgaagaagcccaagctgagcgaggaggtggtggtggcccccaaccaggagagcggcatgaagaccgccgacagcctgagagtgctgagcggccacctgatgcagaccagagacctggtgcagcccgacaagcccgccagccccaagttcatcgtgaccctggacggcgtgcccagcccccccggctacatgagcgaccaggaggaggacatgtgcttcgagggcatgaagcccgtgaaccagaccgccgccagcaacaagggcctgagaggcctgctgcacccccagcagctgcacctgctgagcagacagctggaggaccccaacgccgagatgagcgagctgagcgtggcccagaagcccgagaagctgctggagagatgcaagtactggcccgcctgcaagaacggcgacgagtgcgcctaccaccaccccatcagcccctgcaaggccttccccaactgcaagttcgccgagaagtgcctgttcgtgcaccccaactgcaagtacgacgccaagtgcaccaagcccgactgccccttcacccacgtgagcagaagaatccccgtgctgagccccaagcccgtggccccccccgccccccccagcagcagccagctgtgcagatacttccccgcctgcaagaagatggagtgccccttctaccaccccaagcactgcagattcaacacccagtgcaccagacccgactgcaccttctaccaccccaccatcaacgtgccccccagacacgccctgaagtggatcagaccccagaccagcgagtag

SEQ ID NO: 60681 - DNA, 2193 bp, Artificial Sequence
  derived and/or modified sequence
atggagataggaactgagatctctaggaagattaggtctgccattaaggggaagcttcaggaactgggtgcgtacgtagacgaggaactcccagattatattatggttatggtggcaaataaaaagtctcaagaccaaatgaccgaagacctgtctttatttctcggtaacaacaccattaggtttaccgtctggctgcatggtgtgcttgacaagctgcgaagtgtcaccacagagccatcatctcttaaatcaagtgacaccaacatttttgattctaatgtgcctagtaacaagtctaacttcagtcgaggggacgagagaagacatgaggccgctgtcccaccgctggcaatcccaagtgcacgccctgagaaacgcgactcccgtgtgagtaccagctctcaagagtccaaaaccaccaatgtgagacagacatatgatgatggtgccgcaacccgcctgatgtccactgtgaaacctttacgtgaacccgccccctcagaagatgtcattgatatcaaacccgaacctgatgaccttattgatgaagacctgaacttcgttcaggagaatccgctctcacagaaaaaacccactgtaacactaacctacggcagttctcgccccagcatagagatttatcgtcctccagcttcccgcaatgctgatagcggagtgcacctgaatcgattgcagttccaacaacaacaaaactcaatacatgctgcaaaacagctcgatatgcagagctcatgggtgtatgaaacagggcggctgtgtgaaccagaagtgcttaactctctggaagagacttattccccgttctttcgcaataattccgaaaagatgtccatggaagatgaaaattttcggaaaagaaagctgccagtcgtttccagcgtagtcaaggttaaaaaatttaatcacgacggcgaggaggaagaagaggatgacgattatggctcccggacaggtagcatctcgtcgtcagtgagcgtacctgcaaaacccgagcgcagaccgtccctcccccctagtaaacaagctaataaaaacctgattttgaaggccatcagcgaagcccaagagtctgtgacaaagacaacaaactattccactgtcccccagaagcagacccttcccgtggccccgcgcacgcgtacctcccaggaggaacttctagccgaggtggtacagggacaatctaggactcctcggatcagtccccctattaaagaggaagaaacaaagggagactccgtagaaaagaaccagggcacgcagcagcgacagttactgagccggctccagattgacccagtgatggctgaaaccctgcaaatgagccaggactactatgacatggagtccatggtccatgccgatacccgatcatttatcctgaaaaagccaaaacttagcgaggaggtcgtcgtggcacctaatcaagagagcgggatgaagaccgcagatagtcttcgcgtactgagcggccacctgatgcaaacaagggaccttgtgcagccagataagcctgccagtcctaagttcattgtgaccctagatggcgtgccaagccccccgggatacatgtctgaccaggaggaggatatgtgcttcgagggaatgaaacccgtcaatcaaaccgccgcatctaacaaaggtcttagagggttacttcatccacagcagctccatttgctctcccgacagttggaagacccgaacgctgagatgtccgaattaagcgtggcccagaaacctgagaaacttctagaacgatgcaagtattggcccgcctgtaaaaacggcgatgaatgcgcatatcaccaccctatttccccctgcaaggctttccctaactgtaagttcgcagagaagtgtctgtttgtgcatccaaactgcaagtatgacgccaaatgtacgaagcccgattgtcctttcacccacgtatctagaaggatccccgtcctgagtccgaagcccgtggcgccacccgcacctccgtcatcttctcaactatgccgatatttccctgcctgcaagaagatggagtgtccgttctaccaccctaaacactgcagattcaacacccaatgcacccgtccagactgcactttttatcaccccactatcaacgttccaccacgacacgcccttaaatggatacgtccccagacctcagaatag

SEQ ID NO: 60682 - DNA, 2193 bp, Artificial Sequence
  derived and/or modified sequence
atggagattggaacagagatcagcaggaagatccgcagcgccatcaagggcaagctgcaggagctgggcgcctacgtggatgaggagctgcctgactacatcatggtgatggtggccaacaagaagagccaggaccagatgacagaggacctgagcctcttcctgggcaacaacaccatccgcttcaccgtgtggctgcatggagtgctggacaagctgcggtctgtgaccacagagcccagcagcctgaagagcagtgacaccaacatctttgacagcaatgtgcccagcaacaagagcaacttcagcagaggagatgagaggagacatgaggccgctgtgccccccctggccatccccagcgcccggcctgagaagagggacagccgggtgtccaccagcagccaggagagcaagaccaccaacgtgcggcagacctatgatgatggagctgccacccggctgatgagcacagtgaagcccctgcgggagcccgcccccagtgaagatgtgattgacatcaagccagagccagatgacctgattgatgaggacctgaactttgtgcaggagaaccccctgagccagaagaagcccaccgtgaccctgacctacggcagcagccggcccagcattgagatctacagacctccagccagcagaaatgctgacagcggcgtgcacctgaaccggctgcagttccagcagcagcagaacagcatccatgctgccaagcagctggacatgcagagctcctgggtgtatgaaacaggccgcctgtgtgagcctgaggtgctgaacagcctggaggagacctacagccccttcttcaggaacaacagcgagaagatgtccatggaggatgagaacttcaggaagaggaagctgcctgtggtgtcctctgtggtgaaggtgaagaagttcaaccatgatggagaggaggaggaggaggatgatgattatggcagcaggacaggcagcatcagcagctctgtgtctgtgcctgccaagccagagcggcggcccagcctgccccccagcaagcaggccaacaagaacctgatcctgaaggccatcagcgaggcccaggagagcgtgaccaagaccaccaactacagcacagtgccccagaagcagaccctgcctgtggcccccaggaccaggaccagccaggaggagctgctggccgaggtggtgcagggccagagcaggaccccccgcatcagcccccccatcaaggaggaggagaccaagggggacagcgtggagaagaaccagggcacccagcagaggcagctgctgagccggctgcagattgatcctgtgatggccgagaccctgcagatgagccaggactactatgacatggagagcatggtgcacgccgacaccaggagcttcatcctgaagaagcccaagctgtctgaggaggtggtggtggcccccaaccaggagagcggcatgaagacagctgacagcctgcgggtgctgagcggccacctgatgcagacccgggacctggtgcagcctgacaagccagccagccccaagttcatcgtgaccctggatggagtgcccagccccccaggctacatgtctgaccaggaggaggacatgtgctttgagggcatgaagcctgtgaaccagacagctgccagcaacaagggcctgcggggcctgctgcacccccagcagctgcacctgctgagccggcagctggaggaccccaatgctgagatgtctgagctgtctgtggcccagaagccagagaagctgctggagcgctgcaagtactggccagcctgcaagaatggagatgaatgtgcctaccaccaccccatcagcccctgcaaggccttccccaactgcaagtttgctgagaagtgcctgtttgtgcaccccaactgcaagtatgatgccaagtgcaccaagccagactgccccttcacccacgtgagccgccgcatccctgtgctgagccccaagcctgtggcccccccagccccacccagcagcagccagctgtgccgctacttccctgcctgcaagaagatggagtgccccttctaccaccccaagcactgccgcttcaacacccagtgcaccaggccagactgcaccttctaccaccccaccatcaacgtgccccccaggcatgccctgaagtggatccggccccagaccagcgagtag

SEQ ID NO: 60683 - DNA, 2193 bp, Artificial Sequence
  derived and/or modified sequence
atggagatcggcaccgagatcagccggaagatccggagcgccatcaaggggaagctgcaagaactgggcgcttatgtggatgaggagttgcccgactacataatggttatggttgccaacaagaaatctcaggaccagatgactgaagacctctccctgttcttgggtaacaatactatccggtttactgtgtggctgcatggagtgctggacaagttaagatcggtaactaccgagcctagttccctgaagagttctgataccaacatattcgattccaatgtccccagtaataaatcgaactttagtcgcggcgacgaacgccggcacgaagctgctgtacctccgctggctattccgtccgcacgtcccgagaagcgggattccagggttagcacctcctcccaagaatcaaaaaccacaaatgtacgtcagacttatgatgacggcgcagcaacccgattgatgagcacagtaaaacccctgagggaacctgctccatctgaggacgtgatagacattaagcccgaacccgacgacctgatcgatgaagacctcaatttcgttcaagagaatccactatctcaaaagaaacctaccgtgaccttgacatacgggtcatcgaggccatcgatcgaaatataccgtccacccgctagcaggaacgcggatagtggagtacacctgaaccggttgcagtttcagcaacagcagaatagcatccacgctgctaaacagctcgacatgcagtcctcttgggtttacgagactggacggctctgtgaaccagaagtactgaactcactggaggaaacatatagccccttcttcagaaacaattcagagaaaatgagtatggaagacgagaacttcaggaaacgaaagcttccggtcgtgtctagtgtggtcaaagttaaaaagtttaaccacgacggggaggaggaggaggaggatgatgactatggatcacgcaccggctcgataagcagctccgtgtccgtgcccgcgaaacccgagaggcgaccaagtttgccgccttccaaacaggcaaataaaaatttgatcctcaaggctatcagcgaggctcaggaatcagtaactaagactaccaactatagcacagtgcctcagaagcagactctgcccgtcgctcctaggaccaggacatcccaggaggagcttcttgccgaggttgtgcagggccaatctagaaccccccggatttctcctccaattaaagaggaggaaactaaaggcgacagcgtcgagaaaaaccagggcactcaacagcgccaactcttatctcggctccagatcgatcccgtcatggcagagacccttcagatgtcacaggattactacgacatggagagtatggtacacgctgatactcgctctttcatattgaagaaaccaaaactgagtgaagaggtggttgtggcacccaaccaggagagcggcatgaaaactgccgatagtttgagggtcctttctggccatctcatgcagacaagggacctcgtgcagcctgacaaacccgccagtcctaagttcatcgtcactctggatggagtgcccagccccccgggctacatgagcgatcaggaggaggacatgtgttttgaggggatgaagccagtcaaccaaaccgccgcctctaacaagggtctgagaggcctgctccatccacaacaactgcacctgctctctaggcaattggaggatcccaatgccgaaatgtctgagctgtcagtggcccagaaaccagagaaactgctggaaaggtgcaaatattggcctgcatgcaagaatggcgatgagtgtgcataccatcaccctatttcgccttgcaaagccttccctaactgtaagtttgctgaaaagtgtcttttcgtacaccccaattgcaagtatgacgctaagtgtacgaagccggattgtcctttcacccatgtgagtcgccggatccccgtgcttagtcccaagcccgttgccccacccgctccgccctcttcctcccaactttgtcggtatttcccagcctgtaaaaaaatggagtgtcccttttaccatcctaagcactgtcgttttaacacacaatgtacaagaccagattgcaccttctaccatcctacaatcaacgtcccccccagacacgccctcaaatggatcagacctcagactagtgagtag

SEQ ID NO: 60684 - DNA, 2193 bp, Artificial Sequence
  derived and/or modified sequence
atggaaatcgggaccgagatctctagaaaaatccgcagcgccattaaaggtaaactgcaagaactgggtgcttacgtagacgaggaattacccgactatatcatggtgatggtggctaacaaaaaatctcaggatcagatgactgaggacctgtcactctttctggggaacaacactattcgttttacggtgtggctgcatggagtgcttgacaaactcagatccgtgaccacagaaccctcaagtttgaagagctccgatacgaacatattcgactcaaacgttccaagcaataagagcaacttttcacgtggcgatgaacgcagacatgaagcggctgtgccccctttagccatcccttcagctaggccagaaaagagagattcacgagtttcaacttcttcccaagaaagtaagacaacaaacgtgaggcagacttatgacgacggcgcagccaccaggctcatgtcaacagtgaaacccctccgggagccggcaccttccgaagacgttatcgacatcaagcccgaacccgacgatctgatcgatgaggacctgaattttgtccaagaaaatccactatcacagaagaaaccaaccgttaccctgacctatggatcaagtaggccatcgatagaaatctatcggccaccggcatcacgaaacgccgattctggtgtgcacctgaatcgcttgcagtttcagcaacagcagaattccattcatgctgccaaacagctcgatatgcagagcagctgggtgtatgagacggggcgactctgtgagcccgaggtcctaaatagcttggaggagacctactcccctttcttcagaaataattctgagaaaatgtccatggaagatgagaacttcagaaagcgtaaactccccgtcgtaagctctgtcgttaaggtgaagaagtttaatcatgacggagaggaagaggaggaggatgacgattatgggtctaggacaggctcaataagcagcagtgtgtccgtgccggcaaagcctgagcgccgaccgtctcttcctccaagtaagcaggctaacaagaaccttatcttgaaagcaatctcggaggctcaggagtcagtcaccaagaccactaactatagcaccgtcccccagaagcagaccctgccagtcgcaccacggaccagaacttctcaagaggagctgctggccgaagtagtccaaggccaatctcgcacccctcggatcagtcctcctataaaagaggaagagacaaaaggggatagcgttgaaaaaaaccaggggacacagcagcggcagcttttatcacgactccagatcgatcctgtgatggcagaaaccctgcagatgagtcaggactattacgacatggaatcaatggtgcatgccgatactagatcattcattctaaaaaagccgaaattgtctgaagaggttgtcgtcgcgcctaaccaggagtcaggtatgaaaactgcggactcacttcgggttcttagcggacacctcatgcagacaagggacctggtgcagcccgacaagcccgcttccccaaagttcatcgtcactttggacggcgtgccatcacctcctggatacatgtctgaccaggaggaggatatgtgtttcgaaggaatgaagcccgtgaatcagaccgccgctagcaataaaggcctgcgcggtctgctccatccccagcagctacatctcctgtcacgccaacttgaggatccgaacgcagagatgagcgagctgagcgtggctcagaagccagagaaactcttagagagatgtaagtactggcccgcatgcaagaatggcgacgagtgcgcctaccaccatcctattagcccttgcaaagcctttcccaactgcaaattcgccgagaagtgtctcttcgtgcatccaaactgtaaatatgatgctaagtgtactaaacctgactgtccttttacccatgtctcacgcagaatccccgtgttaagtcctaaacccgtagctccccctgcccctccatcttcctcccaattgtgccgctattttccggcatgcaagaagatggagtgcccgttctatcaccccaagcactgtcgcttcaacacgcagtgtacaagacctgattgtaccttctaccatccgactataaacgttcctccacgccacgctctgaaatggatacggcctcagaccagcgagtag

SEQ ID NO: 60685 - DNA, 2529 bp, Artificial Sequence
  derived and/or modified sequence
gaggcggtggtgtcccggctgcggggtaggagtccgcggcagcctccgggtaagccaagcgccgcgcagtgctgagttcccgcacgccgcagagccatggagatcggcaccgagatcagccgcaagatccggagtgccattaaggggaaattacaagaattaggagcttatgttgatgaagaacttcctgattacattatggtgatggtggccaacaagaaaagtcaggaccaaatgacagaggatctgtccctgtttctagggaacaacacaattcgattcaccgtatggcttcatggtgtattagataaacttcgctctgttacaactgaaccctctagtctgaagtcttctgataccaacatctttgatagtaacgtgccttcaaacaagagcaatttcagtcggggagatgagaggaggcatgaagctgcagtgccaccacttgccattcctagcgcgagacctgaaaaaagagattccagagtttctacaagttcgcaggagtcaaaaaccacaaatgtcagacagacttacgatgatggagctgcaacccgactaatgtcaacagtgaaacctttgagggagccagcaccctctgaagatgtgattgatattaagccagaaccagatgatctcattgacgaagacctcaactttgtgcaggagaatcccttatctcagaaaaaacctacagtgacacttacatatggttcttctcgcccttctattgaaatttatcgaccacctgcaagtagaaatgcagatagtggtgttcatttaaacaggttgcaatttcaacagcagcagaatagtattcatgctgccaagcagcttgatatgcagagtagttgggtatatgaaacaggacgtttgtgtgaaccagaggtgcttaacagcttagaagaaacgtatagtccgttctttagaaacaactcggagaaaatgagtatggaggatgaaaactttcggaagagaaagttgcctgtggtaagttcagttgttaaagtaaaaaaattcaatcatgatggagaagaggaggaagaagatgatgattacgggtctcgaacaggaagcatctccagcagtgtgtctgtgcctgcaaagcctgaaaggagaccttctcttccaccttctaaacaagctaacaagaatctgattttgaaggctatatctgaagctcaagaatccgtaacaaaaacaactaactactctacagttccacagaaacagacacttccagttgctcccagaactcgaacttctcaagaagaattgctagcagaagtggtccagggacaaagtaggacccccagaataagtccccccattaaagaagaggaaacaaaaggagattctgtagaaaaaaatcaaggaactcaacagaggcaattattatcccgactgcaaatcgacccagtaatggcagaaactctgcagatgagtcaagattactatgacatggaatccatggtccatgcagacacaagatcatttattctgaagaagccaaagctgtctgaggaagtagtagtggcaccaaaccaagagtcggggatgaagactgcagattcccttcgggtactttcaggacaccttatgcagacacgagatcttgtacaaccagataaacctgcaagtcccaagtttatagtgacgctggatggtgtccccagccccccaggatacatgtcagatcaagaggaggacatgtgctttgaaggaatgaaacccgtaaaccaaactgcagcctcaaacaagggactcagaggtctcctccacccacagcagttgcacttgctgagcaggcagcttgaggacccaaatgctgagatgagtgaactgagtgtggcacagaaaccagaaaaacttttggagcgctgcaagtactggcctgcttgtaaaaatggggatgagtgtgcctaccatcaccccatctcaccctgcaaagccttccccaattgtaaatttgctgaaaaatgtttgtttgttcacccaaattgtaaatatgatgcaaagtgtactaaaccagattgtcccttcactcatgtgagtagaagaattccagtactgtctccaaaaccagttgcaccaccagcaccaccttccagtagtcagctctgccgttacttccctgcttgtaagaagatggaatgtcccttctatcatccaaaacattgtaggtttaacactcaatgtacaagaccggactgcacattctaccatcccaccattaatgtcccaccacgacatgccttgaaatggattcgacctcaaaccagcgaatagcacccagtcctgcctggcagaagatcatgcagtttggaagttttcatgtactgatgaaagatactctacagaacttgtcaaatctttgaaacttggaatatattgctttcataatatgaagttttattgcctatctatctgaagtgtctaatttttcaagtttgtaagtttattatgtggttttaacattgggtgtttttgttttgtttttactatgaaaagacagcttaaggaagagct

SEQ ID NO: 60686 - protein, 596 aa, Artificial Sequence
  derived and/or modified sequence
MGNLKSVAQEPGPPCGLGLGLGLGLCGKQGPATPAPEPSRAPASLLPPAPEHSPPSSPLTQPPEGPKFPRVKNWEVGSITYDTLSAQAQQDGPCTPRRCLGSLVFPRKLQGRPSPGPPAPEQLLSQARDFINQYYSSIKRSGSQAHEQRLQEVEAEVAATGTYQLRESELVFGAKQAWRNAPRCVGRIQWGKLQVFDARDCRSAQEMFTYICNHIKYATNRGNLRSAITVFPQRCPGRGDFRIWNSQLVRYAGYRQQDGSVRGDPANVEITELCIQHGWTPGNGRFDVLPLLLQAPDDPPELFLLPPELVLEVPLEHPTLEWFAALGLRWYALPAVSNMLLEIGGLEFPAAPFSGWYMSTEIGTRNLCDPHRYNILEDVAVCMDLDTRTTSSLWKDKAAVEINVAVLHSYQLAKVTIVDHHAATASFMKHLENEQKARGGCPADWAWIVPPISGSLTPVFHQEMVNYFLSPAFRYQPDPWKGSAAKGTGITRKKTFKEVANAVKISASLMGTVMAKRVKATILYGSETGRAQSYAQQLGRLFRKAFDPRVLCMDEYDVVSLEHETLVLVVTSTFGNGDPPENGESVSLPEVSVTTE

SEQ ID NO: 60687 - DNA, 2040 bp, Artificial Sequence
  derived and/or modified sequence
atgggcaacttgaagagcgtggcccaggagcctgggccaccctgcggcctggggctggggctgggccttgggctgtgcggcaagcagggcccagccaccccggcccctgagcccagccgggccccagcatccctactcccaccagcgccagaacacagccccccgagctccccgctaacccagcccccagaggggcccaagttccctcgtgtgaagaactgggaggtggggagcatcacctatgacaccctcagcgcccaggcgcagcaggatgggccctgcaccccaagacgctgcctgggctccctggtatttccacggaaactacagggccggccctcccccggccccccggcccctgagcagctgctgagtcaggcccgggacttcatcaaccagtactacagctccattaagaggagcggctcccaggcccacgaacagcggcttcaagaggtggaagccgaggtggcagccacaggcacctaccagcttagggagagcgagctggtgttcggggctaagcaggcctggcgcaacgctccccgctgcgtgggccggatccagtgggggaagctgcaggtgttcgatgcccgggactgcaggtctgcacaggaaatgttcacctacatctgcaaccacatcaagtatgccaccaaccggggcaaccttcgctcggccatcacagtgttcccgcagcgctgccctggccgaggagacttccgaatctggaacagccagctggtgcgctacgcgggctaccggcagcaggatggctctgtgcggggggacccagccaacgtggagatcaccgagctctgcattcagcacggctggaccccaggaaacggtcgcttcgacgtgctgcccctgctgctgcaggccccagatgatcccccagaactcttccttctgccccccgagctggtccttgaggtgcccctggagcaccccacgctggagtggtttgcagccctgggcctgcgctggtacgccctcccggcagtgtccaacatgctgctggaaattgggggcctggagttccccgcagcccccttcagtggctggtacatgagcactgagatcggcacgaggaacctgtgtgaccctcaccgctacaacatcctggaggatgtggctgtctgcatggacctggatacccggaccacctcgtccctgtggaaagacaaggcagcagtggaaatcaacgtggccgtgctgcacagttaccagctagccaaagtcaccatcgtggaccaccacgccgccacggcctctttcatgaagcacctggagaatgagcagaaggccagggggggctgccctgcagactgggcctggatcgtgccccccatctcgggcagcctcactcctgttttccatcaggagatggtcaactatttcctgtccccggccttccgctaccagccagacccctggaaggggagtgccgccaagggcaccggcatcaccaggaagaagacctttaaagaagtggccaacgccgtgaagatctccgcctcgctcatgggcacggtgatggcgaagcgagtgaaggcgacaatcctgtatggctccgagaccggccgggcccagagctacgcacagcagctggggagactcttccggaaggcttttgatccccgggtcctgtgtatggatgagtatgacgtggtgtccctcgaacacgagacgctggtgctggtggtaaccagcacatttgggaatggggatcccccggagaatggagagtctgtctccctgccagaagtgtctgtcaccacagaatagtttcgcctgctctagaacggcacctagatggaagcacgcagtgttgcggcgtctcctgctgaggctgtttttgaggcgcactcgtgttgctgcgtgactcagtatttcactcattctgctgctgagtgccgttcattgtgtgaatatccccagtttgtttacccattctcttgttggtgacacttgggctgtttccaggtcggggctattatgaataaacctgttatgaacattcttgtaaaaaaaaaa

SEQ ID NO: 60688 - protein, 125 aa, Artificial Sequence
  derived and/or modified sequence
MPPHPAIFFYCLLRQGLTMLPRLVLNFWAQAVHLPRPPRVLGLQAGGTAPGQKKLFLTSHFPPASPLPLCFSLQQNFKKHSPRSPPGILGSLYPGFCSPIATSPFAKGTRGLRVVGSSGRLSASS

SEQ ID NO: 60689 - protein, 614 aa, Artificial Sequence
  derived and/or modified sequence
MGNLKSVAQEPGPPCGLGLGLGLGLCGKQGPATPAPEPSRAPASLLPPAPEHSPPSSPLTQPPEGPKFPRVKNWEVGSITYDTLSAQAQQDGPCTPRRCLGSLVFPRKLQGRPSPGPPAPEQLLSQARDFINQYYSSIKRSGSQAHEQRLQEVEAEVAATGTYQLRESELVFGAKQAWRNAPRCVGRIQWGKLQVFDARDCRSAQEMFTYICNHIKYATNRGNLRSAITVFPQRCPGRGDFRIWNSQLVRYAGYRQQDGSVRGDPANVEITELCIQHGWTPGNGRFDVLPLLLQAPDDPPELFLLPPELVLEVPLEHPTLEWFAALGLRWYALPAVSNMLLEIGGLEFPAAPFSGWYMSTEIGTRNLCDPHRYNILEDVAVCMDLDTRTTSSLWKDKAAVEINVAVLHSYQLAKVTIVDHHAATASFMKHLENEQKARGGCPADWAWIVPPISGSLTPVFHQEMVNYFLSPAFRYQPDPWKGSAAKGTGITRKKTFKEVANAVKISASLMGTVMAKRVKATILYGSETGRAQSYAQQLGRLFRKAFDPRVLCMDEYDVVSLEHETLVLVVTSTFGNGDPPENGERWGFAMLPRLVSNSWVQAIHLPRPPKVLRL

SEQ ID NO: 60690 - DNA, 2386 bp, Artificial Sequence
  derived and/or modified sequence
atgggcaacttgaagagcgtggcccaggagcctgggccaccctgcggcctggggctggggctgggccttgggctgtgcggcaagcagggcccagccaccccggcccctgagcccagccgggccccagcatccctactcccaccagcgccagaacacagccccccgagctccccgctaacccagcccccagaggggcccaagttccctcgtgtgaagaactgggaggtggggagcatcacctatgacaccctcagcgcccaggcgcagcaggatgggccctgcaccccaagacgctgcctgggctccctggtatttccacggaaactacagggccggccctcccccggccccccggcccctgagcagctgctgagtcaggcccgggacttcatcaaccagtactacagctccattaagaggagcggctcccaggcccacgaacagcggcttcaagaggtggaagccgaggtggcagccacaggcacctaccagcttagggagagcgagctggtgttcggggctaagcaggcctggcgcaacgctccccgctgcgtgggccggatccagtgggggaagctgcaggtgttcgatgcccgggactgcaggtctgcacaggaaatgttcacctacatctgcaaccacatcaagtatgccaccaaccggggcaaccttcgctcggccatcacagtgttcccgcagcgctgccctggccgaggagacttccgaatctggaacagccagctggtgcgctacgcgggctaccggcagcaggatggctctgtgcggggggacccagccaacgtggagatcaccgagctctgcattcagcacggctggaccccaggaaacggtcgcttcgacgtgctgcccctgctgctgcaggccccagatgatcccccagaactcttccttctgccccccgagctggtccttgaggtgcccctggagcaccccacgctggagtggtttgcagccctgggcctgcgctggtacgccctcccggcagtgtccaacatgctgctggaaattgggggcctggagttccccgcagcccccttcagtggctggtacatgagcactgagatcggcacgaggaacctgtgtgaccctcaccgctacaacatcctggaggatgtggctgtctgcatggacctggatacccggaccacctcgtccctgtggaaagacaaggcagcagtggaaatcaacgtggccgtgctgcacagttaccagctagccaaagtcaccatcgtggaccaccacgccgccacggcctctttcatgaagcacctggagaatgagcagaaggccagggggggctgccctgcagactgggcctggatcgtgccccccatctcgggcagcctcactcctgttttccatcaggagatggtcaactatttcctgtccccggccttccgctaccagccagacccctggaaggggagtgccgccaagggcaccggcatcaccaggaagaagacctttaaagaagtggccaacgccgtgaagatctccgcctcgctcatgggcacggtgatggcgaagcgagtgaaggcgacaatcctgtatggctccgagaccggccgggcccagagctacgcacagcagctggggagactcttccggaaggcttttgatccccgggtcctgtgtatggatgagtatgacgtggtgtccctcgaacacgagacgctggtgctggtggtaaccagcacatttgggaatggggatcccccggagaatggagagagatggggtttcgccatgttgcccaggctggtctctaactcctgggttcaagcaatccacctgcctcggcctcccaaagtgctgcgattatagacgtgagccactgcacctggccctcagtatcttaagcaagttggaatctcgtgaaaccctttttgctgccttagtgtccgtttcagccctcattctgacctaccttttcaagaaaaatagcaccagcaattgacttttttttagcataaaggtgtatagacacccatataacctacagccttcacaaggcatagcacattttcaccaccctggaaagttccctcatcagttcctcacgtgaatcccttcccagtctgtctccctgccagaagtgtctgtcaccacagaatagtttcgcctgctctagaacggcacctagatggaagcacgcagtgttgcggcgtctcctgctgaggctgtttttgaggcgcactcgtgttgctgcgtgactcagtatttcactcattctgctgctgagtgccgttcattgtgtgaatatccccagtttgtttacccattctcttgttggtgacacttgggctgtttccaggtcggggctattatgaataaacctgttatgaacattcttgtaaaaaaaaaa

SEQ ID NO: 60691 - protein, 629 aa, Artificial Sequence
  derived and/or modified sequence
MGNLKSVAQEPGPPCGLGLGLGLGLCGKQGPATPAPEPSRAPASLLPPAPEHSPPSSPLTQPPEGPKFPRVKNWEVGSITYDTLSAQAQQDGPCTPRRCLGSLVFPRKLQGRPSPGPPAPEQLLSQARDFINQYYSSIKRSGSQAHEQRLQEVEAEVAATGTYQLRESELVFGAKQAWRNAPRCVGRIQWGKLQVFDARDCRSAQEMFTYICNHIKYATNRGNLRSAITVFPQRCPGRGDFRIWNSQLVRYAGYRQQDGSVRGDPANVEITELCIQHGWTPGNGRFDVLPLLLQAPDDPPELFLLPPELVLEVPLEHPTLEWFAALGLRWYALPAVSNMLLEIGGLEFPAAPFSGWYMSTEIGTRNLCDPHRYNILEDVAVCMDLDTRTTSSLWKDKAAVEINVAVLHSYQLAKVTIVDHHAATASFMKHLENEQKARGGCPADWAWIVPPISGSLTPVFHQEMVNYFLSPAFRYQPDPWKGSAAKGTGITRKKTFKEVANAVKISASLMGTVMAKRVKATILYGSETGRAQSYAQQLGRLFRKAFDPRVLCMDEYDVVSLEHETLVLVVTSTFGNGDPPENGEGLTLWPRLECSSTITAHCSLNLLDSSNPPTSTSQVVGTTGACHDA

SEQ ID NO: 60692 - DNA, 2546 bp, Artificial Sequence
  derived and/or modified sequence
atgggcaacttgaagagcgtggcccaggagcctgggccaccctgcggcctggggctggggctgggccttgggctgtgcggcaagcagggcccagccaccccggcccctgagcccagccgggccccagcatccctactcccaccagcgccagaacacagccccccgagctccccgctaacccagcccccagaggggcccaagttccctcgtgtgaagaactgggaggtggggagcatcacctatgacaccctcagcgcccaggcgcagcaggatgggccctgcaccccaagacgctgcctgggctccctggtatttccacggaaactacagggccggccctcccccggccccccggcccctgagcagctgctgagtcaggcccgggacttcatcaaccagtactacagctccattaagaggagcggctcccaggcccacgaacagcggcttcaagaggtggaagccgaggtggcagccacaggcacctaccagcttagggagagcgagctggtgttcggggctaagcaggcctggcgcaacgctccccgctgcgtgggccggatccagtgggggaagctgcaggtgttcgatgcccgggactgcaggtctgcacaggaaatgttcacctacatctgcaaccacatcaagtatgccaccaaccggggcaaccttcgctcggccatcacagtgttcccgcagcgctgccctggccgaggagacttccgaatctggaacagccagctggtgcgctacgcgggctaccggcagcaggatggctctgtgcggggggacccagccaacgtggagatcaccgagctctgcattcagcacggctggaccccaggaaacggtcgcttcgacgtgctgcccctgctgctgcaggccccagatgatcccccagaactcttccttctgccccccgagctggtccttgaggtgcccctggagcaccccacgctggagtggtttgcagccctgggcctgcgctggtacgccctcccggcagtgtccaacatgctgctggaaattgggggcctggagttccccgcagcccccttcagtggctggtacatgagcactgagatcggcacgaggaacctgtgtgaccctcaccgctacaacatcctggaggatgtggctgtctgcatggacctggatacccggaccacctcgtccctgtggaaagacaaggcagcagtggaaatcaacgtggccgtgctgcacagttaccagctagccaaagtcaccatcgtggaccaccacgccgccacggcctctttcatgaagcacctggagaatgagcagaaggccagggggggctgccctgcagactgggcctggatcgtgccccccatctcgggcagcctcactcctgttttccatcaggagatggtcaactatttcctgtccccggccttccgctaccagccagacccctggaaggggagtgccgccaagggcaccggcatcaccaggaagaagacctttaaagaagtggccaacgccgtgaagatctccgcctcgctcatgggcacggtgatggcgaagcgagtgaaggcgacaatcctgtatggctccgagaccggccgggcccagagctacgcacagcagctggggagactcttccggaaggcttttgatccccgggtcctgtgtatggatgagtatgacgtggtgtccctcgaacacgagacgctggtgctggtggtaaccagcacatttgggaatggggatcccccggagaatggagagggtctcactttgtggcccaggctggagtgcagtagtacaatcacggctcactgcagcctcaacctcctagactcaagcaatcctcccacttcaacctcccaagtagttgggactacaggcgcatgccatgatgcctagctaatttttgtattttttatagagatggggtttcgccatgttgcccaggctggtctctaactcctgggttcaagcaatccacctgcctcggcctcccaaagtgctgcgattatagacgtgagccactgcacctggccctcagtatcttaagcaagttggaatctcgtgaaaccctttttgctgccttagtgtccgtttcagccctcattctgacctaccttttcaagaaaaatagcaccagcaattgacttttttttagcataaaggtgtatagacacccatataacctacagccttcacaaggcatagcacattttcaccaccctggaaagttccctcatcagttcctcacgtgaatcccttcccagtctgtctccctgccagaagtgtctgtcaccacagaatagtttcgcctgctctagaacggcacctagatggaagcacgcagtgttgcggcgtctcctgctgaggctgtttttgaggcgcactcgtgttgctgcgtgactcagtatttcactcattctgctgctgagtgccgttcattgtgtgaatatccccagtttgtttacccattctcttgttggtgacacttgggctgtttccaggtcggggctattatgaataaacctgttatgaacattcttgtaaaaaaaaaa

SEQ ID NO: 60693 - protein, 77 aa, Artificial Sequence
  derived and/or modified sequence
MDVLPMCSIFQELQIVHETGYFSALPSLEEYWQQTCLELERYLQSEPCYVSASEIKFDSQESVDQNHWLGRKRRNPN

SEQ ID NO: 60694 - protein, 281 aa, Artificial Sequence
  derived and/or modified sequence
MDVLPMCSIFQELQIVHETGYFSALPSLEEYWQQTCLELERYLQSEPCYVSASEIKFDSQEDLWTKIILAREKKEESELKISSSPPEDTLISPSFCYNLETNSLNSDVSSESSDSSEELSPTAKFTSDPIGEVLVSSGKLSSSVTSTPPSSPELSREPSQLWGCVPGELPSPGKVRSGTSGKPGDKGNGDASPDGRRRVHRCHFNGCRKVYTKSSHLKAHQRTHTGQCPRGPRRAAAGGRHCIAPALEGAGPGCTGCGQGRQILTSSDVFHQSIRSFWSSE

SEQ ID NO: 60695 - protein, 237 aa, Artificial Sequence
  derived and/or modified sequence
MDVLPMCSIFQELQIVHETGYFSALPSLEEYWQQTCLELERYLQSEPCYVSASEIKFDSQEDLWTKIILAREKKEESELKISSSPPEDTLISPSFCYNLETNSLNSDVSSESSDSSEELSPTAKFTSDPIGEVLVSSGKLSSSVTSTPPSSPELSREPSQLWGCVPGELPSPGKVRSGTSGKPGDKGNGDASPDGRRRVHRCHFNGCRKVYTKSSHLKAHQRTHTGVFPGLTTWPCT

SEQ ID NO: 60696 - DNA, 234 bp, Artificial Sequence
  derived and/or modified sequence
atggatgtgctacccatgtgtagtatattccaggaactccagatcgtgcatgagacaggatacttctcggcgctcccctctctggaagagtactggcaacagacctgcttagagctagagagatacctgcagtctgagccctgctatgtaagcgcgagcgagattaaattcgacagccaagagagtgtcgatcagaaccactggctgggccgcaaacgccgcaaccctaattag

SEQ ID NO: 60697 - DNA, 846 bp, Artificial Sequence
  derived and/or modified sequence
atggatgtactgccgatgtgcagcatcttccaggaactacagattgtccatgaaactggctactttagtgccctgccaagcctggaggaatactggcagcagacttgcctagagctagaacgctacctacaatcagaaccgtgttacgtgtcagctagtgaaatcaagttcgacagccaggaagatctgtggactaaaattatactggctcgtgaaaaaaaggaagagtcagagttaaagataagctcgtcacccccagaagacaccttgatcagtccatcattctgctacaacctagagactaatagcttaaacagcgacgtgagctctgagtcatccgacagctcagaggaactatcccctacagcgaagtttacctccgaccctatcggcgaggtgctggtttcctcagggaagctaagcagctctgtaacgtctacgccaccttcctctcccgaactttcacgagaaccctcgcagctctggggttgcgtgcctggcgagctgccctctcctgggaaagttagatcaggcactagcggaaaacccggagacaaaggtaacggcgatgccagtcccgatggtcgaagaagggtgcataggtgccattttaatggctgtaggaaagtgtatacgaagtcctctcacttaaaagcccaccagcgcactcatacaggacagtgtccacggggccctagaagagcagctgcaggaggccggcattgtattgctcctgccctggagggggctggaccaggttgcactggctgcggccagggccgtcaaatcctgacttcatctgacgtcttccaccagtctatacgctccttctggtcaagcgagtag

SEQ ID NO: 60698 - DNA, 714 bp, Artificial Sequence
  derived and/or modified sequence
atggatgtcttacctatgtgcagcatctttcaagagctgcaaattgtccatgaaaccggatacttctcagccctgcccagcctcgaagaatactggcagcagacctgcctggagctggagaggtatctgcaatctgagccatgttacgtgtctgctagcgaaattaaattcgactcacaggaggatctctggacaaaaattatactcgctcgggagaagaaggaggagagtgaactcaaaatctctagcagccccccggaggacaccctgatctccccttccttttgttataatctggagaccaattcacttaactcagatgtcagctcagagtccagcgacagcagcgaggagctttccccaactgccaaatttacgtcagatcctataggcgaggttctcgtctctagtgggaaattgagttcgagcgtgacttccacacctccatcatcaccagagctgagtcgcgaacccagtcagctctggggttgcgtcccgggggaactccctagccccggtaaagtgcggtccggtacgtctggcaagccaggcgataaaggtaatggtgacgcaagtcccgatggtaggcggcgcgtacatcggtgccacttcaacggctgcaggaaagtgtacactaagagcagccatctaaaggcccaccagcgaacccacacaggagtgtttcctggtcttactacatggccatgcacctag

SEQ ID NO: 60699 - DNA, 420 bp, Artificial Sequence
  derived and/or modified sequence
ccggtgtttgcaaatattgtgtgggctccgcgcgctgcgggctgcgggagggtccggccgggcgtctctgcgagcctggagtttgcatgaaactttcacctgcgctccggggagactttcggctccggctcccaccgcgcgcctcgccgccctcgcgaccgcgggctccgtccaacccggcccgacatggacgtgctccccatgtgcagcatcttccaggagctccagatcgtgcacgagaccggctacttctcggcgctgccgtctctggaggagtactggcaacagacctgcctagagctggaacgttacctccagagcgagccctgctatgtttcagcctcagaaatcaaatttgacagccaggaatctgtggaccaaaatcattggctcgggagaaaaaggaggaatccgaactga

SEQ ID NO: 60700 - DNA, 2169 bp, Artificial Sequence
  derived and/or modified sequence
ttgcaaatattgtgtgggctccgcgcgctgcgggctgcgggagggtccggccgggcgtctctgcgagcctggagtttgcatgaaactttcacctgcgctccggggagactttcggctccggctcccaccgcgcgcctcgccgccctcgcgaccgcgggctccgtccaacccggcccgacatggacgtgctccccatgtgcagcatcttccaggagctccagatcgtgcacgagaccggctacttctcggcgctgccgtctctggaggagtactggcaacagacctgcctagagctggaacgttacctccagagcgagccctgctatgtttcagcctcagaaatcaaatttgacagccaggaagatctgtggaccaaaatcattctggctcgggagaaaaaggaggaatccgaactgaagatatcttccagtcctccagaggacactctcatcagcccgagcttttgttacaacttagagaccaacagcctgaactcagatgtcagcagcgaatcctctgacagctccgaggaactttctcccacggccaagtttacctccgaccccattggcgaagttttggtcagctcgggaaaattgagctcctctgtcacctccacgcctccatcttctccggaactgagcagggaaccttctcaactgtggggttgcgtgcccggggagctgccctcgccagggaaggtgcgcagcgggacttcggggaagccaggtgacaagggaaatggcgatgcctcccccgacggcaggaggagggtgcaccggtgccactttaacggctgcaggaaagtttacaccaaaagctcccacttgaaagcacaccagcggacgcacacaggtcagtgcccacgcgggccccggagggcggccgctggtgggcgccactgcattgcaccagccctggagggagccgggcctggctgcacaggatgtggtcagggcagacaaatcctcacttcctcagatgttttccaccaaagcattaggtctttttggagttcagagtagaatcctaaagactggacttttgagttggataaatgtgtaacaattttcagattaaacaaacaagagactagatccttttctccacggacacccaaacctccaccccccaccccttagtagtgctggggatccgaggccactgccccttcaccagtgcactcgcacgaggctacctcgagcggccctggggtttcctaaatgaaactcaagggtcaggacagagggttgctgggcagcgtggagtgtgtgggtttgatgctgacggcccgaggcccgagtgggaccggcctgctctgtaagcagcagcattgatcagcgagtgtttcctgagaacttctccgtgtctcatgcagcctttgtttctgataccgcttgaaacagtttcttaatgaaatgccatacctaggtgaaagtgctatttaaaaataccttgacatgttctaggataattggtgaggaatcacagaacatttagaactgggaagggtcttagtgatcacgtgatgcaggctcttctcttatcagtaggagagcaaattgctgagagtcagtcccagacaggcttggtgacagctgagattgagatccgggtggcccaatatccaggcccaggcctgtctcaacataccctgagattggcttgacaactttgttttctcaggtagcacttgtagtaaattcatatttatgatttgaccaaggaatgaagtgaacccagttgttcaattgccatttagagaatgattccggggccctgtactggggctttccagaagctcgtaacttcagctttgtagaaaggtagaacgtccctgaggaaactgcagaggcacattccatagggaagtgaggatggaacagaagtgtgtttgggagaaacagttgccatgaagaaagcaatagctctgcctttgccggggctgtgggtccggcaggctgacacctcatcccgcaagcattttgctggtctgagtcgtggtcgttcttccacgttaactttgatgacagcaccatgggcttggctgaagctgtgtcccttggacagcagtgggaggcctgagactgggtcaggagagagctgctgttgtctctctgaggctgccagttgttgtgtgttaccgatgccagaagccactgggtccct

SEQ ID NO: 60701 - DNA, 4537 bp, Artificial Sequence
  derived and/or modified sequence
gagccaggcgggggcggagggggaggctggcagcggagctttgaatagggaagttttgcaggggttacgtttgcagtcagtccggtgtttgcaaatattgtgtgggctccgcgcgctgcgggctgcgggagggtccggccgggcgtctctgcgagcctggagtttgcatgaaactttcacctgcgctccggggagactttcggctccggctcccaccgcgcgcctcgccgccctcgcgaccgcgggctccgtccaacccggcccgacatggacgtgctccccatgtgcagcatcttccaggagctccagatcgtgcacgagaccggctacttctcggcgctgccgtctctggaggagtactggcaacagacctgcctagagctggaacgttacctccagagcgagccctgctatgtttcagcctcagaaatcaaatttgacagccaggaagatctgtggaccaaaatcattctggctcgggagaaaaaggaggaatccgaactgaagatatcttccagtcctccagaggacactctcatcagcccgagcttttgttacaacttagagaccaacagcctgaactcagatgtcagcagcgaatcctctgacagctccgaggaactttctcccacggccaagtttacctccgaccccattggcgaagttttggtcagctcgggaaaattgagctcctctgtcacctccacgcctccatcttctccggaactgagcagggaaccttctcaactgtggggttgcgtgcccggggagctgccctcgccagggaaggtgcgcagcgggacttcggggaagccaggtgacaagggaaatggcgatgcctcccccgacggcaggaggagggtgcaccggtgccactttaacggctgcaggaaagtttacaccaaaagctcccacttgaaagcacaccagcggacgcacacaggtgtttttccaggtctgaccacctggccctgcacatgaagaggcacctctgagggagcagagaggtggatcctgtaggctaaaaggcttccaggctgagagccggccgtggaaggagggatgcgtgttccagccaaagcatgccgttctgcaccctacccagttgcctccagggcctctccttggaaggtcttttgagggctaaaaaggtcctgtaagaagcggcatagcacccgtggtgcatggtatgtgggtgaccctggactcgccactggtacccgcccttccgagcggcgcctaagcctttgccgtgagcatgcacactgagaatgctaatggttgggttgattgtatgttgaggatctattactgaccgtatgatgaggccaactttttttccttgtggttagcaagactgcaagagatggaaaaaaagtagtttgaatgttttgtgtgtaaggagtataccatgagatgagatgaccaccaatcatttccttggggggagggggtgtctgcaccttagaaaaaaaaagaaaaatcaaaaaaacaaaaaaacaaaaacaaaaaaagaaggaaaatcttggagggtgggcgtgggaactcaggaccccagagtggcgagtggtgtggggagggagagcctctctcccccttttctgtgtgagaggaactcttagtgtctggtgcagctattaaatgtgcaatgtgtcaagtagcttgttttacacgctacaacatagctcatttgtaacccattgtataagctgtgtatttacaaatataacacaacaatttaacttttccttagaatacaaaaagtcatgcatggtctggggaactatatgcttttccatttttaagtcaggactgcaatactgattccagttaatgagcagctaagatccaatctgtctaatacagtgaccccctagccatccgggcctggcaatatacaattttttttcccctccaagtttgtaacactccccttccagaaaggcattgtgcaacacaggattatttttaaatgattctgaatttgaattaactttttggagaattctgtgatgcccttagaagaaattggacacgtattgagtgtcacaaagctggggctgggaattgctggtctaatgtttcattagacttaagaacctaaaatttttctcagttgggtggataaaaccactaacgcttagaaactgttttctcatgcagctatgtttctcttatttatgccttgaggactaatttctggttttctagctgttaatgcactgttgaccttcataatggtgccttacgcaagcgatcccttctgtgggggtctcatacaggggtgtgggcgatgcatgctttattaaggctcttgtttcacctggcagtgtactgtatcaacgtataatacagaaaaaaaatctctttaaggtcctccttcacaaagacatagagtgaaactccctttacatgtcagtatttgttcaacactttaggcaacttgactgtcagtgttaaaatggaaaacaggaaaatggaaaaatctgaccaattctgccaccttgagactttcatatagaccttgcacaacaattgtatagatcacacaccggctgtatttaatatgtaacattttcacacatattaaagatacagaagtattaaaaaacccccaatgttaatgtatttgcttaaaaggcacaagtttcacatatctgtctagctatctgttggtaatacagaaagtatactacttttttaaaaaagtgggcagaattcttgtgtatgtatatttgtgtgtacagtatgtgtatgtgtgtatatatatatattatatatatagataatatataaatattttttttaaggagaaactagaatgtttagctagaaaattccacagcctgtgaagaaatatttcaaaatggccataaaggaggtaaaaatgaaaaccataacctaacttttatagaggctttatctttaatttaacgatgtgcggaggactttcttgcttgaatctgttccgggctgtctgctctgtccatcaaatgggcaggtctggaatggggcaccttcggccgttcagaagtggcctgaacagaatgctggaacccaggctggactcggacacactaaggttttgattttgaatttcagccttattagaagatctaacctaagagtaagctaaccacagggattcttttgtagaacactttttatgcagatgaagctattttttccagcaagtagattcttccagtttttccaaggagtaatttccccgaattggcataccacggcgtggacagctgatatttcacccagctgctggcttgtgggtgtggctctttgctttatatatatatacacacatgtgagtctggctgggctggtattttgtttgatcttcctggaaatgagcagtgactaacgctcacataactggttttttttttatctgggctgatgaatacatttacctaagaaactcatttcgttttacttaagaggggaagtgcagttttcttttggcagttcagaatccaagcacttgatttgctgggtttggaaaactccttttttggccttctatgtgcttagccataacaattccattaagcaagaaggtaagcaaaagacaaaaaaaaaaaaaggaaaaaaaaaaacttgcactggcttgtctcacttacgaaacatgtcggagctgtttgcctgggtggggctgggtaccgtacctgtcaatgcctgtgattttcataattagcacgtacataaagaagtacattctgttcaggtgataactgagcctcaatcaagcagaaactttttgcttgaaattaaaaaaaaatttctattagtgaaatttcttttttttttttttttggaagcaccctgttatctaaagaatctttgtaagatttttgtaaaattttgttttacaagattttatttgaaattgttttttgcaagattgttatatttctgtatgaatgtattttttattggaataacataaaagaattcttatcagcatcttgagtctggttgttttttttgggggaagggggttgttggaacagattcctcctgcattcatcaccctggcttcctcctgggggcaaatcttcattgagcaaccctgagaacaactcaccgacctcagccccttcctctttccacagcctgtcctgggagctggagaggatgtcagcgagcctgacattgccctccctgaatgcatcaaatactcttctccaaggactgacaaaaacaaccccccggctgtgggcacagtagggaaccatgccggtttgatcttccattgctcaagccagggaatgcattgcagaggcacctgcacaacgacaaacttgagtgtttccctgccacttctgtgcctccacagcctgctccagttccgcagctagagctgggcctaccttccccagccagccctgccacacacctggctgaggcatgtctgggaggggtggaggaggcagagggactccaggccagagggctgttctcacaacctcagcccactctcagtcaaggagggcagaaaataaaagatgacatcactgcc

SEQ ID NO: 60702 - DNA, 234 bp, Artificial Sequence
  derived and/or modified sequence
atggatgtgctgcccatgtgcagcatcttccaggagctgcagatcgtgcatgaaacaggctacttcagcgccctgcccagcctggaggagtactggcagcagacctgcctggagctggagcgctacctgcagagcgagccctgctacgtgtctgccagcgagatcaagtttgacagccaggagagcgtggaccagaaccactggctgggcaggaagagaagaaaccccaactag

SEQ ID NO: 60703 - DNA, 846 bp, Artificial Sequence
  derived and/or modified sequence
atggatgtgctgcccatgtgcagcatcttccaggagctgcagatcgtgcatgaaacaggctacttcagcgccctgcccagcctggaggagtactggcagcagacctgcctggagctggagcgctacctgcagagcgagccctgctacgtgtctgccagcgagatcaagtttgacagccaggaggacctgtggaccaagatcatcctggcccgggagaagaaggaggagagcgagctgaagatcagcagcagccccccagaggacaccctcatcagccccagcttctgctacaacctggagaccaacagcctgaacagtgatgtgagcagcgagagcagtgacagcagcgaggagctgagccccacagccaagttcaccagtgaccccatcggggaggtgctggtgtcctctgggaagctgagcagctctgtgaccagcaccccacccagcagccctgagctgagccgggagcccagccagctgtggggctgtgtgcctggagagctgcccagccctgggaaggtgcgcagcggcaccagcggcaagccaggggacaagggaaatggagatgccagcccagatggaagaagaagagtgcaccgctgccacttcaacggctgcaggaaggtgtacaccaagagcagccacctgaaggcccaccagaggacccacacaggccagtgcccccggggccccaggagagctgctgctgggggccgccactgcatcgccccagccctggagggcgccggccctggctgcaccggctgcggccagggccggcagatcctgaccagcagtgatgtgttccaccagagcatccgctccttctggagcagcgagtag

SEQ ID NO: 60704 - DNA, 714 bp, Artificial Sequence
  derived and/or modified sequence
atggatgtgctgcccatgtgcagcatcttccaggagctgcagatcgtgcatgaaacaggctacttcagcgccctgcccagcctggaggagtactggcagcagacctgcctggagctggagcgctacctgcagagcgagccctgctacgtgtctgccagcgagatcaagtttgacagccaggaggacctgtggaccaagatcatcctggcccgggagaagaaggaggagagcgagctgaagatcagcagcagccccccagaggacaccctcatcagccccagcttctgctacaacctggagaccaacagcctgaacagtgatgtgagcagcgagagcagtgacagcagcgaggagctgagccccacagccaagttcaccagtgaccccatcggggaggtgctggtgtcctctgggaagctgagcagctctgtgaccagcaccccacccagcagccctgagctgagccgggagcccagccagctgtggggctgtgtgcctggagagctgcccagccctgggaaggtgcgcagcggcaccagcggcaagccaggggacaagggaaatggagatgccagcccagatggaagaagaagagtgcaccgctgccacttcaacggctgcaggaaggtgtacaccaagagcagccacctgaaggcccaccagaggacccacactggagtcttccctggcctgaccacctggccctgcacctag

SEQ ID NO: 60705 - DNA, 234 bp, Artificial Sequence
  derived and/or modified sequence
atggacgtgctgcccatgtgcagcatcttccaggagctgcagatcgtccacgaaaccggctacttcagcgcactgccgagcctagaagaatactggcagcagacctgcctcgagcttgagagatatttacagtctgaaccttgttacgtctccgcctctgagatcaaatttgatagccaagagtccgtcgaccaaaaccactggttaggaagaaaacgccgcaatcctaactag

SEQ ID NO: 60706 - DNA, 846 bp, Artificial Sequence
  derived and/or modified sequence
atggacgtgctgcccatgtgcagcatcttccaggagctgcagatcgtacacgagacaggatacttctccgccttaccctccttagaggaatactggcagcagacctgcttggaactcgaaaggtacttacagtccgaaccctgttacgttagcgcgtccgagataaagtttgatagccaagaggatctctggacaaagatcattctggcgcgtgagaaaaaggaggaatctgagctgaagattagctctagtcctccggaagatacgctgatctctccctcattttgctacaatctagaaaccaattcactgaattcagacgtatcttccgaatccagcgactcctccgaagaattatcaccaacagccaaatttacttctgatcctatcggtgaagttttggtgagcagtgggaagctgagctccagcgtcacctccaccccaccaagcagccctgagctatctagagagccgtctcagctctgggggtgcgtgccaggagaactacctagtcctgggaaagtgcgaagcggtacttcaggaaagcctggagacaaaggaaacggtgatgcatcgcccgacgggcgccgccgggtgcatagatgtcactttaatgggtgtaggaaagtgtatacaaaaagttcccacctgaaggcacaccagaggactcatactggacagtgcccgcgcgggccccgcagagccgcagccggcggaaggcattgcatagctcccgctttagagggcgcagggccgggatgcactggctgcggtcagggccgacagattctgacatcatccgatgtctttcaccagtcgatccgctctttctggagcagcgagtag

SEQ ID NO: 60707 - DNA, 714 bp, Artificial Sequence
  derived and/or modified sequence
atggacgtgctgcccatgtgcagcatcttccaggagctgcagatcgtccacgagacaggatacttttccgcccttcccagccttgaggaatattggcaacagacatgcttggagctcgagaggtatctgcaatcagagccctgctatgtcagcgcatctgagatcaaattcgactcacaagaggatctgtggaccaagatcatattggctagggagaagaaggaggagtctgaactgaaaatcagctcttccccacctgaggataccctgattagcccatccttttgctataacctggagacgaacagtttgaatagtgacgtctcatccgaatcctcagactcctctgaagaactctccccaacagccaagttcacgagcgatcccataggagaggtcctggtctccagcggcaagttatccagcagtgtgacctccacaccaccatccagtcccgagttatctcgcgagccatcccaactttggggatgcgtgcccggggaattacccagtcctgggaaggtccggtccgggacgtcaggaaaaccaggcgataaaggaaacggggacgccagcccagatgggcgcagaagggtccatcgctgccattttaatggttgcaggaaagtctacacaaaatccagccacctgaaggcccatcagagaacacacacaggggtgttccccggtctgaccacatggccctgtacttag

SEQ ID NO: 60708 - DNA, 234 bp, Artificial Sequence
  derived and/or modified sequence
atggacgtgttgccaatgtgctccatttttcaagagctccagattgtgcacgaaaccggctactttagcgcgctgccatccttagaggagtattggcagcaaacatgcctggaactcgaacgatatcttcagtcagagccatgttacgtgagcgcaagcgagataaagtttgattcccaggagagcgttgatcagaaccattggttggggagaaaaaggagaaacccgaactag

SEQ ID NO: 60709 - DNA, 846 bp, Artificial Sequence
  derived and/or modified sequence
atggacgttctgccaatgtgctctatattccaagaattacaaatcgtgcatgaaacaggctatttttcggcccttcccagtctggaagagtattggcaacagacctgcctggagctggaacgttatctccagtcagaaccgtgctatgtctctgctagcgaaatcaaattcgacagtcaagaagatctgtggaccaaaatcattctcgcgagggagaagaaggaggaaagcgaacttaaaataagttcttctccacctgaagatactctgatcagccccagcttctgttataacttagagacaaacagtttgaatagcgacgtgtccagtgagtctagtgattctagcgaagagctgtccccgacggctaaatttacttctgatcccataggagaagtgctggtgtcgtccggcaaactcagttcatccgtgacatccactccaccttcttcccctgaacttagtcgggagccttcacagttgtggggatgtgtgcctggagaactgccatctccaggaaaggtaaggtcaggaacaagcgggaaacccggagacaagggtaacggtgacgctagtcccgacgggcgaaggcgggtccaccggtgccatttcaatgggtgcaggaaagtatacacaaagtcctcccacttgaaggcacaccagcggacacatacaggccaatgcccgcgtgggccaagacgcgcagctgcagggggacgacactgcatagcaccagccctcgagggagccggacccggatgcacaggatgcggacagggtcggcaaattctgacttccagcgatgtctttcatcagagcatacgcagcttttggagcagtgagtag

SEQ ID NO: 60710 - DNA, 714 bp, Artificial Sequence
  derived and/or modified sequence
atggatgtccttcctatgtgcagcatattccaagaactgcagatcgtccatgaaacaggctatttctcggcgcttccctccctggaggagtactggcagcagacatgtctggaactggagcgctatctgcaaagtgagccctgctatgttagtgccagcgaaatcaagtttgattcccaagaggacctgtggacgaaaatcattctggccagggagaagaaagaggaatctgagttaaaaatcagttcttcaccacccgaggacacactgatctcccccagtttctgttataacttagagaccaactctctgaactccgacgtgtccagtgaatcatcagacagctctgaggaattgtccccgacggctaaatttaccagtgatccaatcggcgaagtgcttgtatcgtccgggaagctttcttcttccgtgacttctacaccaccttcttccccagagctgtcccgcgagccatctcagttgtggggatgtgtccccggagagctgccctcacccggtaaagtgagatccggaactagtggtaagccaggcgataaggggaacggggatgcaagcccagatggaaggaggcgcgtgcacaggtgccatttcaatggctgtcgcaaagtctacacgaagtcaagtcatctgaaagcccaccaaagaacgcatacgggagttttccccggtctgactacttggccctgcacttag

SEQ ID NO: 60711 - DNA, 234 bp, Artificial Sequence
  derived and/or modified sequence
atggacgtgctgcccatgtgcagcatcttccaggagctgcagatcgtgcacgagaccggctacttcagcgccctgcccagcctggaggagtactggcagcagacctgcctggagctggagagatacctgcagagcgagccctgctacgtgagcgccagcgagatcaagttcgacagccaggagagcgtggaccagaaccactggctgggcagaaagagaagaaaccccaactag

SEQ ID NO: 60712 - DNA, 846 bp, Artificial Sequence
  derived and/or modified sequence
atggacgtgctgcccatgtgcagcatcttccaggagctgcagatcgtgcacgagaccggctacttcagcgccctgcccagcctggaggagtactggcagcagacctgcctggagctggagagatacctgcagagcgagccctgctacgtgagcgccagcgagatcaagttcgacagccaggaggacctgtggaccaagatcatcctggccagagagaagaaggaggagagcgagctgaagatcagcagcagcccccccgaggacaccctgatcagccccagcttctgctacaacctggagaccaacagcctgaacagcgacgtgagcagcgagagcagcgacagcagcgaggagctgagccccaccgccaagttcaccagcgaccccatcggcgaggtgctggtgagcagcggcaagctgagcagcagcgtgaccagcaccccccccagcagccccgagctgagcagagagcccagccagctgtggggctgcgtgcccggcgagctgcccagccccggcaaggtgagaagcggcaccagcggcaagcccggcgacaagggcaacggcgacgccagccccgacggcagaagaagagtgcacagatgccacttcaacggctgcagaaaggtgtacaccaagagcagccacctgaaggcccaccagagaacccacaccggccagtgccccagaggccccagaagagccgccgccggcggcagacactgcatcgcccccgccctggagggcgccggccccggctgcaccggctgcggccagggcagacagatcctgaccagcagcgacgtgttccaccagagcatcagaagcttctggagcagcgagtag

SEQ ID NO: 60713 - DNA, 714 bp, Artificial Sequence
  derived and/or modified sequence
atggacgtgctgcccatgtgcagcatcttccaggagctgcagatcgtgcacgagaccggctacttcagcgccctgcccagcctggaggagtactggcagcagacctgcctggagctggagagatacctgcagagcgagccctgctacgtgagcgccagcgagatcaagttcgacagccaggaggacctgtggaccaagatcatcctggccagagagaagaaggaggagagcgagctgaagatcagcagcagcccccccgaggacaccctgatcagccccagcttctgctacaacctggagaccaacagcctgaacagcgacgtgagcagcgagagcagcgacagcagcgaggagctgagccccaccgccaagttcaccagcgaccccatcggcgaggtgctggtgagcagcggcaagctgagcagcagcgtgaccagcaccccccccagcagccccgagctgagcagagagcccagccagctgtggggctgcgtgcccggcgagctgcccagccccggcaaggtgagaagcggcaccagcggcaagcccggcgacaagggcaacggcgacgccagccccgacggcagaagaagagtgcacagatgccacttcaacggctgcagaaaggtgtacaccaagagcagccacctgaaggcccaccagagaacccacaccggcgtgttccccggcctgaccacctggccctgcacctag

SEQ ID NO: 60714 - protein, 923 aa, Artificial Sequence
  derived and/or modified sequence
MPRHHAGGEEGGAAGLWVKSGAAAAAAGGGRLGSGMKDVESGRGRVLLNSAAARGDGLLLLGTRAATLGGGGGGLRESRRGKQGARMSLLGKPLSYTSSQSCRRNVKYRRVQNYLYNVLERPRGWAFIYHAFVFLLVFGCLILSVFSTIPEHTKLASSCLLILEFVMIVVFGLEFIIRIWSAGCCCRYRGWQGRLRFARKPFCVIDTIVLIASIAVVSAKTQGNIFATSALRSLRFLQILRMVRMDRRGGTWKLLGSVVYAHSKELITAWYIGFLVLIFSSFLVYLVEKDANKEFSTYADALWWGTITLTTIGYGDKTPLTWLGRLLSAGFALLGISFFALPAGILGSGFALKVQEQHRQKHFEKRRNPAANLIQCVWRSYAADEKSVSIATWKPHLKALHTCSPTNQKLSFKERVRMASPRGQSIKSRQASVGDRRSPSTDITAEGSPTKVQKSWSFNDRTRFRPSLRLKSSQPKPVIDADTALGTDDVYDEKGCQCDVSVEDLTPPLKTVIRAIRIMKFHVAKRKFKETLRPYDVKDVIEQYSAGHLDMLCRIKSLQTRVDQILGKGQITSDKKSREKITAEHETTDDLSMLGRVVKVEKQVQSIESKLDCLLDIYQQVLRKGSASALALASFQIPPFECEQTSDYQSPVDSKDLSGSAQNSGCLSRSTSANISRGLQFILTPNEFSAQTFYALSPTMHSQATQVPISQSDGSAVAATNTIANQINTAPKPAAPTTLQIPPPLPAIKHLPRPETLHPNPAGLQESISDVTTCLVASKENVQVAQSNLTKDRSMRKSFDMGGETLLSVCPMVPKDLGKSLSVQNLIRSTEELNIQLSGSESSGSRGSQDFYPKWRESKLFITDEEVGPEETETDTFDAAPQPAREAAFASDSLRTGRSRSSQSICKAGESTDALSLPHVKLK

SEQ ID NO: 60715 - DNA, 2772 bp, Artificial Sequence
  derived and/or modified sequence
atgccacgtcatcacgctggtggcgaggagggcggggcagccggcctctgggtgaaaagtggcgcagctgcagcagctgctggtgggggccggctcggctccggtatgaaagacgttgaatctggtcgaggtcgggtccttttgaactccgcagcggcgaggggagatggtctcctcttgctgggtaccagggctgctacactgggaggagggggcgggggcctgagggaatctagaagaggaaagcagggagcccggatgtctctgctcggaaagcctctttcttataccagcagccagtcctgtcgcagaaatgtaaagtatagaagagtccagaattatctgtacaacgttctggagagaccaaggggttgggcatttatataccacgcattcgtcttcttgctggtgtttggctgcctgattctgtcagtgttctcaactattccagaacataccaagcttgccagttcttgcttactgattctagagttcgtgatgattgtggtctttggcctagagtttatcatccgcatttggagcgccggttgctgctgccgctatcgtggatggcagggccgactgaggtttgcccggaagccgttctgtgtgatcgacaccatcgtccttatcgcatctatcgcagtggtgagtgccaagactcagggtaatatcttcgccacgtctgccctgcggagcctgaggtttctgcagattctgaggatggtgaggatggatcggcggggaggtacgtggaagcttttggggagcgtagtctatgctcatagcaaggaattgatcacagcctggtacattggcttcctcgtcttgatttttagctccttcctggtctatctggtggaaaaggatgcaaacaaagagttttccacctatgccgacgccctgtggtggggcactattacgctcacaaccattgggtacggggacaagacacctctgacttggttaggccgactcctgagcgctgggttcgcactcctcggcatttctttttttgccctgccggctggtatcctcggtagcggttttgcactaaaggtccaagagcaacatcggcaaaagcatttcgagaaaaggaggaatcctgccgcaaatcttattcaatgtgtgtggagaagctacgccgctgacgagaaaagtgtgagcatcgccacttggaagccacatctgaaagcccttcatacatgcagccccacaaatcagaagctgagcttcaaggagagagtccgcatggcttcgccaaggggtcagtcgatcaaatcccgtcaggcctctgtgggcgaccgacgcagcccgtcgactgatatcaccgcagagggttccccgactaaggtgcaaaaaagctggtcatttaacgaccgcacgcggtttcgcccatccctgaggctgaagtcaagccaaccgaagcccgtcattgacgctgacaccgccctgggaactgacgacgtgtatgatgaaaaaggatgccagtgtgatgtgtccgtggaggacctaacgccgccattaaaaaccgttatccgcgccattcggatcatgaaattccacgttgctaaaaggaaatttaaagagacacttagaccctatgatgtcaaagatgtgatcgaacagtacagtgctggacatctggacatgttatgccgcattaagtccttgcagacaagagtcgaccagatcttgggcaagggacagattactagcgacaagaaaagccgagaaaagatcaccgccgaacacgaaacaaccgacgacctgtccatgttgggtcgcgttgtgaaggtggagaagcaagtgcagtcaatcgagtctaaactagactgtctcctggacatataccaacaggtgttgagaaaggggtccgcctcggcgctcgcactggcatcttttcagatccccccgtttgagtgcgaacagaccagcgactaccagagccccgtggattccaaggacctgagtggaagtgctcagaactccggctgcttgagcaggagtacctccgccaacattagccggggactccagttcattctgactccaaacgagtttagtgctcaaacgttctacgctcttagcccaactatgcactcacaggccacccaggttcccatcagtcagagcgatgggagcgctgttgctgcgacgaataccatcgccaaccagatcaacactgcccccaagccagctgctcccaccacccttcagatccccccacccctaccggccatcaaacacttgcccaggcccgagacacttcaccccaatcctgccggtttgcaggagagcatctcggacgtcactacatgcctggtggcgagtaaggaaaacgtgcaggttgcccagtccaatttgaccaaagataggagcatgcgcaagagttttgacatgggtggtgagacacttctttctgtctgccctatggtgcccaaggatcttggtaagagcctgagcgtgcagaacctgatccgcagcactgaggagctgaacatacaactgagtggcagcgaatcttcaggatcccgtggctctcaggatttctacccgaaatggagagaatccaaactgtttatcaccgatgaagaggtgggacctgaggagaccgagactgatacctttgacgccgcgccccaaccagccagagaggctgcatttgcctccgattccctcagaacaggcagatctcgctcctctcagagtatttgtaaagctggcgagagtaccgatgccctgtcgctgcctcacgtgaaactgaaatag

SEQ ID NO: 60716 - DNA, 2772 bp, Artificial Sequence
  derived and/or modified sequence
atgcccaggcaccacgccggcggggaggagggcggggccgccggcctgtgggtgaagagcggggctgctgctgctgctgctgggggcggccgcctgggcagcggcatgaaggatgtggagagcggccggggccgggtgctgctgaacagcgctgctgcccggggagatggcctgctgctgctgggcaccagggctgccaccctgggcggcggcggcggcggcctgcgggagagcagaagaggcaagcagggcgccaggatgagcctgctgggcaagcccctgagctacaccagcagccagagctgcagaagaaatgtgaagtacagaagagtgcagaactacctgtacaacgtgctggagcggccccggggctgggccttcatctaccacgcctttgtgttcctgctggtgtttggctgcctgatcctgagcgtcttcagcaccatccctgagcacaccaagctggccagcagctgcctgctgatcctggagtttgtgatgattgtggtgtttggcctggagttcatcatccgcatctggagcgctggctgctgctgccgctaccggggctggcagggccgcctgcgctttgccaggaagcccttctgtgtgattgacaccatcgtgctgattgccagcattgctgtggtgtctgccaagacccagggcaacatctttgccaccagcgccctgcggagcctgcgcttcctgcagatcctgaggatggtgaggatggacagaagaggaggcacctggaagctgctgggctctgtggtgtatgcccacagcaaggagctgatcacagcctggtacatcggcttcctggtgctgatcttcagcagcttcctggtgtacctggtggagaaggatgccaacaaggagttcagcacctatgcagatgccctgtggtggggcaccatcaccctgaccaccatcggctacggggacaagacccccctgacctggctgggccgcctgctgtctgctggctttgccctgctgggcatctccttctttgccctgcctgctggcatcctgggcagcggctttgccctgaaggtgcaggagcagcaccggcagaagcactttgagaagagaagaaatcctgctgccaacctgatccagtgtgtgtggaggagctatgctgctgatgagaagtctgtgtccatcgccacctggaagccccacctgaaggccctgcacacctgcagccccaccaaccagaagctgtccttcaaggagcgggtgaggatggccagcccccggggccagagcatcaagagccggcaggcctctgtgggggaccggcgcagccccagcacagacatcacagctgagggcagccccaccaaggtgcagaagtcctggagcttcaatgacaggacccgcttccggcccagcctgcggctgaagagcagccagcccaagcctgtgattgatgctgacacagccctgggcacagatgatgtgtatgatgagaagggctgccagtgtgatgtgtctgtggaggacctgaccccacccctgaagacagtcatccgggccatccgcatcatgaagttccacgtggccaagaggaagttcaaggagaccctgcggccctatgatgtgaaggatgtgattgagcagtacagcgctggccacctggacatgctgtgccgcatcaagagcctgcagaccagggtggaccagatcctgggcaagggccagatcaccagtgacaagaagagccgggagaagatcacagctgagcacgagaccacagatgacctgtccatgctgggccgggtggtgaaggtggagaagcaggtgcagagcattgagagcaagctggactgcctgctggacatctaccagcaggtgctgaggaagggcagcgccagcgccctggccctggccagcttccagatccccccatttgaatgtgagcagaccagtgactaccagagccctgtggacagcaaggacctgagcggcagcgcccagaacagcggctgcctgagccgcagcaccagcgccaacatcagccggggcctgcagttcatcctgaccccaaatgagttcagcgcccagaccttctacgccctgagccccaccatgcacagccaggccacccaggtgcccatcagccagagtgatggcagcgctgtggccgccaccaacaccatcgccaaccagatcaacacagcccccaagccagctgcccccaccaccctgcagatccccccacccctgcctgccatcaagcacctgcccaggcctgagaccctgcaccccaacccagctggcctgcaggagagcatcagtgatgtgaccacctgcctggtggccagcaaagaaaatgtgcaggtggcccagagcaacctgaccaaggaccgctccatgaggaagagctttgacatgggcggggagaccctgctgtctgtgtgccccatggtgcccaaggacctgggcaagagcctgtctgtgcagaacctgatccgcagcacagaggagctgaacatccagctgagcggcagcgagagcagcggcagccggggcagccaggacttctaccccaagtggagggagagcaagctgttcatcacagatgaggaggtgggccctgaggagacagaaacagacacctttgatgctgccccccagcctgcccgggaggccgcctttgccagtgacagcctgaggacaggccgcagccgcagcagccagagcatctgcaaggccggggagagcacagatgccctgagcctgccccacgtgaagctgaagtag

SEQ ID NO: 60717 - DNA, 2772 bp, Artificial Sequence
  derived and/or modified sequence
atgccccggcaccacgccggcggcgaggagggcggcgccgccggcctatgggtcaaatccggggctgcagcggccgctgctggaggaggacgcctggggtctgggatgaaagatgtggaaagcggaagaggccgggtcctcctgaattctgccgccgccaggggggatggacttttactcctgggtaccagggctgccacactcggtggaggtggtgggggcctgagagagtctagacgaggaaaacagggagccaggatgagtcttttagggaaacctttatcctacaccagttcccagagctgtcgcagaaacgtcaaatacagacgggtgcagaattacctgtacaatgtgctggagagacctagaggatgggcgtttatctatcatgccttcgtcttccttctggtgttcggatgcttaattctttctgttttcagcactatccctgagcacactaaactggcttcctcctgcctgctgatccttgagttcgtgatgatcgtggtattcggcctcgaattcatcattcggatatggtccgccggctgctgctgtcgctaccgaggatggcagggcaggcttcgtttcgcacgcaagcccttttgcgtaattgacactattgtgttgattgcctccatcgccgtggtttccgccaagacccagggcaatattttcgccacatctgctctgcgcagcttgcggttcctgcagatacttaggatggtgcggatggatagaagggggggcacatggaaattgctgggcagtgtcgtgtatgctcacagcaaagagctcatcactgcgtggtacattggattcctggtcctcatcttttctagctttttggtctatctggtggagaaagatgccaacaaggaatttagcacctatgctgacgctctgtggtggggcactattacgctcacaaccattggctacggggacaaaaccccactgacctggctaggcagactcctgtctgccgggttcgctctgctcggcatatcatttttcgcactgccagccggaatcttaggcagcggctttgcacttaaagttcaggaacagcacaggcaaaaacactttgagaagagacgcaacccggccgctaaccttatccagtgcgtttggagatcatatgcggcagacgagaagagcgtgtctatcgctacctggaagccgcatctgaaggccttgcacacctgttctcccacgaatcagaaactatcttttaaagagagggtgagaatggccagtcccagaggtcagagtatcaagagtcggcaggcaagcgtcggagacaggaggagtccttctaccgacattacggctgagggaagcccgactaaggttcagaagtcttggagctttaacgatagaactcgatttagacccagtctccggctcaagagctcccagcccaagcccgtgatagatgcagatactgcgctgggcacagacgatgtctatgatgaaaaagggtgccagtgcgatgtgagcgtggaagatttgaccccccccctcaagaccgtaataagagccatacggattatgaaattccacgtcgccaaacgaaaatttaaggagaccctgagaccctatgatgtcaaggatgtcattgaacagtactctgctggacacctggacatgctgtgcaggatcaagtcacttcagacccgtgtcgatcaaatactcggcaaagggcaaattacttcggataaaaaatctagagagaagatcacagcggagcatgagactaccgacgatctgtccatgttgggccgcgtagtcaaggtcgagaaacaggtccagtctatagagagcaagctggactgtctccttgacatctatcaacaggtgctgcgtaagggatctgcctctgcgttggctttagcttcgtttcaaattccacctttcgagtgtgaacagacgagtgactaccagtcacctgtggactccaaggacttaagcgggagtgctcaaaacagcggttgtttaagtcgctccacctccgctaacatctccagggggctgcagtttatccttacgccaaacgaatttagtgcccagacattctatgctctgtcacccaccatgcactcacaggcaacccaggtccccatcagtcagtctgatggaagtgctgtggcagccacgaacacgattgccaatcagattaatacggctcctaagccggctgctcccacaactctgcagatccctccgcctcttcccgccatcaaacatttgccacgaccagaaacactgcatccaaaccccgccggtctgcaggaatctatcagcgatgtcactacttgcctggtcgcttcaaaggagaatgtgcaggtggcccagagtaacctcacaaaggaccggagtatgcgaaagagcttcgacatgggcggtgagacacttctaagtgtttgtccaatggttcctaaagaccttggtaaaagcttgtctgtccagaaccttattagatcaacggaggagttgaacatccaactcagcggttccgaatccagtggctctagaggaagccaggacttttatcccaagtggcgagagtctaaactgttcatcaccgatgaagaggtcggtcctgaggaaaccgagaccgataccttcgacgccgctccacagccagcccgcgaggcagctttcgcaagtgattctctgcggaccggacgctcccgcagctctcagtcaatctgcaaagccggcgagtccaccgacgccctgtccctacctcacgtaaagctcaaatag

SEQ ID NO: 60718 - DNA, 2772 bp, Artificial Sequence
  derived and/or modified sequence
atgccccgccaccacgcgggaggagaggagggcggcgccgccgggctctgggtgaagagcggcgcagcggcggcggcggcgggcggggggcgcttgggcagcggcatgaaggatgtggagtccggccggggcagggtgctgctgaactcggcagccgccaggggcgacggcctgctactgctgggcacccgcgcggccacgctcggtggcggcggcggtggcctgagggagagccgccggggcaagcagggggcccggatgagcctgctggggaagccgctctcttacacgagtagccagagctgccggcgcaacgtcaagtaccggcgggtgcagaactacctgtacaacgtgctggagagaccccgcggctgggcgttcatctaccacgctttcgtttttctccttgtctttggttgcttgattttgtcagtgttttctaccatccctgagcacacaaaattggcctcaagttgcctcttgatcctggagttcgtgatgattgtcgtctttggtttggagttcatcattcgaatctggtctgcgggttgctgttgtcgatatagaggatggcaaggaagactgaggtttgctcgaaagcccttctgtgttatagataccattgttcttatcgcttcaatagcagttgtttctgcaaaaactcagggtaatatttttgccacgtctgcactcagaagtctccgtttcctacagatcctccgcatggtgcgcatggaccgaaggggaggcacttggaaattactgggttcagtggtttatgctcacagcaaggaattaatcacagcttggtacataggatttttggttcttattttttcgtctttccttgtctatctggtggaaaaggatgccaataaagagttttctacatatgcagatgctctctggtggggcacaattacattgacaactattggctatggagacaaaactcccctaacttggctgggaagattgctttctgcaggctttgcactccttggcatttctttctttgcacttcctgccggcattcttggctcaggttttgcattaaaagtacaagaacaacaccgccagaaacactttgagaaaagaaggaacccagctgccaacctcattcagtgtgtttggcgtagttacgcagctgatgagaaatctgtttccattgcaacctggaagccacacttgaaggccttgcacacctgcagccctaccaatcagaagctaagttttaaggagcgagtgcgcatggctagccccaggggccagagtattaagagccgacaagcctcagtaggtgacaggaggtccccaagcaccgacatcacagccgagggcagtcccaccaaagtgcagaagagctggagcttcaacgaccgaacccgcttccggccctcgctgcgcctcaaaagttctcagccaaaaccagtgatagatgctgacacagcccttggcactgatgatgtatatgatgaaaaaggatgccagtgtgatgtatcagtggaagacctcaccccaccacttaaaactgtcattcgagctatcagaattatgaaatttcatgttgcaaaacggaagtttaaggaaacattacgtccatatgatgtaaaagatgtcattgaacaatattctgctggtcatctggacatgttgtgtagaattaaaagccttcaaacacgtgttgatcaaattcttggaaaagggcaaatcacatcagataagaagagccgagagaaaataacagcagaacatgagaccacagacgatctcagtatgctcggtcgggtggtcaaggttgaaaaacaggtacagtccatagaatccaagctggactgcctactagacatctatcaacaggtccttcggaaaggctctgcctcagccctcgctttggcttcattccagatcccaccttttgaatgtgaacagacatctgactatcaaagccctgtggatagcaaagatctttcgggttccgcacaaaacagtggctgcttatccagatcaactagtgccaacatctcgagaggcctgcagttcattctgacgccaaatgagttcagtgcccagactttctacgcgcttagccctactatgcacagtcaagcaacacaggtgccaattagtcaaagcgatggctcagcagtggcagccaccaacaccattgcaaaccaaataaatacggcacccaagccagcagccccaacaactttacagatcccacctcctctcccagccatcaagcatctgcccaggccagaaactctgcaccctaaccctgcaggcttacaggaaagcatttctgacgtcaccacctgccttgttgcctccaaggaaaatgttcaggttgcacagtcaaatctcaccaaggaccgttctatgaggaaaagctttgacatgggaggagaaactctgttgtctgtctgtcccatggtgccgaaggacttgggcaaatctttgtctgtgcaaaacctgatcaggtcgaccgaggaactgaatatacaactttcagggagtgagtcaagtggctccagaggcagccaagatttttaccccaaatggagggaatccaaattgtttataactgatgaagaggtgggtcccgaagagacagagacagacacttttgatgccgcaccgcagcctgccagggaagctgcctttgcatcagactctctaaggactggaaggtcacgatcatctcagagcatttgtaaggcaggagaaagtacagatgccctcagcttgcctcatgtcaaactgaaataa

SEQ ID NO: 60719 - DNA, 2772 bp, Artificial Sequence
  derived and/or modified sequence
atgcccagacaccacgcaggcggtgaggaaggcggagctgccggactctgggtgaaaagtggagcggctgccgctgcggctggcggaggtaggctgggatccggaatgaaagatgtggaaagcgggaggggtagagtattacttaactctgctgccgctagaggggacgggctgctcctgctaggcacgcgcgcagccacgcttggagggggaggtggtggcttacgggaatccaggcggggtaaacagggggcaagaatgtcactgctcggaaaaccactttcctatacttcttcccagagttgtagacgcaacgtaaagtaccgcagggtccaaaactacctgtacaacgtactggagagaccacggggatgggcgttcatctatcacgctttcgtttttctgctggtctttggatgcctgatcttgagcgttttctctacaattcctgaacatactaaactggcatcttcttgcctgctgatcctcgaatttgttatgattgttgtgttcggcttggagtttatcattcgtatctggagcgccggatgctgctgtagatatcggggttggcagggaaggctgagatttgcaaggaagcctttctgcgtgatcgacacaattgtgcttatcgcaagtattgcggtggtctcagctaagacacaggggaatatttttgcaacaagtgctctgcggtccctgcgctttctccaaattttgcggatggtgcggatggaccgccgagggggaacttggaagctgttaggaagcgtggtatatgcccattccaaggagcttattacggcctggtatattggttttcttgtgctaatctttagctccttcttggtttacctggttgagaaagatgccaacaaggaattctcaacttacgccgacgccctgtggtggggaactataaccctgactacaatcggatatggagacaagacacctctgacttggctcggcaggctattgtcggctgggttcgctctgctgggaataagtttctttgccttgcccgctggaatcctgggctctggctttgccctcaaggtgcaggagcagcacaggcagaagcatttcgaaaaacggcgaaaccccgcagctaacctaattcaatgtgtgtggcggagctacgccgctgacgagaaatctgtgtccattgccacttggaagcctcatctcaaagcactccacacatgttcgccaacaaaccaaaagttatcattcaaggagagggtgcgcatggccagccccagaggccagagcataaaaagcaggcaggctagcgtgggggacaggcggagcccttccaccgatataactgcggaagggtctcctactaaggtgcagaaatcatggagtttcaacgatcggactagatttaggccatccctgcgtctgaaaagcagccagccaaagcccgtcattgatgcggacactgcactgggcactgatgacgtgtatgatgagaaggggtgccagtgtgatgtttccgtggaagatctgactccgcctctaaagacagtgattcgtgctattcgcattatgaagttccatgttgccaagagaaagttcaaagaaacccttagaccgtatgatgtaaaggacgtcattgagcagtactccgccggacacctcgatatgctatgcaggatcaagagcctccagaccagagtggaccagattcttggaaagggacagataacaagcgataaaaaatctagggaaaaaatcacagccgagcatgagactacagacgatctgtctatgctgggccgagtggtgaaagtcgaaaaacaggtgcagtccatcgagagcaaactggattgtttgctggatatctatcagcaggtgttaaggaagggcagcgcaagtgcccttgcgcttgccagttttcagatccccccatttgaatgcgagcagacctcggactatcaatcacccgtagactccaaggatctgagcgggtctgcacaaaattccgggtgcctctctaggagcactagtgctaacatctctagaggactgcagttcatcctgacccccaatgagttctccgcacagacattctatgcattatctcctaccatgcactcccaagccacgcaggttccgattagtcagtccgacggctccgccgtcgcagctacaaataccattgcaaaccagattaacacggctcccaagcctgccgcacccacaacattgcagatccccccacctctgcctgccatcaaacatttgccacgcccagagactcttcaccccaatcccgcaggcttacaggaatctatctcagacgtcaccacctgtctcgttgcctccaaagagaatgtgcaggtggctcagagcaacctgaccaaggatcggagtatgcgtaagtcatttgacatgggaggggaaacgttactctcagtctgccccatggtccccaaggatctcggcaagtccctttccgttcaaaaccttattagatctaccgaggagctgaatatccagcttagtgggtcagagagctctggatctaggggctcccaggacttttaccctaaatggcgcgaaagcaaactcttcatcaccgatgaagaagtggggccagaagagacggaaaccgatacttttgacgccgcaccgcagcccgctagagaagccgctttcgcctcagacagcctccgcaccggaaggtcccggtcatcgcaatcgatttgcaaggcaggcgaaagcactgatgcgttatcattgccccatgtcaagttgaagtag

SEQ ID NO: 60720 - DNA, 2772 bp, Artificial Sequence
  derived and/or modified sequence
atgcccagacaccacgccggcggcgaggagggcggcgccgccggcctgtgggtgaagagcggcgccgccgccgccgccgccggcggcggcagactgggcagcggcatgaaggacgtggagagcggcagaggcagagtgctgctgaacagcgccgccgccagaggcgacggcctgctgctgctgggcaccagagccgccaccctgggcggcggcggcggcggcctgagagagagcagaagaggcaagcagggcgccagaatgagcctgctgggcaagcccctgagctacaccagcagccagagctgcagaagaaacgtgaagtacagaagagtgcagaactacctgtacaacgtgctggagagacccagaggctgggccttcatctaccacgccttcgtgttcctgctggtgttcggctgcctgatcctgagcgtgttcagcaccatccccgagcacaccaagctggccagcagctgcctgctgatcctggagttcgtgatgatcgtggtgttcggcctggagttcatcatcagaatctggagcgccggctgctgctgcagatacagaggctggcagggcagactgagattcgccagaaagcccttctgcgtgatcgacaccatcgtgctgatcgccagcatcgccgtggtgagcgccaagacccagggcaacatcttcgccaccagcgccctgagaagcctgagattcctgcagatcctgagaatggtgagaatggacagaagaggcggcacctggaagctgctgggcagcgtggtgtacgcccacagcaaggagctgatcaccgcctggtacatcggcttcctggtgctgatcttcagcagcttcctggtgtacctggtggagaaggacgccaacaaggagttcagcacctacgccgacgccctgtggtggggcaccatcaccctgaccaccatcggctacggcgacaagacccccctgacctggctgggcagactgctgagcgccggcttcgccctgctgggcatcagcttcttcgccctgcccgccggcatcctgggcagcggcttcgccctgaaggtgcaggagcagcacagacagaagcacttcgagaagagaagaaaccccgccgccaacctgatccagtgcgtgtggagaagctacgccgccgacgagaagagcgtgagcatcgccacctggaagccccacctgaaggccctgcacacctgcagccccaccaaccagaagctgagcttcaaggagagagtgagaatggccagccccagaggccagagcatcaagagcagacaggccagcgtgggcgacagaagaagccccagcaccgacatcaccgccgagggcagccccaccaaggtgcagaagagctggagcttcaacgacagaaccagattcagacccagcctgagactgaagagcagccagcccaagcccgtgatcgacgccgacaccgccctgggcaccgacgacgtgtacgacgagaagggctgccagtgcgacgtgagcgtggaggacctgaccccccccctgaagaccgtgatcagagccatcagaatcatgaagttccacgtggccaagagaaagttcaaggagaccctgagaccctacgacgtgaaggacgtgatcgagcagtacagcgccggccacctggacatgctgtgcagaatcaagagcctgcagaccagagtggaccagatcctgggcaagggccagatcaccagcgacaagaagagcagagagaagatcaccgccgagcacgagaccaccgacgacctgagcatgctgggcagagtggtgaaggtggagaagcaggtgcagagcatcgagagcaagctggactgcctgctggacatctaccagcaggtgctgagaaagggcagcgccagcgccctggccctggccagcttccagatcccccccttcgagtgcgagcagaccagcgactaccagagccccgtggacagcaaggacctgagcggcagcgcccagaacagcggctgcctgagcagaagcaccagcgccaacatcagcagaggcctgcagttcatcctgacccccaacgagttcagcgcccagaccttctacgccctgagccccaccatgcacagccaggccacccaggtgcccatcagccagagcgacggcagcgccgtggccgccaccaacaccatcgccaaccagatcaacaccgcccccaagcccgccgcccccaccaccctgcagatccccccccccctgcccgccatcaagcacctgcccagacccgagaccctgcaccccaaccccgccggcctgcaggagagcatcagcgacgtgaccacctgcctggtggccagcaaggagaacgtgcaggtggcccagagcaacctgaccaaggacagaagcatgagaaagagcttcgacatgggcggcgagaccctgctgagcgtgtgccccatggtgcccaaggacctgggcaagagcctgagcgtgcagaacctgatcagaagcaccgaggagctgaacatccagctgagcggcagcgagagcagcggcagcagaggcagccaggacttctaccccaagtggagagagagcaagctgttcatcaccgacgaggaggtgggccccgaggagaccgagaccgacaccttcgacgccgccccccagcccgccagagaggccgccttcgccagcgacagcctgagaaccggcagaagcagaagcagccagagcatctgcaaggccggcgagagcaccgacgccctgagcctgccccacgtgaagctgaagtag

SEQ ID NO: 60721 - protein, 942 aa, Artificial Sequence
  derived and/or modified sequence
MPRHHAGGEEGGAAGLWVKSGAAAAAAGGGRLGSGMKDVESGRGRVLLNSAAARGDGLLLLGTRAATLGGGGGGLRESRRGKQGARMSLLGKPLSYTSSQSCRRNVKYRRVQNYLYNVLERPRGWAFIYHAFVFLLVFGCLILSVFSTIPEHTKLASSCLLILEFVMIVVFGLEFIIRIWSAGCCCRYRGWQGRLRFARKPFCVIDTIVLIASIAVVSAKTQGNIFATSALRSLRFLQILRMVRMDRRGGTWKLLGSVVYAHSKELITAWYIGFLVLIFSSFLVYLVEKDANKEFSTYADALWWGTITLTTIGYGDKTPLTWLGRLLSAGFALLGISFFALPAGILGSGFALKVQEQHRQKHFEKRRNPAANLIQCVWRSYAADEKSVSIATWKPHLKALHTCSPTNKFCSNKQKLFRMYTSRKQSQKLSFKERVRMASPRGQSIKSRQASVGDRRSPSTDITAEGSPTKVQKSWSFNDRTRFRPSLRLKSSQPKPVIDADTALGTDDVYDEKGCQCDVSVEDLTPPLKTVIRAIRIMKFHVAKRKFKETLRPYDVKDVIEQYSAGHLDMLCRIKSLQTRVDQILGKGQITSDKKSREKITAEHETTDDLSMLGRVVKVEKQVQSIESKLDCLLDIYQQVLRKGSASALALASFQIPPFECEQTSDYQSPVDSKDLSGSAQNSGCLSRSTSANISRGLQFILTPNEFSAQTFYALSPTMHSQATQVPISQSDGSAVAATNTIANQINTAPKPAAPTTLQIPPPLPAIKHLPRPETLHPNPAGLQESISDVTTCLVASKENVQVAQSNLTKDRSMRKSFDMGGETLLSVCPMVPKDLGKSLSVQNLIRSTEELNIQLSGSESSGSRGSQDFYPKWRESKLFITDEEVGPEETETDTFDAAPQPAREAAFASDSLRTGRSRSSQSICKAGESTDALSLPHVKLK

SEQ ID NO: 60722 - DNA, 2829 bp, Artificial Sequence
  derived and/or modified sequence
atgcccagacaccacgcaggtggcgaagagggcggagctgctggcctttgggtaaagtctggagcagcagccgccgccgccggcggcggacgactaggctccggcatgaaggacgtggagagcggtagaggcagggtgttgctaaattcagccgccgcacgcggtgatggacttctgctgttggggaccagggcagccactctgggaggcggcggtggagggctccgggaatcaaggcgtggtaagcaaggggccaggatgagcttgttaggcaagcctctctcttatacctcgtcacagagctgtcgtcggaacgttaagtatcggcgcgtgcagaactacctgtataacgttctggagcgcccccgaggatgggcgttcatctaccatgccttcgtgtttctcttggtattcgggtgtctgattctgtccgtgtttagtacaattccagagcacaccaagctggcatcgagctgtctgctcatcctggaatttgttatgattgtggtgtttgggctcgagttcatcattcgcatttggagcgctgggtgctgttgccgatatcggggatggcaggggaggctgcggtttgcacggaagccgttctgtgttatcgataccattgtcctgatagcttcaatcgcagtggtgagcgcaaagacccagggtaatatattcgcgacatctgccctacggtcccttcgctttctccaaatcctgcgaatggtgcgaatggatcgcagggggggcacctggaaactgctggggagcgtggtctatgcacatagcaaggagctcattaccgcctggtatataggatttcttgtgttgatcttctctagttttctggtgtaccttgtagagaaggatgcaaataaggagttttccacatatgccgatgccctgtggtggggcactatcacactgaccaccataggttatggcgacaagactcctctgacatggttggggcgactacttagcgctgggtttgccttgctgggcatatctttctttgccctgcccgctgggatattggggagtggtttcgctctgaaagtacaggaacagcacagacagaagcactttgaaaaaagaagaaacccagctgctaatctaatccagtgcgtttggagatcctatgccgcggacgaaaagtcagtctccattgctacctggaaacctcaccttaaagctttgcatacgtgtagccctacaaataaattttgtagtaataagcagaaactcttcagaatgtatacttctagaaagcagtcccagaaactgagctttaaggagagggtgagaatggcctccccacgcggacagtcaatcaagtcccggcaggcctctgttggggacaggcgcagcccttccactgacatcactgcagaagggtcccccactaaagtgcagaaatcatggagcttcaacgatagaactcggtttagaccctccctgagactgaagtcttcacaacccaaacccgtgattgacgcggacactgcgctcggaactgacgacgtgtatgacgagaagggctgccagtgtgacgtgagcgtcgaggatctcactccccctctgaaaaccgtaatacgcgctataagaattatgaagtttcacgttgcaaagagaaaatttaaggagacactccggccgtatgacgtgaaggatgtcattgaacagtattccgctggtcacctagacatgctctgccggatcaaaagcctccaaacacgcgtggaccaaatcctggggaaggggcagattaccagcgataagaagtcccgggagaaaatcaccgcggaacacgagacaactgacgatctttccatgctgggtcgtgtcgtcaaagttgagaaacaagtccaatcgattgagagtaagcttgattgtctgctggacatctatcaacaagtactgcggaaggggtctgcatcagcccttgccctggcttcctttcagatccccccttttgagtgcgagcagacttcagactatcagagccctgtagatagcaaggacctgtccggttctgcacagaacagtggctgtctgagtaggagcacatccgccaacatctcacgtgggctacagtttattctcacccctaacgagttttctgcccagacgttctacgctctgtcacctactatgcattctcaggcgacacaagtaccaatttctcagtctgatggatctgctgttgcggcgaccaacactatagcaaaccagattaacacagcccccaagccagcagctccgacaacgctccagattcctccccctctacctgctattaaacatctgccgcgaccagagaccctgcacccaaatcccgctggcctacaggagagcatcagtgacgttaccacctgtctcgtggcttccaaagaaaacgtacaggtggcccaatctaacctaactaaggacaggagcatgaggaagtcatttgacatgggaggggaaacactgttgtcggtttgtcccatggtccctaaagaccttggaaagtcactgagcgtgcagaatctgatccgttcaacagaagaattaaacatccagctttccggctctgagtcttcagggtcccgcggatctcaagacttctatccgaagtggagagaatctaagctttttatcacggatgaggaggtgggcccggaagagacagagactgacacattcgatgctgctccccagccagctagggaggcagcatttgcctccgactcactccgaaccggccgcagtcgctcttcacagtcaatctgcaaggcaggggaaagtacggacgcgctttccctgcctcatgttaagcttaagtag

SEQ ID NO: 60723 - DNA, 2829 bp, Artificial Sequence
  derived and/or modified sequence
atgcccaggcaccacgccggcggggaggagggcggggccgccggcctgtgggtgaagagcggggctgctgctgctgctgctgggggcggccgcctgggcagcggcatgaaggatgtggagagcggccggggccgggtgctgctgaacagcgctgctgcccggggagatggcctgctgctgctgggcaccagggctgccaccctgggcggcggcggcggcggcctgcgggagagcagaagaggcaagcagggcgccaggatgagcctgctgggcaagcccctgagctacaccagcagccagagctgcagaagaaatgtgaagtacagaagagtgcagaactacctgtacaacgtgctggagcggccccggggctgggccttcatctaccacgcctttgtgttcctgctggtgtttggctgcctgatcctgagcgtcttcagcaccatccctgagcacaccaagctggccagcagctgcctgctgatcctggagtttgtgatgattgtggtgtttggcctggagttcatcatccgcatctggagcgctggctgctgctgccgctaccggggctggcagggccgcctgcgctttgccaggaagcccttctgtgtgattgacaccatcgtgctgattgccagcattgctgtggtgtctgccaagacccagggcaacatctttgccaccagcgccctgcggagcctgcgcttcctgcagatcctgaggatggtgaggatggacagaagaggaggcacctggaagctgctgggctctgtggtgtatgcccacagcaaggagctgatcacagcctggtacatcggcttcctggtgctgatcttcagcagcttcctggtgtacctggtggagaaggatgccaacaaggagttcagcacctatgcagatgccctgtggtggggcaccatcaccctgaccaccatcggctacggggacaagacccccctgacctggctgggccgcctgctgtctgctggctttgccctgctgggcatctccttctttgccctgcctgctggcatcctgggcagcggctttgccctgaaggtgcaggagcagcaccggcagaagcactttgagaagagaagaaatcctgctgccaacctgatccagtgtgtgtggaggagctatgctgctgatgagaagtctgtgtccatcgccacctggaagccccacctgaaggccctgcacacctgcagccccaccaacaagttctgcagcaacaagcagaagctgttcaggatgtacaccagcaggaagcagagccagaagctgtccttcaaggagcgggtgaggatggccagcccccggggccagagcatcaagagccggcaggcctctgtgggggacagaagaagccccagcacagacatcacagctgagggcagccccaccaaggtgcagaagtcctggagcttcaatgacaggacccgcttccggcccagcctgcggctgaagagcagccagcccaagcctgtgattgatgctgacacagccctgggcacagatgatgtgtatgatgagaagggctgccagtgtgatgtgtctgtggaggacctgaccccacccctgaagacagtcatccgggccatccgcatcatgaagttccacgtggccaagaggaagttcaaggagaccctgcggccctatgatgtgaaggatgtgattgagcagtacagcgctggccacctggacatgctgtgccgcatcaagagcctgcagaccagggtggaccagatcctgggcaagggccagatcaccagtgacaagaagagccgggagaagatcacagctgagcacgagaccacagatgacctgtccatgctgggccgggtggtgaaggtggagaagcaggtgcagagcattgagagcaagctggactgcctgctggacatctaccagcaggtgctgaggaaaggaagtgccagcgccctggccctggccagcttccagatccccccatttgaatgtgagcagaccagtgactaccagagccctgtggacagcaaggacctgagcggcagcgcccagaacagcggctgcctgagccgcagcaccagcgccaacatcagccggggcctgcagttcatcctgaccccaaatgagttcagcgcccagaccttctacgccctgagccccaccatgcacagccaggccacccaggtgcccatcagccagagtgatggcagcgctgtggccgccaccaacaccatcgccaaccagatcaacacagcccccaagccagctgcccccaccaccctgcagatccccccacccctgcctgccatcaagcacctgcccaggcctgagaccctgcaccccaacccagctggcctgcaggagagcatcagtgatgtgaccacctgcctggtggccagcaaagaaaatgtgcaggtggcccagagcaacctgaccaaggaccgctccatgaggaagagctttgacatgggcggggagaccctgctgtctgtgtgccccatggtgcccaaggacctgggcaagagcctgtctgtgcagaacctgatccgcagcacagaggagctgaacatccagctgagcggcagcgagagcagcggcagccggggcagccaggacttctaccccaagtggagggagagcaagctgttcatcacagatgaggaggtgggccctgaggagacagaaacagacacctttgatgctgccccccagcctgcccgggaggccgcctttgccagtgacagcctgaggacaggccgcagccgcagcagccagagcatctgcaaggccggggagagcacagatgccctgagcctgccccacgtgaagctgaagtag

SEQ ID NO: 60724 - DNA, 2829 bp, Artificial Sequence
  derived and/or modified sequence
atgccccggcaccacgccggcggcgaggagggcggcgccgccggcctgtgggttaagagcggtgcagctgccgcagccgcgggtggagggagacttggatccggcatgaaagacgttgagagcggacggggccgcgtcctattgaactctgctgccgcccggggagacggactgcttctgttaggtactagggctgctacactgggtggggggggagggggactccgcgagagccggcgcggtaagcagggggcgagaatgagtctcctggggaaaccactttcatatactagttctcaatcttgcagacgcaatgtgaaatatcggcgcgtacagaattacctctacaatgtgttggaaagacccagagggtgggcgttcatttatcacgcctttgtatttctcctggtctttggctgcctaatcctgagtgtgttcagtactattcccgaacacacaaaattggcgagcagttgtcttctgattttagagttcgtcatgatagtagttttcggactggagtttatcattaggatttggtccgcgggctgttgttgtcgttaccgcggttggcaggggaggttgaggttcgcccgcaagccattttgcgtcatcgatactattgtgttaattgcaagtattgcagtcgtcagcgctaaaacacagggaaacatctttgccacctccgctctgagatctctgcgctttttgcagatattacgaatggtcagaatggaccggagggggggaacctggaaactgctgggatccgttgtttacgcccacagcaaagagttaatcactgcctggtatatagggtttcttgtattgatcttcagtagcttccttgtgtacctggtcgaaaaggatgccaataaggaatttagtacatatgccgatgccctctggtggggcacgatcacacttaccaccattggttatggggacaagacccccctcacctggttaggccgcctgcttagcgcagggttcgccctgctgggcatctcctttttcgcccttccagcagggatcctgggctcgggctttgccctgaaggtacaggagcagcataggcaaaagcacttcgaaaagcggaggaaccccgccgcaaacctaatccagtgcgtttggcgctcttatgcggccgacgagaagagcgtgtccatcgcgacctggaagccccatctcaaggcgctgcatacatgcagccccaccaacaagttctgttccaataagcaaaagttgttccgcatgtatacaagccgcaagcagtcacagaagttaagttttaaggagcgggttaggatggcgtcgccccgtggccagtcaattaagtctcgacaggccagtgtgggagacagacgttcaccatcaactgacattactgctgaaggatccccaaccaaagtacagaagtcttggtcatttaatgatcgtaccaggtttcgtccctctctgcgtctgaagtcctcccaaccaaaaccagttattgatgccgatactgccctcggaaccgatgacgtttatgatgagaaagggtgtcagtgtgatgtctcagtggaagatctgacacctcccctcaagactgtgataagggctattcggattatgaagtttcatgtggccaaaagaaagtttaaggagactctgagaccctacgatgtgaaggacgttatcgaacagtacagcgccgggcacctcgacatgctgtgcagaataaaatcactgcagacacgcgtggatcagatcctcggaaagggccagatcacaagcgataagaagagtagagagaaaatcaccgccgagcacgagaccacagatgacctcagcatgttaggccgagtggtgaaagtggagaagcaggttcaatccattgagtcaaaactggactgtcttctcgacatataccagcaggtgttacggaaaggctctgcgagcgccttggcattggcctcgtttcagatcccccctttcgaatgcgagcagacaagcgattaccagagcccggtggacagcaaggatttgtccggttcagctcagaatagcggctgcctatcccggtcaacgagcgctaatatatcccgcggattgcagttcatactgacaccaaacgagttctcggcccagacgttttatgctctgtcacccacgatgcactcccaggcaacacaggtgcctatctctcagtccgatggatccgccgtagcagccacaaatacaattgcaaaccagatcaataccgcccccaagcctgccgcaccgacaacactgcagatacctccaccattgcccgccatcaagcacctgcctaggcccgagacccttcatcctaatcccgcggggctgcaggaaagtatctcagatgtaacaacatgcctggtcgcttcaaaagagaatgtgcaggttgcgcagtccaacctgacaaaggacaggtcaatgcgtaagtctttcgacatggggggtgaaaccctactctccgtttgtccaatggtgcccaaggacctgggtaagagcctgtccgttcagaacctcatacggtccacagaggagctgaacattcagcttagcgggtctgaatcgagtggcagccgcggatcccaagatttctatcctaaatggcgagaatcaaagctatttatcacggacgaggaagtgggtccagaggagaccgagaccgataccttcgacgccgctccacagcccgcacgagaagcagcgtttgctagcgactctctgcggacggggcggtcacgtagctcacagtccatatgtaaagcaggggagtcaaccgatgccttgagcttaccacacgttaagctgaaatag

SEQ ID NO: 60725 - DNA, 2829 bp, Artificial Sequence
  derived and/or modified sequence
atgccccgccaccacgcgggaggagaggagggcggcgccgccgggctctgggtgaagagcggcgcagcggcggcggcggcgggcggggggcgcttgggcagcggcatgaaggatgtggagtccggccggggcagggtgctgctgaactcggcagccgccaggggcgacggcctgctactgctgggcacccgcgcggccacgctcggtggcggcggcggtggcctgagggagagccgccggggcaagcagggggcccggatgagcctgctggggaagccgctctcttacacgagtagccagagctgccggcgcaacgtcaagtaccggcgggtgcagaactacctgtacaacgtgctggagagaccccgcggctgggcgttcatctaccacgctttcgtttttctccttgtctttggttgcttgattttgtcagtgttttctaccatccctgagcacacaaaattggcctcaagttgcctcttgatcctggagttcgtgatgattgtcgtctttggtttggagttcatcattcgaatctggtctgcgggttgctgttgtcgatatagaggatggcaaggaagactgaggtttgctcgaaagcccttctgtgttatagataccattgttcttatcgcttcaatagcagttgtttctgcaaaaactcagggtaatatttttgccacgtctgcactcagaagtctccgtttcctacagatcctccgcatggtgcgcatggaccgaaggggaggcacttggaaattactgggttcagtggtttatgctcacagcaaggaattaatcacagcttggtacataggatttttggttcttattttttcgtctttccttgtctatctggtggaaaaggatgccaataaagagttttctacatatgcagatgctctctggtggggcacaattacattgacaactattggctatggagacaaaactcccctaacttggctgggaagattgctttctgcaggctttgcactccttggcatttctttctttgcacttcctgccggcattcttggctcaggttttgcattaaaagtacaagaacaacaccgccagaaacactttgagaaaagaaggaacccagctgccaacctcattcagtgtgtttggcgtagttacgcagctgatgagaaatctgtttccattgcaacctggaagccacacttgaaggccttgcacacctgcagccctaccaataagttctgtagtaataagcagaagctcttcagaatgtacacctcacggaagcagagtcagaagctaagttttaaggagcgagtgcgcatggctagccccaggggccagagtattaagagccgacaagcctcagtaggtgacaggaggtccccaagcaccgacatcacagccgagggcagtcccaccaaagtgcagaagagctggagcttcaacgaccgaacccgcttccggccctcgctgcgcctcaaaagttctcagccaaaaccagtgatagatgctgacacagcccttggcactgatgatgtatatgatgaaaaaggatgccagtgtgatgtatcagtggaagacctcaccccaccacttaaaactgtcattcgagctatcagaattatgaaatttcatgttgcaaaacggaagtttaaggaaacattacgtccatatgatgtaaaagatgtcattgaacaatattctgctggtcatctggacatgttgtgtagaattaaaagccttcaaacacgtgttgatcaaattcttggaaaagggcaaatcacatcagataagaagagccgagagaaaataacagcagaacatgagaccacagacgatctcagtatgctcggtcgggtggtcaaggttgaaaaacaggtacagtccatagaatccaagctggactgcctactagacatctatcaacaggtccttcggaaaggctctgcctcagccctcgctttggcttcattccagatcccaccttttgaatgtgaacagacatctgactatcaaagccctgtggatagcaaagatctttcgggttccgcacaaaacagtggctgcttatccagatcaactagtgccaacatctcgagaggcctgcagttcattctgacgccaaatgagttcagtgcccagactttctacgcgcttagccctactatgcacagtcaagcaacacaggtgccaattagtcaaagcgatggctcagcagtggcagccaccaacaccattgcaaaccaaataaatacggcacccaagccagcagccccaacaactttacagatcccacctcctctcccagccatcaagcatctgcccaggccagaaactctgcaccctaaccctgcaggcttacaggaaagcatttctgacgtcaccacctgccttgttgcctccaaggaaaatgttcaggttgcacagtcaaatctcaccaaggaccgttctatgaggaaaagctttgacatgggaggagaaactctgttgtctgtctgtcccatggtgccgaaggacttgggcaaatctttgtctgtgcaaaacctgatcaggtcgaccgaggaactgaatatacaactttcagggagtgagtcaagtggctccagaggcagccaagatttttaccccaaatggagggaatccaaattgtttataactgatgaagaggtgggtcccgaagagacagagacagacacttttgatgccgcaccgcagcctgccagggaagctgcctttgcatcagactctctaaggactggaaggtcacgatcatctcagagcatttgtaaggcaggagaaagtacagatgccctcagcttgcctcatgtcaaactgaaataa

SEQ ID NO: 60726 - DNA, 2829 bp, Artificial Sequence
  derived and/or modified sequence
atgcccagacaccatgctgggggagaggagggaggggcagccggactctgggtaaaatcgggcgctgccgctgccgcagcgggagggggtcgactcggttctggtatgaaggatgtggagtctgggagaggcagagtcctgcttaattcggccgcagctagaggagacggcttactgcttttaggcacccgtgccgctaccctcgggggaggcggaggcggtttgagagagagtcgtagaggaaaacagggggctaggatgtccctgctgggtaagcccttgtcttatacttctagtcaaagctgtcggcgaaacgtgaaatatcggcgtgtgcaaaactacttgtataatgtgttggaacggcctcgaggctgggcttttatataccacgcatttgtattcctgcttgttttcgggtgtctgatcctgtccgttttctcaactatcccggaacacaccaagctggcctcgagctgtttactcatccttgagttcgtgatgatcgtggtatttgggctggaatttattattagaatatggtcagctggttgttgttgccggtatagaggatggcaaggtaggctccgatttgccaggaagcctttctgcgttattgatacaattgtgctcatagctagcattgccgtcgtgtcagcgaaaacccagggcaatatttttgctacctctgccctgcgatcattgagatttctgcagatcctgaggatggtgcgcatggaccggaggggcggaacgtggaagctgctgggaagcgtcgtgtacgctcactctaaagagctgatcacggcgtggtatatcggattccttgtgctcattttttcctccttcctcgtctatcttgtggagaaagacgctaataaggagttcagcacatacgctgacgcactgtggtggggaaccatcaccctgacaaccattggttacggcgacaaaaccccccttacatggctgggccgtctgctgagtgcagggtttgcccttctgggcatcagcttcttcgcactgcccgcaggaatcctcgggagcgggttcgcccttaaggtgcaggaacaacaccggcagaaacattttgaaaaacggagaaatcctgcagcaaatctgattcaatgcgtgtggcgtagctacgctgccgacgagaaaagcgtatccattgccacatggaaaccacaccttaaagcgcttcacacctgcagtcctactaacaaattttgttccaataagcagaaactgtttcgcatgtacacctcacggaagcaatcccagaaactcagcttcaaggagcgtgtaaggatggcgtccccccgtggccagtcaatcaaatcaaggcaagccagcgtgggcgatcggaggtcaccttctaccgacatcaccgctgagggcagtccaacaaaggtgcagaagagctggtcgtttaatgacaggactagatttagaccctctcttcgtctcaagtcgtctcaaccaaagcctgtgattgacgctgacacagcattgggaacagacgatgtgtatgacgagaagggctgccaatgtgacgtttctgtcgaagatctcacgccacccctgaagactgtgattcgggctatacgcatcatgaagttccacgttgctaagagaaaatttaaagaaaccctgagaccgtacgacgtcaaagatgtcatcgaacagtattccgccggacatttggacatgctctgtcggatcaaaagcctgcagaccagagtggaccagattctagggaaaggtcagatcaccagtgataaaaagtccagggagaagatcacggctgagcatgagaccactgacgacctgagcatgttaggcagggtggtgaaagtggagaagcaagtgcagtccattgagtctaaactggactgcctgcttgatatctaccaacaggtgctgaggaagggcagtgctagcgcgttggcgttggcatcctttcaaatccctccttttgagtgtgagcagacatctgattaccaatctccagtggacagtaaagatttgtccggatctgcccagaactctggttgtctgtccaggagcaccagtgcaaatatttcaaggggtcttcaatttattttaactcctaacgagttttccgcccagacattctacgcactttctcctaccatgcactcacaggcaacacaagtgcccatttctcagtcagacggaagtgctgtcgctgcaactaatactattgcgaatcagatcaacaccgcaccaaagcccgcagcccctactaccctccagatccctccaccgctccccgctatcaagcacctgcccagacctgagacacttcacccgaatcccgctggattgcaggagtctatctcagatgtgaccacttgcttagtcgcctctaaagaaaacgtgcaggtagcacagtcaaatttgaccaaagaccggagcatgcgcaaatcttttgatatgggaggtgagaccctcctctcagtgtgtcccatggtcccaaaagatctcggtaaatccctatctgtacaaaacctgatcagatctacagaggaactgaacatccaactcagcggctccgagtcatcaggctcaaggggttcccaggacttctaccctaagtggagggaatctaagttgtttataaccgacgaagaggtgggccctgaggaaaccgagaccgacacatttgacgcagccccacaaccagcacgcgaggctgcattcgcctctgatagtcttaggacaggaagaagtagatcctcacagtccatctgtaaagccggagagtccactgatgccctgtctttgccccatgtgaaattaaagtag

SEQ ID NO: 60727 - DNA, 2829 bp, Artificial Sequence
  derived and/or modified sequence
atgcccagacaccacgccggcggcgaggagggcggcgccgccggcctgtgggtgaagagcggcgccgccgccgccgccgccggcggcggcagactgggcagcggcatgaaggacgtggagagcggcagaggcagagtgctgctgaacagcgccgccgccagaggcgacggcctgctgctgctgggcaccagagccgccaccctgggcggcggcggcggcggcctgagagagagcagaagaggcaagcagggcgccagaatgagcctgctgggcaagcccctgagctacaccagcagccagagctgcagaagaaacgtgaagtacagaagagtgcagaactacctgtacaacgtgctggagagacccagaggctgggccttcatctaccacgccttcgtgttcctgctggtgttcggctgcctgatcctgagcgtgttcagcaccatccccgagcacaccaagctggccagcagctgcctgctgatcctggagttcgtgatgatcgtggtgttcggcctggagttcatcatcagaatctggagcgccggctgctgctgcagatacagaggctggcagggcagactgagattcgccagaaagcccttctgcgtgatcgacaccatcgtgctgatcgccagcatcgccgtggtgagcgccaagacccagggcaacatcttcgccaccagcgccctgagaagcctgagattcctgcagatcctgagaatggtgagaatggacagaagaggcggcacctggaagctgctgggcagcgtggtgtacgcccacagcaaggagctgatcaccgcctggtacatcggcttcctggtgctgatcttcagcagcttcctggtgtacctggtggagaaggacgccaacaaggagttcagcacctacgccgacgccctgtggtggggcaccatcaccctgaccaccatcggctacggcgacaagacccccctgacctggctgggcagactgctgagcgccggcttcgccctgctgggcatcagcttcttcgccctgcccgccggcatcctgggcagcggcttcgccctgaaggtgcaggagcagcacagacagaagcacttcgagaagagaagaaaccccgccgccaacctgatccagtgcgtgtggagaagctacgccgccgacgagaagagcgtgagcatcgccacctggaagccccacctgaaggccctgcacacctgcagccccaccaacaagttctgcagcaacaagcagaagctgttcagaatgtacaccagcagaaagcagagccagaagctgagcttcaaggagagagtgagaatggccagccccagaggccagagcatcaagagcagacaggccagcgtgggcgacagaagaagccccagcaccgacatcaccgccgagggcagccccaccaaggtgcagaagagctggagcttcaacgacagaaccagattcagacccagcctgagactgaagagcagccagcccaagcccgtgatcgacgccgacaccgccctgggcaccgacgacgtgtacgacgagaagggctgccagtgcgacgtgagcgtggaggacctgaccccccccctgaagaccgtgatcagagccatcagaatcatgaagttccacgtggccaagagaaagttcaaggagaccctgagaccctacgacgtgaaggacgtgatcgagcagtacagcgccggccacctggacatgctgtgcagaatcaagagcctgcagaccagagtggaccagatcctgggcaagggccagatcaccagcgacaagaagagcagagagaagatcaccgccgagcacgagaccaccgacgacctgagcatgctgggcagagtggtgaaggtggagaagcaggtgcagagcatcgagagcaagctggactgcctgctggacatctaccagcaggtgctgagaaagggcagcgccagcgccctggccctggccagcttccagatcccccccttcgagtgcgagcagaccagcgactaccagagccccgtggacagcaaggacctgagcggcagcgcccagaacagcggctgcctgagcagaagcaccagcgccaacatcagcagaggcctgcagttcatcctgacccccaacgagttcagcgcccagaccttctacgccctgagccccaccatgcacagccaggccacccaggtgcccatcagccagagcgacggcagcgccgtggccgccaccaacaccatcgccaaccagatcaacaccgcccccaagcccgccgcccccaccaccctgcagatccccccccccctgcccgccatcaagcacctgcccagacccgagaccctgcaccccaaccccgccggcctgcaggagagcatcagcgacgtgaccacctgcctggtggccagcaaggagaacgtgcaggtggcccagagcaacctgaccaaggacagaagcatgagaaagagcttcgacatgggcggcgagaccctgctgagcgtgtgccccatggtgcccaaggacctgggcaagagcctgagcgtgcagaacctgatcagaagcaccgaggagctgaacatccagctgagcggcagcgagagcagcggcagcagaggcagccaggacttctaccccaagtggagagagagcaagctgttcatcaccgacgaggaggtgggccccgaggagaccgagaccgacaccttcgacgccgccccccagcccgccagagaggccgccttcgccagcgacagcctgagaaccggcagaagcagaagcagccagagcatctgcaaggccggcgagagcaccgacgccctgagcctgccccacgtgaagctgaagtag

SEQ ID NO: 60728 - protein, 951 aa, Artificial Sequence
  derived and/or modified sequence
MPRHHAGGEEGGAAGLWVKSGAAAAAAGGGRLGSGMKDVESGRGRVLLNSAAARGDGLLLLGTRAATLGGGGGGLRESRRGKQGARMSLLGKPLSYTSSQSCRRNVKYRRVQNYLYNVLERPRGWAFIYHAFVFLLVFGCLILSVFSTIPEHTKLASSCLLILEFVMIVVFGLEFIIRIWSAGCCCRYRGWQGRLRFARKPFCVIDTIVLIASIAVVSAKTQGNIFATSALRSLRFLQILRMVRMDRRGGTWKLLGSVVYAHSKELITAWYIGFLVLIFSSFLVYLVEKDANKEFSTYADALWWGTITLTTIGYGDKTPLTWLGRLLSAGFALLGISFFALPAGILGSGFALKVQEQHRQKHFEKRRNPAANLIQCVWRSYAADEKSVSIATWKPHLKALHTCSPTKKEQGEASSSKFCSNKQKLFRMYTSRKQSQKLSFKERVRMASPRGQSIKSRQASVGDRRSPSTDITAEGSPTKVQKSWSFNDRTRFRPSLRLKSSQPKPVIDADTALGTDDVYDEKGCQCDVSVEDLTPPLKTVIRAIRIMKFHVAKRKFKETLRPYDVKDVIEQYSAGHLDMLCRIKSLQTRVDQILGKGQITSDKKSREKITAEHETTDDLSMLGRVVKVEKQVQSIESKLDCLLDIYQQVLRKGSASALALASFQIPPFECEQTSDYQSPVDSKDLSGSAQNSGCLSRSTSANISRGLQFILTPNEFSAQTFYALSPTMHSQATQVPISQSDGSAVAATNTIANQINTAPKPAAPTTLQIPPPLPAIKHLPRPETLHPNPAGLQESISDVTTCLVASKENVQVAQSNLTKDRSMRKSFDMGGETLLSVCPMVPKDLGKSLSVQNLIRSTEELNIQLSGSESSGSRGSQDFYPKWRESKLFITDEEVGPEETETDTFDAAPQPAREAAFASDSLRTGRSRSSQSICKAGESTDALSLPHVKLK

SEQ ID NO: 60729 - protein, 427 aa, Artificial Sequence
  derived and/or modified sequence
MPRHHAGGEEGGAAGLWVKSGAAAAAAGGGRLGSGMKDVESGRGRVLLNSAAARGDGLLLLGTRAATLGGGGGGLRESRRGKQGARMSLLGKPLSYTSSQSCRRNVKYRRVQNYLYNVLERPRGWAFIYHAFVFLLVFGCLILSVFSTIPEHTKLASSCLLILEFVMIVVFGLEFIIRIWSAGCCCRYRGWQGRLRFARKPFCVIDTIVLIASIAVVSAKTQGNIFATSALRSLRFLQILRMVRMDRRGGTWKLLGSVVYAHSKELITAWYIGFLVLIFSSFLVYLVEKDANKEFSTYADALWWGTITLTTIGYGDKTPLTWLGRLLSAGFALLGISFFALPAGILGSGFALKVQEQHRQKHFEKRRNPAANLIQCVWRSYAADEKSVSIATWKPHLKALHTCSPTKKEQGEASSRFVISLLLHVCL

SEQ ID NO: 60730 - protein, 951 aa, Artificial Sequence [sequence omitted]

SEQ ID NO: 60731 - DNA, 2856 bp, Artificial Sequence
  derived and/or modified sequence
atgccacggcatcacgctggaggcgaggaaggaggtgctgccggtttgtgggtgaagtctggggcggccgccgcagcggcgggtggcggtcgcctgggaagtggaatgaaggacgtcgagtccggaagagggcgcgtgctgttaaacagcgcggctgctaggggagacgggttgttactcctgggtacgagggctgctacattgggtggagggggtggcgggctgcgagagtctagacgtgggaagcaaggggctagaatgagcctgctgggaaagcctttgtcttacactagcagtcaatcttgtagaaggaacgtcaagtataggcgcgtgcagaactatttgtacaatgtcctagagagacctaggggctgggccttcatttaccatgcctttgtctttctcctggtctttggttgtttgatactttcagtattcagcactatcccggagcacactaagctggcttcatcatgtctgcttatactggaatttgtgatgatagtcgtgttcggactcgagttcatcattcggatctggtctgcgggatgttgctgcagatatagaggatggcaggggcggctgcgattcgcccgaaagccattttgcgtcatcgacaccatcgttcttatcgcttccatcgccgtggtctcagcgaagacgcagggaaacatcttcgcaacttccgctctccggtcactgcggtttttacagattctgagaatggtgcggatggaccggcgggggggaacctggaagttgctgggttccgtggtatatgcacattccaaagaactaattactgcctggtatatcggcttcctcgtcttaatcttctcatctttccttgtttacttggtcgaaaaggacgctaacaaagagttcagcacatatgccgacgccctctggtggggcaccattaccttaactaccattggttacggagacaagacccccctaacatggcttggcaggcttctctctgctggctttgccctgttggggataagcttttttgccctgcctgcaggcatacttgggagcgggttcgccctgaaggtgcaggagcagcaccggcagaagcattttgagaaaagaagaaatcccgcggcaaatttaatccaatgtgtctggagaagctatgctgccgatgagaaaagcgtgtcgattgccacttggaagccacatttgaaggctctgcacacctgctcccctactaaaaaggagcagggtgaagcgtcatctagcaaattctgtagcaataaacagaaactgtttcggatgtacacctctcggaagcagagtcagaagctgagcttcaaggagcgggtcagaatggctagtccacgtggacagtccatcaaatctaggcaggcttctgtcggagatagaaggtcgccaagcactgacatcacagctgaagggtcacccactaaagtacagaaatcttggagcttcaacgaccgcacccgattccgtccctcactacgtctgaagtcatcacagcccaaacctgtgatcgacgctgataccgccctaggcactgatgacgtgtacgatgaaaaaggatgtcaatgcgacgtgtctgtggaagatctcacacctccattgaagaccgtgataagagcaatccgaataatgaagttccacgtggctaagcgaaagtttaaagagactctgcggccatacgacgtgaaagatgtcatcgagcagtacagcgccggccacctcgatatgctctgcagaatcaaaagcttgcagacccgtgtagatcagatactgggcaagggccaaataacatccgacaaaaagtctagagagaaaattacagctgagcacgagacaaccgacgatctttccatgctcgggcgggtcgtgaaggtggagaagcaggtgcaatccattgagagcaaacttgactgtctgctcgacatctaccagcaggtgctacggaaaggctcagctagcgccctggctttggcctcattccaaattccaccctttgaatgcgaacagacatctgattaccagtcaccggtggacagtaaggacttgagcgggagcgcacagaattccggctgtctttcccggagcacaagcgccaacatcagtcgtgggcttcagtttattctgactcctaatgagttctcagcacagactttctatgcattgtcaccaaccatgcatagccaggccacacaagtccctataagtcaatctgatgggtctgcagttgccgccaccaacaccattgctaaccagataaacaccgccccaaaacccgccgcccccacaaccctacagataccaccgccacttccagccatcaagcacttgccccgccccgagactctccaccctaatccagccggactgcaagaatccattagtgacgttacaacctgcctggtggcatccaaggaaaacgtgcaggtggcgcagagcaacttgaccaaggatcgtagcatgagaaaaagctttgacatgggaggagaaaccctgcttagcgtgtgcccgatggtgccgaaggatttgggaaagagccttagtgttcagaacctgattcgctccaccgaagagcttaacatccaactttccggatccgagagtagtggaagcagaggatctcaggacttttaccccaaatggcgggaatctaagctgtttatcaccgatgaagaagtgggccccgaggaaacagaaactgacacatttgacgccgctcctcagcctgctagggaggccgcattcgcctcagatagcctgaggactggccgatcacgctcctcacaaagcatttgcaaggcaggcgagtctacagacgccctgtccctaccacacgtcaaactcaaatag

SEQ ID NO: 60732 - DNA, 2856 bp, Artificial Sequence
  derived and/or modified sequence
atgcctaggcatcacgcaggaggcgaggagggtggcgccgcagggctgtgggtgaagagcggagctgcagccgctgcggccgggggcgggcgcctggggtctggcatgaaggatgtggaatccggaaggggacgcgttctgttaaattcggccgcagccagaggagatgggctactgctcctgggaactcgtgccgccacattgggcggcggcgggggcgggctccgggagtccaggagaggtaaacagggtgccagaatgagccttttaggtaagcccctctcatatactagttcacagtcttgcaggcggaacgttaaataccggagggtgcaaaattacctttataacgtcctcgagcgtcctcgcggttgggcttttatttaccacgcatttgtcttcctgcccgtgtttggctgcttgatcctgtctgtgttctccaccatccccgagcacactaagctggcctcgtcttgtttgctgatcctcgagttcgtcatgatcgttgtctttggcctggaattcatcattagaatctggtcagctggatgctgctgtcgctaccgcggttggcagggccggttgagatttgcacgcaagccattttgcgtgatcgacaccatagtcctaatagcttctatagctgtcgtgtctgccaaaacacagggcaatatttttgccacaagcgccttgcgatccctccggtttctgcagattctgagaatggtacgcatggaccgacgggggggcacttggaaattattgggatccgtagtgtacgcacacagcaaagaacttattaccgcatggtacattgggtttctcgtgctgattttttccagcttcttagtgtatctagtggaaaaagatgcaaacaaggaatttagcacgtacgccgacgccctttggtggggcactataaccctcaccacaattggatatggcgataagacccccctcacatggttagggcggttactgagtgcaggcttcgcgcttttaggtataagcttctttgctcttcccgccgggattctgggttcaggcttcgcccttaaggtacaggagcagcacagacaaaagcattttgaaaaacgccgaaatcctgcagcaaacttaatccaatgcgtctggagatcatacgcagcagatgaaaaatcggtgtctatcgcgacatggaaacctcacctaaaagccctgcacacttgctcacctacaaagaaggaacagggagaggctagctccagtaagttttgttcaaacaagcagaaactatttcgaatgtacacctcccggaagcagtctcaaaaactgagcttcaaggagagggtacgaatggcctcacccagaggacagtccattaaatctagacaagcttcagttggcgacaggaggtccccttctaccgatatcaccgcagaagggagccctaccaaagtccaaaagagctggtcatttaatgatcgcaccaggtttaggccttctcttagattaaagtcctctcagcccaaaccggttatcgatgctgacacagccctgggcacagatgatgtgtatgacgaaaaggggtgccagtgcgatgtcagtgtagaggacctcaccccgcccctgaaaactgtaattagggccatacgtatcatgaagttccacgtcgctaaacgtaaatttaaggaaaccctccgaccgtatgacgttaaggacgtgatcgaacagtactccgccgggcacctggatatgctgtgcaggatcaagtcgctgcaaacaagagtggatcagatcctaggaaagggccagattacaagcgacaagaagagtagagaaaaaatcacagccgaacacgagacgactgacgatttgtcaatgctgggaagagtagtgaaagtggaaaaacaagtccaatctatagaaagcaaactcgactgtctgctggatatctaccagcaggtgctccggaaaggtagtgcaagtgctctggccctggcttcgttccagatccctccgtttgaatgtgagcagacatccgactaccaatccccagtcgatagtaaggacctttctgggtcagcacagaactctggctgcctctcaagaagcacaagtgccaatatatcccggggcctccaattcattctcactcctaatgagttctccgcacaaaccttttacgccttatcacccacgatgcatagccaggcaacacaggtgccaatttcgcagtcagacgggagcgccgttgccgctacaaataccatcgccaaccaaattaacactgctccgaaacccgccgctccaactactcttcagatcccacctcctttaccggccattaagcatctgccccggccagaaactctgcaccccaatccagcggggctgcaggagtctatcagcgacgttaccacatgcctggttgcctctaaagagaatgtgcaggtggcccagtctaacctgaccaaggatcggtctatgaggaagagctttgacatgggcggggagactctgctgtccgtgtgcccaatggttcccaaagatctggggaagagcttgtccgtacagaatctgatacgctcaacagaagaactgaacattcagttgagtggttcggagagtagcgggtcccggggcagtcaggacttctaccccaaatggcgggagtcgaaacttttcataaccgacgaagaggtgggccccgaagagacagaaaccgacacgtttgatgcagcgcctcagcccgcccgagaggctgccttcgcatcagattccctgcggacagggagatccagatcttcccagtccatttgcaaggccggagagagtaccgacgcactttctctccctcatgtcaagttaaaatag

SEQ ID NO: 60733 - DNA, 2856 bp, Artificial Sequence
  derived and/or modified sequence
atgcccaggcaccacgccggcggggaggagggcggggccgccggcctgtgggtgaagagcggggctgctgctgctgctgctgggggcggccgcctgggcagcggcatgaaggatgtggagagcggccggggccgggtgctgctgaacagcgctgctgcccggggagatggcctgctgctgctgggcaccagggctgccaccctgggcggcggcggcggcggcctgcgggagagcagaagaggcaagcagggcgccaggatgagcctgctgggcaagcccctgagctacaccagcagccagagctgcagaagaaatgtgaagtacagaagagtgcagaactacctgtacaacgtgctggagcggccccggggctgggccttcatctaccacgcctttgtgttcctgctggtgtttggctgcctgatcctgagcgtcttcagcaccatccctgagcacaccaagctggccagcagctgcctgctgatcctggagtttgtgatgattgtggtgtttggcctggagttcatcatccgcatctggagcgctggctgctgctgccgctaccggggctggcagggccgcctgcgctttgccaggaagcccttctgtgtgattgacaccatcgtgctgattgccagcattgctgtggtgtctgccaagacccagggcaacatctttgccaccagcgccctgcggagcctgcgcttcctgcagatcctgaggatggtgaggatggacagaagaggaggcacctggaagctgctgggctctgtggtgtatgcccacagcaaggagctgatcacagcctggtacatcggcttcctggtgctgatcttcagcagcttcctggtgtacctggtggagaaggatgccaacaaggagttcagcacctatgcagatgccctgtggtggggcaccatcaccctgaccaccatcggctacggggacaagacccccctgacctggctgggccgcctgctgtctgctggctttgccctgctgggcatctccttctttgccctgcctgctggcatcctgggcagcggctttgccctgaaggtgcaggagcagcaccggcagaagcactttgagaagagaagaaatcctgctgccaacctgatccagtgtgtgtggaggagctatgctgctgatgagaagtctgtgtccatcgccacctggaagccccacctgaaggccctgcacacctgcagccccaccaagaaggagcagggcgaggccagcagcagcaagttctgcagcaacaagcagaagctgttcaggatgtacaccagcaggaagcagagccagaagctgtccttcaaggagcgggtgaggatggccagcccccggggccagagcatcaagagccggcaggcctctgtgggggaccggcgcagccccagcacagacatcacagctgagggcagccccaccaaggtgcagaagtcctggagcttcaatgacaggacccgcttccggcccagcctgcggctgaagagcagccagcccaagcctgtgattgatgctgacacagccctgggcacagatgatgtgtatgatgagaagggctgccagtgtgatgtgtctgtggaggacctgaccccacccctgaagacagtcatccgggccatccgcatcatgaagttccacgtggccaagaggaagttcaaggagaccctgcggccctatgatgtgaaggatgtgattgagcagtacagcgctggccacctggacatgctgtgccgcatcaagagcctgcagaccagggtggaccagatcctgggcaagggccagatcaccagtgacaagaagagccgggagaagatcacagctgagcacgagaccacagatgacctgtccatgctgggccgggtggtgaaggtggagaagcaggtgcagagcattgagagcaagctggactgcctgctggacatctaccagcaggtgctgaggaagggcagcgccagcgccctggccctggccagcttccagatccccccatttgaatgtgagcagaccagtgactaccagagccctgtggacagcaaggacctgagcggcagcgcccagaacagcggctgcctgagccgcagcaccagcgccaacatcagccggggcctgcagttcatcctgaccccaaatgagttcagcgcccagaccttctacgccctgagccccaccatgcacagccaggccacccaggtgcccatcagccagagtgatggcagcgctgtggccgccaccaacaccatcgccaaccagatcaacacagcccccaagccagctgcccccaccaccctgcagatccccccacccctgcctgccatcaagcacctgcccaggcctgagaccctgcaccccaacccagctggcctgcaggagagcatcagtgatgtgaccacctgcctggtggccagcaaagaaaatgtgcaggtggcccagagcaacctgaccaaggaccgctccatgaggaagagctttgacatgggcggggagaccctgctgtctgtgtgccccatggtgcccaaggacctgggcaagagcctgtctgtgcagaacctgatccgcagcacagaggagctgaacatccagctgagcggcagcgagagcagcggcagccggggcagccaggacttctaccccaagtggagggagagcaagctgttcatcacagatgaggaggtgggccctgaggagacagaaacagacacctttgatgctgccccccagcctgcccgggaggccgcctttgccagtgacagcctgaggacaggccgcagccgcagcagccagagcatctgcaaggccggggagagcacagatgccctgagcctgccccacgtgaagctgaagtag

SEQ ID NO: 60734 - DNA, 2856 bp, Artificial Sequence
  derived and/or modified sequence
atgcccaggcaccacgccggcggggaggagggcggggccgccggcctgtgggtgaagagcggggctgctgctgctgctgctgggggcggccgcctgggcagcggcatgaaggatgtggagagcggccggggccgggtgctgctgaacagcgctgctgcccggggagatggcctgctgctgctgggcaccagggctgccaccctgggcggcggcggcggcggcctgcgggagagcagaagaggcaagcagggcgccaggatgagcctgctgggcaagcccctgagctacaccagcagccagagctgcagaagaaatgtgaagtacagaagagtgcagaactacctgtacaacgtgctggagcggccccggggctgggccttcatctaccacgcctttgtgttcctgcctgtgtttggctgcctgatcctgagcgtcttcagcaccatccctgagcacaccaagctggccagcagctgcctgctgatcctggagtttgtgatgattgtggtgtttggcctggagttcatcatccgcatctggagcgctggctgctgctgccgctaccggggctggcagggccgcctgcgctttgccaggaagcccttctgtgtgattgacaccatcgtgctgattgccagcattgctgtggtgtctgccaagacccagggcaacatctttgccaccagcgccctgcggagcctgcgcttcctgcagatcctgaggatggtgaggatggacagaagaggaggcacctggaagctgctgggctctgtggtgtatgcccacagcaaggagctgatcacagcctggtacatcggcttcctggtgctgatcttcagcagcttcctggtgtacctggtggagaaggatgccaacaaggagttcagcacctatgcagatgccctgtggtggggcaccatcaccctgaccaccatcggctacggggacaagacccccctgacctggctgggccgcctgctgtctgctggctttgccctgctgggcatctccttctttgccctgcctgctggcatcctgggcagcggctttgccctgaaggtgcaggagcagcaccggcagaagcactttgagaagagaagaaatcctgctgccaacctgatccagtgtgtgtggaggagctatgctgctgatgagaagtctgtgtccatcgccacctggaagccccacctgaaggccctgcacacctgcagccccaccaagaaggagcagggcgaggccagcagcagcaagttctgcagcaacaagcagaagctgttcaggatgtacaccagcaggaagcagagccagaagctgtccttcaaggagcgggtgaggatggccagcccccggggccagagcatcaagagccggcaggcctctgtgggggaccggcgcagccccagcacagacatcacagctgagggcagccccaccaaggtgcagaagtcctggagcttcaatgacaggacccgcttccggcccagcctgcggctgaagagcagccagcccaagcctgtgattgatgctgacacagccctgggcacagatgatgtgtatgatgagaagggctgccagtgtgatgtgtctgtggaggacctgaccccacccctgaagacagtcatccgggccatccgcatcatgaagttccacgtggccaagaggaagttcaaggagaccctgcggccctatgatgtgaaggatgtgattgagcagtacagcgctggccacctggacatgctgtgccgcatcaagagcctgcagaccagggtggaccagatcctgggcaagggccagatcaccagtgacaagaagagccgggagaagatcacagctgagcacgagaccacagatgacctgtccatgctgggccgggtggtgaaggtggagaagcaggtgcagagcattgagagcaagctggactgcctgctggacatctaccagcaggtgctgaggaagggcagcgccagcgccctggccctggccagcttccagatccccccatttgaatgtgagcagaccagtgactaccagagccctgtggacagcaaggacctgagcggcagcgcccagaacagcggctgcctgagccgcagcaccagcgccaacatcagccggggcctgcagttcatcctgaccccaaatgagttcagcgcccagaccttctacgccctgagccccaccatgcacagccaggccacccaggtgcccatcagccagagtgatggcagcgctgtggccgccaccaacaccatcgccaaccagatcaacacagcccccaagccagctgcccccaccaccctgcagatccccccacccctgcctgccatcaagcacctgcccaggcctgagaccctgcaccccaacccagctggcctgcaggagagcatcagtgatgtgaccacctgcctggtggccagcaaagaaaatgtgcaggtggcccagagcaacctgaccaaggaccgctccatgaggaagagctttgacatgggcggggagaccctgctgtctgtgtgccccatggtgcccaaggacctgggcaagagcctgtctgtgcagaacctgatccgcagcacagaggagctgaacatccagctgagcggcagcgagagcagcggcagccggggcagccaggacttctaccccaagtggagggagagcaagctgttcatcacagatgaggaggtgggccctgaggagacagaaacagacacctttgatgctgccccccagcctgcccgggaggccgcctttgccagtgacagcctgaggacaggccgcagccgcagcagccagagcatctgcaaggccggggagagcacagatgccctgagcctgccccacgtgaagctgaagtag

SEQ ID NO: 60735 - DNA, 2856 bp, Artificial Sequence
  derived and/or modified sequence
atgccccggcaccacgccggcggcgaggagggcggcgccgccggcctatgggttaaatccggtgcagccgctgcagcggccggtggtggacgccttggctccgggatgaaggacgtggaaagtggacgcggccgcgtcctcctgaatagcgctgccgcgcgtggagacggtctgctgctgctgggcacccgcgccgcaaccttgggtggcgggggaggcggattgcgggagtcgcgcagaggaaagcagggcgctcgcatgagcctgttaggtaagcctctgtcttacacaagtagtcagtcctgcaggcggaacgtcaaatatcgaagggtccagaactacctgtacaatgtactcgagagaccccgggggtgggcatttatctaccacgcttttgtcttcctcctcgtattcggctgtctcattttgagtgtgttcagcactatccccgaacacactaagctggccagctcctgtttgttaatcttagagttcgttatgatagttgtcttcggcctggaatttattatcagaatttggagtgccggatgctgctgtaggtatcgaggctggcagggaagactaaggttcgctagaaaacctttttgcgtcatcgatactattgtgctgatagcttctatagcggtagtcagcgccaagacccagggcaatatttttgccacttccgcccttcgctcactgagattcctacagatcctcagaatggtaaggatggataggagaggcggcacatggaaactgcttggcagcgtggtgtacgctcactccaaggaactgataaccgcgtggtacatcgggttcttagtgcttatattcagctctttcctggtatatctggttgagaaagatgctaacaaagaattttctacctatgctgacgccctgtggtggggtacgatcacacttactactattggctacggtgataaaaccccactgacatggctcggcaggctgctgtcggccgggtttgccctcctcggcatctctttctttgctctgcctgccggcattctcggcagcgggtttgccctgaaagttcaggaacaacaccgccaaaagcactttgaaaagcggagaaatcccgccgccaacctgattcagtgtgtgtggcgctcctatgccgccgatgagaagtcagtgagtattgcaacgtggaagccccatcttaaagccttgcatacgtgctcccctacaaagaaggaacagggggaagcctctagcagtaagttctgtagcaacaagcaaaaactctttcgcatgtatactagcagaaagcaaagccaaaagctcagtttcaaagaaagagttcgaatggcatctcctcggggacagagcattaaatcacgacaggcctcagttggcgatcgccgaagccccagcacagatataacagcggaagggtcacccacaaaagtgcagaagtcttggtcatttaacgatagaacccgattcagaccatcactccggctcaagtcctcgcaacccaagccggttattgatgctgataccgcactggggacggacgacgtttatgatgaaaagggctgccaatgtgatgtgtctgtcgaggatctcactcctcccctcaaaacagtaatccgcgccatacgaattatgaagttccatgtagccaaaagaaagtttaaggaaaccctccgaccatacgatgtcaaggacgtcattgagcagtatagcgcgggacatcttgacatgctgtgcaggattaagtcccttcagacccgggtcgaccagattcttggcaaaggacagattacaagcgacaaaaagtcccgtgagaagatcacggccgagcacgagacaaccgacgatctgtcaatgctcgggcgggtggtgaaagtggaaaagcaggtgcagtctattgagagcaagttggactgcttgttagacatctatcaacaagtgcttagaaaggggagcgcctctgccttagcactggcctccttccagatccctcccttcgagtgcgagcagacctcggattaccagagccctgtcgatagtaaggacttgtccggatctgcacagaacagcggctgtctaagtcggagtaccagcgctaatatctccagggggctccagttcattcttacacctaacgagttttccgcacagaccttctatgctttgagccccaccatgcatagccaagccacccaagttccgatctctcagagtgatggatcggccgtggccgcaacaaatactattgctaatcagataaacactgcccccaagcctgccgcccccacgactctgcagattccaccccccctccctgcgatcaagcacttaccccgtcctgaaacgctccaccccaatcccgccgggctgcaagagagtatcagtgatgtcaccacatgcttggtggcatcaaaggagaatgttcaagttgctcagtccaacctaaccaaagaccgatcaatgcgtaaatcctttgacatggggggggagaccctcctgtccgtgtgtccgatggtccctaaagatctgggcaaatctctctcagtgcagaatttgattaggtccacagaagaactgaatattcaactttctggctcagaatcaagcggtagccgaggcagccaggatttctaccccaaatggcgggaatccaagctgttcatcacagacgaagaagtgggcccagaagagaccgaaaccgacactttcgatgcagctccacaaccagcaagagaggcagcttttgccagcgattcccttcgcacaggccggtcgcggagctcccaaagtatctgcaaagccggcgagagtaccgacgcactgtccttgccccatgtgaaactcaagtag

SEQ ID NO: 60736 - DNA, 2856 bp, Artificial Sequence
  derived and/or modified sequence
atgccccggcaccacgccggcggcgaggagggcggcgccgccggcctgtgggttaaatccggagccgccgccgccgctgcagggggagggcggcttgggagcggcatgaaagacgtggagtcaggtcgcgggcgtgtacttctgaactccgctgccgctcggggtgatgggttgctcttgcttggcactcgtgccgccacactgggaggtggcggaggcggactgagggagagccggcgcggaaagcagggagccaggatgtctctgcttggaaagccactttcttacacaagttcgcagtcatgtcggaggaacgtgaagtataggcgggtgcagaattatttgtacaatgtgttagagcgccccagaggatgggcattcatctaccatgctttcgtgtttctcccagtgttcggatgtctcatcttgtccgtcttcagcacaataccggagcatactaagctggcttcttcctgccttctgatcctggaattcgtcatgatcgtcgtgttcgggctagaatttatcattcggatatggagtgctggatgctgttgtcgctacaggggttggcaaggacgtttgcgtttcgcacggaaacctttttgcgtcattgacacaattgtgttgatcgcctcaattgccgtggtctctgcaaagacccagggcaatatcttcgctacctcagccctcagatccctaaggttccttcagatcctgcgcatggtgcgcatggaccgtaggggaggcacatggaagttgctaggaagcgtcgtttacgcccattcaaaggaactgataactgcatggtacattggcttcctcgtcctgatcttttcatccttcctggtttacctcgtcgagaaagatgccaacaaggagttctctacatacgccgatgccctttggtggggtacgattactctgaccaccatcggatacggggataagacacctctgacctggctgggaagattgcttagtgccgggttcgcactcttagggattagcttctttgccctccctgccggtattctgggatcaggttttgcccttaaagtccaggaacagcatcggcagaagcattttgagaaaagacggaacccagcagccaacctgatccagtgcgtgtggcggagctatgctgccgacgaaaaaagtgtctccatagccacatggaagccgcacctgaaggccctccatacttgttctcccaccaaaaaggaacaaggagaggcctccagttctaagttctgtagtaacaagcagaaactcttcaggatgtacacctcccgaaaacagagtcagaaattaagctttaaggagcgggtccgcatggcctctcctcgaggacagagcataaagtctcgacaggcctcggttggtgatcgcaggtctcccagcactgacattacagccgaggggtcccccaccaaggtccagaaatcatggagctttaatgacagaactcgctttcgcccttccctgaggctgaagtccagtcagcctaaacccgtgatcgatgcagacaccgccttaggcactgacgacgtatacgatgaaaaggggtgccagtgcgatgtatctgtagaggacctgactcctccactcaaaaccgtgatcagggctataaggatcatgaaatttcacgtcgcaaaacgcaaatttaaggaaacactgaggccctacgatgtgaaggacgtgattgagcaatattctgcggggcatttggacatgctgtgccgaataaaaagccttcaaacgcgcgttgaccagatcttaggcaagggccagataactagcgacaagaagtctcgcgagaagatcaccgcagagcacgaaacaaccgatgatcttagtatgcttggccgagttgtgaaggtagagaagcaggtccagtccatcgagtcaaagctggactgcctgctcgacatttaccaacaggttctgaggaagggtagtgcaagcgccttggccctcgcctcttttcaaattcccccttttgagtgcgaacaaacatctgattatcagtctcctgtggactcaaaagacctgtctggaagtgcccagaactccggttgtctatcgagatcaacctcagccaacatcagccgaggactacagtttatcctcactcccaacgaattttccgcccagacattctatgccctgagccccaccatgcactctcaggccacacaggtccctatatctcagtcggacggctctgcagtagccgccaccaataccattgctaatcagataaacaccgccccaaagccggccgcccctaccacgttgcaaatccctcctcctcttcccgcgataaagcatctccctcggcccgagacccttcatcccaaccccgccgggctgcaggaatccatctctgatgtgactacatgtttagtggcgagcaaagaaaacgtgcaggttgctcagtccaatttgacaaaagataggtcgatgcgcaaaagctttgatatgggcggtgagacactgttaagcgtctgtccaatggtcccgaaggatctcgggaagagcctgtcagtgcagaacctgatacgctcaacagaggagctgaatattcagctgagtggcagtgaaagttcaggctcccggggcagccaggacttctacccaaagtggagggagtctaaactgttcataaccgacgaggaagtcggtccagaggagacggagactgacacctttgatgctgcaccacagcctgcacgcgaggcagcctttgcctcagacagcctgagaactggcaggtcccgctcgagccagtctatatgtaaggccggagagtcgaccgatgcactgagcctgccccatgtcaaacttaaatag

SEQ ID NO: 60737 - DNA, 6688 bp, Artificial Sequence
  derived and/or modified sequence
ggctgggtgtgcgcgcgtgggagcgcgcctcggagcgccccgcactcccccactctatccccgggggcagtttgggaaggagggagtggtagtcgcgggaatgagggagcaagagaaaccctctcaaagtgacgccccaaacaggtccggatttagaattcgaagctaaaggctgttagaaattgggactcctcggcctcctctgcagcccctcctttcccgccccgaagcccgggcggtttgctggctgcctgcttccccgcccccggctcagaggtctctggctggcgggcgccccgtcggccgccggcttcctccttgaaacccgccggcgcacatgaggccgctgcccccgccgcaggcgctggcggccccctcgcggtgcccgtggtgatgccatgccccgccaccacgcgggaggagaggagggcggcgccgccgggctctgggtgaagagcggcgcagcggcggcggcggcgggcggggggcgcttgggcagcggcatgaaggatgtggagtccggccggggcagggtgctgctgaactcggcagccgccaggggcgacggcctgctactgctgggcacccgcgcggccacgctcggtggcggcggcggtggcctgagggagagccgccggggcaagcagggggcccggatgagcctgctggggaagccgctctcttacacgagtagccagagctgccggcgcaacgtcaagtaccggcgggtgcagaactacctgtacaacgtgctggagagaccccgcggctgggcgttcatctaccacgctttcgtttttctccttgtctttggttgcttgattttgtcagtgttttctaccatccctgagcacacaaaattggcctcaagttgcctcttgatcctggagttcgtgatgattgtcgtctttggtttggagttcatcattcgaatctggtctgcgggttgctgttgtcgatatagaggatggcaaggaagactgaggtttgctcgaaagcccttctgtgttatagataccattgttcttatcgcttcaatagcagttgtttctgcaaaaactcagggtaatatttttgccacgtctgcactcagaagtctccgtttcctacagatcctccgcatggtgcgcatggaccgaaggggaggcacttggaaattactgggttcagtggtttatgctcacagcaaggaattaatcacagcttggtacataggatttttggttcttattttttcgtctttccttgtctatctggtggaaaaggatgccaataaagagttttctacatatgcagatgctctctggtggggcacaattacattgacaactattggctatggagacaaaactcccctaacttggctgggaagattgctttctgcaggctttgcactccttggcatttctttctttgcacttcctgccggcattcttggctcaggttttgcattaaaagtacaagaacaacaccgccagaaacactttgagaaaagaaggaacccagctgccaacctcattcagtgtgtttggcgtagttacgcagctgatgagaaatctgtttccattgcaacctggaagccacacttgaaggccttgcacacctgcagccctaccaagaaagaacaaggggaagcatcaagcagtaagttctgtagtaataagcagaagctcttcagaatgtacacctcacggaagcagagtcagaagctaagttttaaggagcgagtgcgcatggctagccccaggggccagagtattaagagccgacaagcctcagtaggtgacaggaggtccccaagcaccgacatcacagccgagggcagtcccaccaaagtgcagaagagctggagcttcaacgaccgaacccgcttccggccctcgctgcgcctcaaaagttctcagccaaaaccagtgatagatgctgacacagcccttggcactgatgatgtatatgatgaaaaaggatgccagtgtgatgtatcagtggaagacctcaccccaccacttaaaactgtcattcgagctatcagaattatgaaatttcatgttgcaaaacggaagtttaaggaaacattacgtccatatgatgtaaaagatgtcattgaacaatattctgctggtcatctggacatgttgtgtagaattaaaagccttcaaacacgtgttgatcaaattcttggaaaagggcaaatcacatcagataagaagagccgagagaaaataacagcagaacatgagaccacagacgatctcagtatgctcggtcgggtggtcaaggttgaaaaacaggtacagtccatagaatccaagctggactgcctactagacatctatcaacaggtccttcggaaaggctctgcctcagccctcgctttggcttcattccagatcccaccttttgaatgtgaacagacatctgactatcaaagccctgtggatagcaaagatctttcgggttccgcacaaaacagtggctgcttatccagatcaactagtgccaacatctcgagaggcctgcagttcattctgacgccaaatgagttcagtgcccagactttctacgcgcttagccctactatgcacagtcaagcaacacaggtgccaattagtcaaagcgatggctcagcagtggcagccaccaacaccattgcaaaccaaataaatacggcacccaagccagcagccccaacaactttacagatcccacctcctctcccagccatcaagcatctgcccaggccagaaactctgcaccctaaccctgcaggcttacaggaaagcatttctgacgtcaccacctgccttgttgcctccaaggaaaatgttcaggttgcacagtcaaatctcaccaaggaccgttctatgaggaaaagctttgacatgggaggagaaactctgttgtctgtctgtcccatggtgccgaaggacttgggcaaatctttgtctgtgcaaaacctgatcaggtcgaccgaggaactgaatatacaactttcagggagtgagtcaagtggctccagaggcagccaagatttttaccccaaatggagggaatccaaattgtttataactgatgaagaggtgggtcccgaagagacagagacagacacttttgatgccgcaccgcagcctgccagggaagctgcctttgcatcagactctctaaggactggaaggtcacgatcatctcagagcatttgtaaggcaggagaaagtacagatgccctcagcttgcctcatgtcaaactgaaataagttcttcattttctttccaggcatagcagttctttagccatacatatcattgcatgaactatttcgaaagcccttctaaaaagttgaaattgcaagaatcgggaagaacatgaaaggcagtttataagcccgttaccttttaattgcatgaaaatgcatgtttagggatggctaaaattccaaggtgcatcgacattaacccactcatttagtaatgtaccttgagttaaaaagcctgagaaaccaaacacagctaatgctatggggtgtatgaatatgtcaagtttaggtcatttagaagatttgacactgtattttgaaattatgggagtaaacaccttcaaatttcaggcatttctgctttgtgactaaatacaaactacattttcaagattaggccataatgtatatttaaacacaatggctatcaacagctgctaataaggtatcaactaaagcagaattggggaataatagaaatggctgcttatttcaagatatatttgccaacccattcctattcagtcattttattattaatgtaatttgaatgtcaatttgtgtgcttttggtgatttagcgctgtggcaagcaattttgcacatcattttcatgttgttctttatgacaagaatgttcttcaattagaaaatgtgcaaataatgaaattcagggccagtgaggcaaatagactatctgacatatttgactttatgaaaacatattgcctgatggcagaatcaactttataagtggtcaacttctacacaagcgtatgaaatactggtcagtagaacagccattgtgattggactggtttctctgcaatggcgccaaccccaggcttgccaatactgcctatgtaaagggcaagtgtgagaagctattctcatttcgctgacatacaggtaggactatgggggatgggacatttgagtgggactgagataggaaaggcttgaaaagaacccagaaacaccaccaggaagttggcaaagtaaaagaaaatgacttccccctcaaagggcaatgagagggagagaaacaaaccaaaatagaagaactagactttttagaaaatgagtattgctagggaattcaactacctaatcttcccttattcttatatataagcagagaatttttgcaaggtatttattttttaatatgccctgaatgtcttttgctattatgtgtacattttgcatatgaaagtctaaaacgaaacttcctttactttttatactgtagtgaaaattttctattcttcccaagaatgttgtcccaaatctgaaattactggttcaatttcctgatataaacatttacaattagaagctagatagtactggcagagtctgcaaatcagaacacttaaatatatcatggcagcaaaaagaccaagggaaacaaaatgacaaatgtatttatcagaaagcaagcaatgctgactgcttgttagaaacccatctagctatcttaggtcaccagaacttcagccaacgtaatgacattcaaaaaaaaaggacataagagatagcatttcaattcaattaaaccctagccacaggaggactcaagaaaggaagttgtttccttggcagacataaatgctgcctccagaagtacttctccagcagccaagcagaatgagcagggttatcaagtggatgttcaaaggaagaaggaggccctgaactccaccaatcctccccagccctccccaacaggctttctccatcattgactctcccctgcttttcttcttcattaactccttattcattccctgccagtattttgcttctgaacttcaccaggccttaaccagcctccatccccaggtcaaccagttctccgctttacctaaaatgtgcttctcaaccttttagaaccttgtcccttttgataaacatggaaatttttaaagcttcctcttcgcatcccacttggattctaagacaattagaatcatttagaatctttttggctgctggaaatgtatagaagatagaggctaaattttacacttcagttaagacattgtcaatccttttaagcaattgttttcattttcaaaatacagaatgttagtaaattatgaaaatcaatttttcatcttcattcaacctgaagttgtgattcccccttgcaagaatgttgcatacacacacacacacacacacacacacacacacacacacacacacacacacacacacacacacccctccactgacctaaagccagacacctgccgtgactgggcaggctctctcccattattaacagaggaagaggagggaggcagcaactttcaggtagcactgattcttggacatactctgtcctgggtcaaaccccactggcagcaggaattctgaatgtattggggacccctccttaggcctcgttaagtctcaaacacagtacagctcacccagcattgctgacgactgaagattcagaaacaaaacctacacacagcactgaggtcttaatcatagcaaaatgtgataaaccatgttgtgaaaaacttttatacattgaagccatgaccattttgtgtctatcttactctagcacaaaaattgggggatgttaaaagatagttgtgtggaagctataaggttctgtctgtcgtgttactctctgtggaaatgagaggggtctcccatttacactaagcaaatttccattggtcaattttaatgatgtcttgaagcacaatttagctgagcactgagtagccatatgctttctgagtacaagtgtgtctgccttcttcaacatgtagggttgatcaagctaatacttaattgcaaatatcccttgtatgaggttaactaaaaaaattttgctatgtctgatctacatgtttgcattttgttcaactaaattaatatttgtagattgcaagttttgtttaaaataactttattgagtttttaagtcctgatctgttctaaggtgcctttctcacctcccattgattcagtgattctgaagttcttaatttgcaagtaaaataagtctactagagaggaggaaatcaggcacaaattgaccaattctcatgccatttgcaaagcaaaactgtaaggatgatgaaacctggctaactaaattaatggatcatttcactaaatcagatagaggaaatatcataaatattaacttgtctccctagaagctgagatttttcgccttaaatgacatggttgtgtttttgtaagagaaacttaatctaatctaataatgtgcatttaagtaagcagttctaagtcatgtatgacaatgcaattgtctgtttcctgaaaacaaataaatcgggaacaccatatccatttcaagctatcattaaagtgtaatttcctttgctctcttttactgggattatttgttttaaagtaaaacattaaaaagatgtctat

SEQ ID NO: 60738 - DNA, 6623 bp, Artificial Sequence
  derived and/or modified sequence
actctatccccgggggcagtttgggaaggagggagtggtagtcgcgggaatgagggagcaagagaaaccctctcaaagtgacgccccaaacaggtccggatttagaattcgaagctaaaggctgttagaaattgggactcctcggcctcctctgcagcccctcctttcccgccccgaagcccgggcggtttgctggctgcctgcttccccgcccccggctcagaggtctctggctggcgggcgccccgtcggccgccggcttcctccttgaaacccgccggcgcacatgaggccgctgcccccgccgcaggcgctggcggccccctcgcggtgcccgtggtgatgccatgccccgccaccacgcgggaggagaggagggcggcgccgccgggctctgggtgaagagcggcgcagcggcggcggcggcgggcggggggcgcttgggcagcggcatgaaggatgtggagtccggccggggcagggtgctgctgaactcggcagccgccaggggcgacggcctgctactgctgggcacccgcgcggccacgctcggtggcggcggcggtggcctgagggagagccgccggggcaagcagggggcccggatgagcctgctggggaagccgctctcttacacgagtagccagagctgccggcgcaacgtcaagtaccggcgggtgcagaactacctgtacaacgtgctggagagaccccgcggctgggcgttcatctaccacgctttcgtttttctccctgtctttggttgcttgattttgtcagtgttttctaccatccctgagcacacaaaattggcctcaagttgcctcttgatcctggagttcgtgatgattgtcgtctttggtttggagttcatcattcgaatctggtctgcgggttgctgttgtcgatatagaggatggcaaggaagactgaggtttgctcgaaagcccttctgtgttatagataccattgttcttatcgcttcaatagcagttgtttctgcaaaaactcagggtaatatttttgccacgtctgcactcagaagtctccgtttcctacagatcctccgcatggtgcgcatggaccgaaggggaggcacttggaaattactgggttcagtggtttatgctcacagcaaggaattaatcacagcttggtacataggatttttggttcttattttttcgtctttccttgtctatctggtggaaaaggatgccaataaagagttttctacatatgcagatgctctctggtggggcacaattacattgacaactattggctatggagacaaaactcccctaacttggctgggaagattgctttctgcaggctttgcactccttggcatttctttctttgcacttcctgccggcattcttggctcaggttttgcattaaaagtacaagaacaacaccgccagaaacactttgagaaaagaaggaacccagctgccaacctcattcagtgtgtttggcgtagttacgcagctgatgagaaatctgtttccattgcaacctggaagccacacttgaaggccttgcacacctgcagccctaccaagaaagaacaaggggaagcatcaagcagtaagttctgtagtaataagcagaagctcttcagaatgtacacctcacggaagcagagtcagaagctaagttttaaggagcgagtgcgcatggctagccccaggggccagagtattaagagccgacaagcctcagtaggtgacaggaggtccccaagcaccgacatcacagccgagggcagtcccaccaaagtgcagaagagctggagcttcaacgaccgaacccgcttccggccctcgctgcgcctcaaaagttctcagccaaaaccagtgatagatgctgacacagcccttggcactgatgatgtatatgatgaaaaaggatgccagtgtgatgtatcagtggaagacctcaccccaccacttaaaactgtcattcgagctatcagaattatgaaatttcatgttgcaaaacggaagtttaaggaaacattacgtccatatgatgtaaaagatgtcattgaacaatattctgctggtcatctggacatgttgtgtagaattaaaagccttcaaacacgtgttgatcaaattcttggaaaagggcaaatcacatcagataagaagagccgagagaaaataacagcagaacatgagaccacagacgatctcagtatgctcggtcgggtggtcaaggttgaaaaacaggtacagtccatagaatccaagctggactgcctactagacatctatcaacaggtccttcggaaaggctctgcctcagccctcgctttggcttcattccagatcccaccttttgaatgtgaacagacatctgactatcaaagccctgtggatagcaaagatctttcgggttccgcacaaaacagtggctgcttatccagatcaactagtgccaacatctcgagaggcctgcagttcattctgacgccaaatgagttcagtgcccagactttctacgcgcttagccctactatgcacagtcaagcaacacaggtgccaattagtcaaagcgatggctcagcagtggcagccaccaacaccattgcaaaccaaataaatacggcacccaagccagcagccccaacaactttacagatcccacctcctctcccagccatcaagcatctgcccaggccagaaactctgcaccctaaccctgcaggcttacaggaaagcatttctgacgtcaccacctgccttgttgcctccaaggaaaatgttcaggttgcacagtcaaatctcaccaaggaccgttctatgaggaaaagctttgacatgggaggagaaactctgttgtctgtctgtcccatggtgccgaaggacttgggcaaatctttgtctgtgcaaaacctgatcaggtcgaccgaggaactgaatatacaactttcagggagtgagtcaagtggctccagaggcagccaagatttttaccccaaatggagggaatccaaattgtttataactgatgaagaggtgggtcccgaagagacagagacagacacttttgatgccgcaccgcagcctgccagggaagctgcctttgcatcagactctctaaggactggaaggtcacgatcatctcagagcatttgtaaggcaggagaaagtacagatgccctcagcttgcctcatgtcaaactgaaataagttcttcattttctttccaggcatagcagttctttagccatacatatcattgcatgaactatttcgaaagcccttctaaaaagttgaaattgcaagaatcgggaagaacatgaaaggcagtttataagcccgttaccttttaattgcatgaaaatgcatgtttagggatggctaaaattccaaggtgcatcgacattaacccactcatttagtaatgtaccttgagttaaaaagcctgagaaaccaaacacagctaatgctatggggtgtatgaatatgtcaagtttaggtcatttagaagatttgacactgtattttgaaattatgggagtaaacaccttcaaatttcaggcatttctgctttgtgactaaatacaaactacattttcaagattaggccataatgtatatttaaacacaatggctatcaacagctgctaataaggtatcaactaaagcagaattggggaataatagaaatggctgcttatttcaagatatatttgccaacccattcctattcagtcattttattattaatgtaatttgaatgtcaatttgtgtgcttttggtgatttagcgctgtggcaagcaattttgcacatcattttcatgttgttctttatgacaagaatgttcttcaattagaaaatgtgcaaataatgaaattcagggccagtgaggcaaatagactatctgacatatttgactttatgaaaacatattgcctgatggcagaatcaactttataagtggtcaacttctacacaagcgtatgaaatactggtcagtagaacagccattgtgattggactggtttctctgcaatggcgccaaccccaggcttgccaatactgcctatgtaaagggcaagtgtgagaagctattctcatttcgctgacatacaggtaggactatgggggatgggacatttgagtgggactgagataggaaaggcttgaaaagaacccagaaacaccaccaggaagttggcaaagtaaaagaaaatgacttccccctcaaagggcaatgagagggagagaaacaaaccaaaatagaagaactagactttttagaaaatgagtattgctagggaattcaactacctaatcttcccttattcttatatataagcagagaatttttgcaaggtatttattttttaatatgccctgaatgtcttttgctattatgtgtacattttgcatatgaaagtctaaaacgaaacttcctttactttttatactgtagtgaaaattttctattcttcccaagaatgttgtcccaaatctgaaattactggttcaatttcctgatataaacatttacaattagaagctagatagtactggcagagtctgcaaatcagaacacttaaatatatcatggcagcaaaaagaccaagggaaacaaaatgacaaatgtatttatcagaaagcaagcaatgctgactgcttgttagaaacccatctagctatcttaggtcaccagaacttcagccaacgtaatgacattcaaaaaaaaaggacataagagatagcatttcaattcaattaaaccctagccacaggaggactcaagaaaggaagttgtttccttggcagacataaatgctgcctccagaagtacttctccagcagccaagcagaatgagcagggttatcaagtggatgttcaaaggaagaaggaggccctgaactccaccaatcctccccagccctccccaacaggctttctccatcattgactctcccctgcttttcttcttcattaactccttattcattccctgccagtattttgcttctgaacttcaccaggccttaaccagcctccatccccaggtcaaccagttctccgctttacctaaaatgtgcttctcaaccttttagaaccttgtcccttttgataaacatggaaatttttaaagcttcctcttcgcatcccacttggattctaagacaattagaatcatttagaatctttttggctgctggaaatgtatagaagatagaggctaaattttacacttcagttaagacattgtcaatccttttaagcaattgttttcattttcaaaatacagaatgttagtaaattatgaaaatcaatttttcatcttcattcaacctgaagttgtgattcccccttgcaagaatgttgcatacacacacacacacacacacacacacacacacacacacacacacacacacacacacacacacccctccactgacctaaagccagacacctgccgtgactgggcaggctctctcccattattaacagaggaagaggagggaggcagcaactttcaggtagcactgattcttggacatactctgtcctgggtcaaaccccactggcagcaggaattctgaatgtattggggacccctccttaggcctcgttaagtctcaaacacagtacagctcacccagcattgctgacgactgaagattcagaaacaaaacctacacacagcactgaggtcttaatcatagcaaaatgtgataaaccatgttgtgaaaaacttttatacattgaagccatgaccattttgtgtctatcttactctagcacaaaaattgggggatgttaaaagatagttgtgtggaagctataaggttctgtctgtcgtgttactctctgtggaaatgagaggggtctcccatttacactaagcaaatttccattggtcaattttaatgatgtcttgaagcacaatttagctgagcactgagtagccatatgctttctgagtacaagtgtgtctgccttcttcaacatgtagggttgatcaagctaatacttaattgcaaatatcccttgtatgaggttaactaaaaaaattttgctatgtctgatctacatgtttgcattttgttcaactaaattaatatttgtagattgcaagttttgtttaaaataactttattgagtttttaagtcctgatctgttctaaggtgcctttctcacctcccattgattcagtgattctgaagttcttaatttgcaagtaaaataagtctactagagaggaggaaatcaggcacaaattgaccaattctcatgccatttgcaaagcaaaactgtaaggatgatgaaacctggctaactaaattaatggatcatttcactaaatcagatagaggaaatatcataaatattaacttgtctccctagaagctgagatttttcgccttaaatgacatggttgtgtttttgtaagagaaacttaatctaatctaataatgtgcatttaagtaagcagttctaagtcatgtatgacaatgcaattgtctgtttcctgaaaacaaataaatcgggaacaccatatccatttcaagctatcattaaagtgtaatttcctttgctctcttttactgggattatttgttttaaagtaaaacatt

SEQ ID NO: 60739 - DNA, 2856 bp, Artificial Sequence
  derived and/or modified sequence
atgcccagacaccatgccggtggtgaggaggggggagctgctgggctgtgggtgaagagcggcgctgcggctgcagctgcaggaggaggacgcctgggctccgggatgaaagatgtcgagagtgggaggggcagagtcctgctgaactccgccgctgctaggggtgacggtcttctgctactcggaacgcgggcagccactttgggcggtggcggtggtggacttcgggaatcacgacgcggtaagcaaggagctcggatgagcctgctgggaaaaccactctcctacacatcctctcagtcctgtagaagaaatgtgaaataccgccgtgtccagaactatttatacaatgtcctggaacgccctagaggctgggcgttcatctaccatgcttttgtgtttcttctcgtgtttggttgcttaatcctgtccgtgttctctactattcctgagcataccaaactggcgtcttcctgcctgctcatcctcgaattcgtcatgatcgtcgtgttcgggctcgagttcataatccggatttggtcagctggatgctgttgccgatatagggggtggcaaggaaggttaaggtttgctagaaaaccattctgcgtcattgacacaatcgttctcatcgcatctatcgcagtcgtgagcgctaaaacacaaggaaacatctttgctacttctgcactgcggagccttagatttctccagatactgaggatggtaagaatggatcgaagggggggaacctggaagctgctgggcagtgtggtatacgctcattccaaggagctgattacagcttggtatattggattcctcgtcctgatattctcatcctttttggtgtacctcgtagagaaggacgccaataaagagtttagcacctacgcagacgcgctttggtggggcactatcactctcacaactataggatacggcgacaagacccccctcacatggctcggcaggctgctctctgccggtttcgccctcctagggataagcttcttcgccctccccgcaggcatactcgggtctgggtttgccctcaaagtccaggaacagcaccgccagaagcatttcgaaaagcggaggaatcctgccgctaatttgatccagtgcgtgtggcggtcttacgcggctgacgagaaatcagtgtctattgccacttggaaaccacatttgaaggcactgcatacgtgttcaccaaccaagaaagagcagggagaggcctcttcgtctaagttttgctccaataagcaaaaattattccgtatgtacacctccagaaagcagtcacagaaactgtcctttaaagaaagagtacggatggcttcacctcgtggccagagtataaaatctcgacaggctagcgtgggagataggagatcacctagcacggacataaccgcagaaggatctcctacaaaagtgcagaagtcctggtcctttaatgatagaactagattcaggccctcactgcggctgaagtcatctcagcctaaacccgttattgatgccgacaccgctcttggcacggacgatgtctacgacgaaaagggctgccaatgtgatgtgagtgttgaggacctaacccctccacttaaaaccgtgatcagggctatccgtattatgaaatttcatgtagcaaagagaaaatttaaggaaacactgcgcccatatgatgtgaaggatgtaatcgagcaatatagcgccggtcacctcgacatgctgtgtcggattaaatcactgcagacccgcgtggatcagattttgggcaagggacagattacatccgataaaaagagccgagagaaaatcaccgccgagcatgaaacaacagatgatttaagcatgctggggcgtgtggtgaaagtggaaaagcaagtgcagagcatcgagagcaagctggactgtctcctggatatataccagcaggttctgcgcaaggggtctgcttcagcccttgccctggcaagcttccagattccacctttcgagtgcgaacagacttctgactaccagtcccccgtggattcgaaagatctgtcaggatctgcccagaactcgggctgcctgtcaaggtctacatccgcaaacatttctcggggactgcagtttatcctgaccccgaatgaattcagtgcccagacattttatgccctgagccctacaatgcactcccaggctacccaggtgccgattagtcagtccgacggctcagcagtcgctgcaaccaatacgattgccaaccaaatcaatactgctccaaaacccgcagctcccaccacgttacagatacccccaccactgccagcgattaagcacctgccacgacctgagacactccaccccaaccccgcaggcttgcaggagtcaatcagtgatgtcaccacctgtctcgtcgccagtaaagaaaacgtacaggtcgcgcagtctaatctgaccaaagaccgatcaatgcggaagtcattcgatatgggcggagaaaccttgctgtctgtgtgcccaatggttccgaaggacctaggaaaaagtctgtccgtgcagaacttgatacggtcaacggaagagctgaatatccaactgagtggcagcgagtccagcggctcaaggggcagccaggatttttatccaaagtggcgagaatccaagctatttattaccgacgaggaagtaggaccagaagagaccgagactgacactttcgatgctgcccctcagcccgcaagggaagccgcattcgcttccgattctttgaggaccggcaggtcacggagctcccagtcgatttgtaaggcaggagagagcaccgatgctctgtccctcccccacgttaagctcaagtag

SEQ ID NO: 60740 - DNA, 2856 bp, Artificial Sequence
  derived and/or modified sequence
atgcctagacaccacgccggaggcgaagaaggtggggctgccggattatgggtgaagagcggcgctgccgctgccgctgcgggtggtggcaggctggggtcagggatgaaggacgtggagtcaggcaggggcagggtccttttgaacagcgccgcagcgagaggcgatgggctgctcctgctgggtactcgcgctgctaccctcggaggcggaggcggaggtctcagagagtcaaggcggggaaagcagggtgcacgcatgtcactgttgggcaaacccttgtcatacacaagttcccaaagctgccgaaggaacgtgaagtaccgaagagttcaaaattacctgtacaatgtgctggagcgacccagaggctgggcattcatctatcacgccttcgtgttcttacctgtgtttggatgcctgatcctttcggtattttctaccataccagaacatacgaagctcgcaagctcatgtctgctgattctggagtttgttatgattgttgtctttggactagaattcatcatacgaatctggtccgccggatgctgttgccgctacagaggatggcaaggccgactgcggtttgccaggaaacctttctgcgtgatagacaccattgttctgattgcatccatcgcagtggtaagcgccaagacccaggggaatatattcgccacatctgcacttcggtccttgaggttcctgcaaattttgcggatggtgagaatggatcgtagggggggaacctggaaactgctgggcagtgtggtgtacgcccacagcaaggaactcatcacggcctggtatattggatttctggtgctgatcttctcttccttcctagtctatctggttgaaaaggatgccaacaaggagttttctacctatgccgacgccttgtggtgggggaccattaccctaacaactatcgggtatggagacaaaactcccctcacctggctgggccgtcttttgtccgctgggtttgccctgcttgggatatccttttttgcattgcctgcaggtatactcggatccggctttgctctgaaggttcaagaacagcatcggcagaaacatttcgaaaaaagacgaaatccagctgccaacctgattcagtgcgtgtggcgatcctatgccgcagacgaaaagagtgtgtctatcgctacatggaagccgcatctaaaggcgttgcatacatgttcacccacaaaaaaagagcagggtgaagcctcaagctcaaaattctgttcaaacaagcagaaattgtttagaatgtatacgtcaaggaagcaatcgcaaaaactgtccttcaaggagcgtgtacggatggctagcccccgaggtcagtcaatcaaatcacgccaggcatcagtcggtgatcgaaggagcccctccacggatattactgccgagggctcaccgacaaaagtgcagaagtcctggtcatttaatgatagaactcgtttccgcccatctctaaggctgaaatccagtcagcccaagccggttattgacgcagacaccgcactgggcaccgatgacgtttacgatgaaaaaggttgtcagtgcgatgtcagcgtggaggatttgacccccccactgaagacagtgattagagctatacgcattatgaagtttcacgtggcgaaacggaaattcaaggaaaccctgagaccgtacgatgtcaaagatgtgatagagcaatatagcgccggacacttggacatgctctgtaggataaaatcactgcaaacgagagttgaccagatcctggggaagggccagatcacctctgacaaaaagtcccgcgaaaagatcacggcggagcacgaaactacagatgacctgtccatgctgggtagggttgtaaaggtagagaaacaggtacagtcaattgaatctaaactggactgccttctagatatttatcagcaggttctcaggaaggggtccgcaagcgcacttgcactggcatcattccagatccctccctttgaatgcgaacaaacgagcgattaccaaagtcccgtggattctaaggacctctccgggagcgcacagaattcaggctgtctttccagatctacctctgctaatataagccggggtctgcaatttattctaacccccaacgaattcagcgcacagactttctatgctctctctcccaccatgcattcccaggccactcaggtacctatttcgcagtctgatggctccgccgtcgctgcgacaaacaccatagccaaccagatcaatacagcgccaaagcccgctgcgccaactacgctccaaattccaccccctttgccagccattaaacatttgcctagacccgaaacactccaccctaatccggcaggcctccaagaatctattagcgacgtgaccacatgccttgttgcaagtaaggaaaacgttcaggttgcccagtccaatctgacaaaggacaggagcatgcgtaagtcatttgatatgggaggcgagacactgctctcagtgtgcccgatggtccccaaggacctgggtaagtccttgagtgtgcagaacctgatccgctccacagaagaactgaacatacagttgtcaggaagtgaatcctcaggttcaagagggagccaagacttctacccaaaatggagggaatctaagctctttattacagacgaggaagtcggtcccgaagaaactgagacagatacctttgacgccgctccacaaccagccagggaagctgctttcgcgagcgatagcctcaggacggggaggagcagaagctctcagagcatttgtaaggcaggtgaaagcaccgatgccttgtcactcccacacgtgaagcttaagtag

SEQ ID NO: 60741 - DNA, 2856 bp, Artificial Sequence
  derived and/or modified sequence
atgcccagacaccacgccggcggcgaggagggcggcgccgccggcctgtgggtgaagagcggcgccgccgccgccgccgccggcggcggcagactgggcagcggcatgaaggacgtggagagcggcagaggcagagtgctgctgaacagcgccgccgccagaggcgacggcctgctgctgctgggcaccagagccgccaccctgggcggcggcggcggcggcctgagagagagcagaagaggcaagcagggcgccagaatgagcctgctgggcaagcccctgagctacaccagcagccagagctgcagaagaaacgtgaagtacagaagagtgcagaactacctgtacaacgtgctggagagacccagaggctgggccttcatctaccacgccttcgtgttcctgctggtgttcggctgcctgatcctgagcgtgttcagcaccatccccgagcacaccaagctggccagcagctgcctgctgatcctggagttcgtgatgatcgtggtgttcggcctggagttcatcatcagaatctggagcgccggctgctgctgcagatacagaggctggcagggcagactgagattcgccagaaagcccttctgcgtgatcgacaccatcgtgctgatcgccagcatcgccgtggtgagcgccaagacccagggcaacatcttcgccaccagcgccctgagaagcctgagattcctgcagatcctgagaatggtgagaatggacagaagaggcggcacctggaagctgctgggcagcgtggtgtacgcccacagcaaggagctgatcaccgcctggtacatcggcttcctggtgctgatcttcagcagcttcctggtgtacctggtggagaaggacgccaacaaggagttcagcacctacgccgacgccctgtggtggggcaccatcaccctgaccaccatcggctacggcgacaagacccccctgacctggctgggcagactgctgagcgccggcttcgccctgctgggcatcagcttcttcgccctgcccgccggcatcctgggcagcggcttcgccctgaaggtgcaggagcagcacagacagaagcacttcgagaagagaagaaaccccgccgccaacctgatccagtgcgtgtggagaagctacgccgccgacgagaagagcgtgagcatcgccacctggaagccccacctgaaggccctgcacacctgcagccccaccaagaaggagcagggcgaggccagcagcagcaagttctgcagcaacaagcagaagctgttcagaatgtacaccagcagaaagcagagccagaagctgagcttcaaggagagagtgagaatggccagccccagaggccagagcatcaagagcagacaggccagcgtgggcgacagaagaagccccagcaccgacatcaccgccgagggcagccccaccaaggtgcagaagagctggagcttcaacgacagaaccagattcagacccagcctgagactgaagagcagccagcccaagcccgtgatcgacgccgacaccgccctgggcaccgacgacgtgtacgacgagaagggctgccagtgcgacgtgagcgtggaggacctgaccccccccctgaagaccgtgatcagagccatcagaatcatgaagttccacgtggccaagagaaagttcaaggagaccctgagaccctacgacgtgaaggacgtgatcgagcagtacagcgccggccacctggacatgctgtgcagaatcaagagcctgcagaccagagtggaccagatcctgggcaagggccagatcaccagcgacaagaagagcagagagaagatcaccgccgagcacgagaccaccgacgacctgagcatgctgggcagagtggtgaaggtggagaagcaggtgcagagcatcgagagcaagctggactgcctgctggacatctaccagcaggtgctgagaaagggcagcgccagcgccctggccctggccagcttccagatcccccccttcgagtgcgagcagaccagcgactaccagagccccgtggacagcaaggacctgagcggcagcgcccagaacagcggctgcctgagcagaagcaccagcgccaacatcagcagaggcctgcagttcatcctgacccccaacgagttcagcgcccagaccttctacgccctgagccccaccatgcacagccaggccacccaggtgcccatcagccagagcgacggcagcgccgtggccgccaccaacaccatcgccaaccagatcaacaccgcccccaagcccgccgcccccaccaccctgcagatccccccccccctgcccgccatcaagcacctgcccagacccgagaccctgcaccccaaccccgccggcctgcaggagagcatcagcgacgtgaccacctgcctggtggccagcaaggagaacgtgcaggtggcccagagcaacctgaccaaggacagaagcatgagaaagagcttcgacatgggcggcgagaccctgctgagcgtgtgccccatggtgcccaaggacctgggcaagagcctgagcgtgcagaacctgatcagaagcaccgaggagctgaacatccagctgagcggcagcgagagcagcggcagcagaggcagccaggacttctaccccaagtggagagagagcaagctgttcatcaccgacgaggaggtgggccccgaggagaccgagaccgacaccttcgacgccgccccccagcccgccagagaggccgccttcgccagcgacagcctgagaaccggcagaagcagaagcagccagagcatctgcaaggccggcgagagcaccgacgccctgagcctgccccacgtgaagctgaagtag

SEQ ID NO: 60742 - DNA, 2856 bp, Artificial Sequence
  derived and/or modified sequence
atgcccagacaccacgccggcggcgaggagggcggcgccgccggcctgtgggtgaagagcggcgccgccgccgccgccgccggcggcggcagactgggcagcggcatgaaggacgtggagagcggcagaggcagagtgctgctgaacagcgccgccgccagaggcgacggcctgctgctgctgggcaccagagccgccaccctgggcggcggcggcggcggcctgagagagagcagaagaggcaagcagggcgccagaatgagcctgctgggcaagcccctgagctacaccagcagccagagctgcagaagaaacgtgaagtacagaagagtgcagaactacctgtacaacgtgctggagagacccagaggctgggccttcatctaccacgccttcgtgttcctgcccgtgttcggctgcctgatcctgagcgtgttcagcaccatccccgagcacaccaagctggccagcagctgcctgctgatcctggagttcgtgatgatcgtggtgttcggcctggagttcatcatcagaatctggagcgccggctgctgctgcagatacagaggctggcagggcagactgagattcgccagaaagcccttctgcgtgatcgacaccatcgtgctgatcgccagcatcgccgtggtgagcgccaagacccagggcaacatcttcgccaccagcgccctgagaagcctgagattcctgcagatcctgagaatggtgagaatggacagaagaggcggcacctggaagctgctgggcagcgtggtgtacgcccacagcaaggagctgatcaccgcctggtacatcggcttcctggtgctgatcttcagcagcttcctggtgtacctggtggagaaggacgccaacaaggagttcagcacctacgccgacgccctgtggtggggcaccatcaccctgaccaccatcggctacggcgacaagacccccctgacctggctgggcagactgctgagcgccggcttcgccctgctgggcatcagcttcttcgccctgcccgccggcatcctgggcagcggcttcgccctgaaggtgcaggagcagcacagacagaagcacttcgagaagagaagaaaccccgccgccaacctgatccagtgcgtgtggagaagctacgccgccgacgagaagagcgtgagcatcgccacctggaagccccacctgaaggccctgcacacctgcagccccaccaagaaggagcagggcgaggccagcagcagcaagttctgcagcaacaagcagaagctgttcagaatgtacaccagcagaaagcagagccagaagctgagcttcaaggagagagtgagaatggccagccccagaggccagagcatcaagagcagacaggccagcgtgggcgacagaagaagccccagcaccgacatcaccgccgagggcagccccaccaaggtgcagaagagctggagcttcaacgacagaaccagattcagacccagcctgagactgaagagcagccagcccaagcccgtgatcgacgccgacaccgccctgggcaccgacgacgtgtacgacgagaagggctgccagtgcgacgtgagcgtggaggacctgaccccccccctgaagaccgtgatcagagccatcagaatcatgaagttccacgtggccaagagaaagttcaaggagaccctgagaccctacgacgtgaaggacgtgatcgagcagtacagcgccggccacctggacatgctgtgcagaatcaagagcctgcagaccagagtggaccagatcctgggcaagggccagatcaccagcgacaagaagagcagagagaagatcaccgccgagcacgagaccaccgacgacctgagcatgctgggcagagtggtgaaggtggagaagcaggtgcagagcatcgagagcaagctggactgcctgctggacatctaccagcaggtgctgagaaagggcagcgccagcgccctggccctggccagcttccagatcccccccttcgagtgcgagcagaccagcgactaccagagccccgtggacagcaaggacctgagcggcagcgcccagaacagcggctgcctgagcagaagcaccagcgccaacatcagcagaggcctgcagttcatcctgacccccaacgagttcagcgcccagaccttctacgccctgagccccaccatgcacagccaggccacccaggtgcccatcagccagagcgacggcagcgccgtggccgccaccaacaccatcgccaaccagatcaacaccgcccccaagcccgccgcccccaccaccctgcagatccccccccccctgcccgccatcaagcacctgcccagacccgagaccctgcaccccaaccccgccggcctgcaggagagcatcagcgacgtgaccacctgcctggtggccagcaaggagaacgtgcaggtggcccagagcaacctgaccaaggacagaagcatgagaaagagcttcgacatgggcggcgagaccctgctgagcgtgtgccccatggtgcccaaggacctgggcaagagcctgagcgtgcagaacctgatcagaagcaccgaggagctgaacatccagctgagcggcagcgagagcagcggcagcagaggcagccaggacttctaccccaagtggagagagagcaagctgttcatcaccgacgaggaggtgggccccgaggagaccgagaccgacaccttcgacgccgccccccagcccgccagagaggccgccttcgccagcgacagcctgagaaccggcagaagcagaagcagccagagcatctgcaaggccggcgagagcaccgacgccctgagcctgccccacgtgaagctgaagtag

SEQ ID NO: 60743 - protein, 822 aa, Artificial Sequence
  derived and/or modified sequence
MPRHHAGGEEGGAAGLWVKSGAAAAAAGGGRLGSGMKDVESGRGRVLLNSAAARGDGLLLLGTRAATLGGGGGGLRESRRGKQGARMSLLGKPLSYTSSQSCRRNVKYRRVQNYLYNVLERPRGWAFIYHAFVFLLVFGCLILSVFSTIPEHTKLASSCLLILEFVMIVVFGLEFIIRIWSAGCCCRYRGWQGRLRFARKPFCVIDTIVLIASIAVVSAKTQGNIFATSALRSLRFLQILRMVRMDRRGGTWKLLGSVVYAHSKELITAWYIGFLVLIFSSFLVYLVEKDANKEFSTYADALWWGTITLTTIGYGDKTPLTWLGRLLSAGFALLGISFFALPAGILGSGFALKVQEQHRQKHFEKRRNPAANLIQCVWRSYAADEKSVSIATWKPHLKALHTCSPTKKEQGEASSRIMKFHVAKRKFKETLRPYDVKDVIEQYSAGHLDMLCRIKSLQTRVDQILGKGQITSDKKSREKITAEHETTDDLSMLGRVVKVEKQVQSIESKLDCLLDIYQQVLRKGSASALALASFQIPPFECEQTSDYQSPVDSKDLSGSAQNSGCLSRSTSANISRGLQFILTPNEFSAQTFYALSPTMHSQATQVPISQSDGSAVAATNTIANQINTAPKPAAPTTLQIPPPLPAIKHLPRPETLHPNPAGLQESISDVTTCLVASKENVQVAQSNLTKDRSMRKSFDMGGETLLSVCPMVPKDLGKSLSVQNLIRSTEELNIQLSGSESSGSRGSQDFYPKWRESKLFITDEEVGPEETETDTFDAAPQPAREAAFASDSLRTGRSRSSQSICKAGESTDALSLPHVKLK

SEQ ID NO: 60744 - DNA, 1284 bp, Artificial Sequence
  derived and/or modified sequence
atgccacggcatcatgcggggggcgaggaaggaggcgctgccggcctgtgggtaaagagcggtgcggccgccgcggctgcggggggcggccgtcttggctcagggatgaaagatgtcgaatctggtagggggcgggtcctgttgaactccgctgcagctaggggagatggactactattactcgggactcgtgctgcaacactgggggggggcggtggcggactccgagagagtagaagaggcaaacagggcgcaaggatgtcacttctgggtaagccactgtcatatacctctagtcagtcctgcaggcggaacgtcaaataccgccgggtgcagaactatctctataacgtccttgaaagaccaagaggctgggcatttatttaccacgccttcgtcttcttgctagtgttcgggtgtctgatcctgtcggtgttcagcaccatacccgagcacacaaagctggcgtcatcttgcctgcttattttggaattcgtgatgatcgtcgtctttgggttagaatttatcatcagaatctggtctgctggctgttgctgccggtaccggggctggcagggcaggcttcggtttgccaggaaaccattctgcgttatcgatacaattgtactgatcgcaagcatagccgtagtgagcgccaagacacaggggaatatattcgctactagcgcgctgcgatctctgaggttcctgcagatcctcaggatggtgcgcatggaccgaaggggcggcacctggaaactcctggggagcgtggtgtacgcacacagtaaggagctgattactgcttggtacatcggatttctggtgcttattttttcctcattcctggtctatctggtagagaaagatgcaaataaagaattctccacttatgccgacgcactctggtggggtactattaccctcactaccatcggatacggggacaaaactcccctcacctggctcggacgcctgctttccgcaggcttcgccttgctcggtatcagcttttttgctctccccgccggtatcctgggctccgggttcgccctcaaggtacaggagcagcaccgtcagaaacattttgagaaacgcagaaaccccgctgccaatctgatccagtgtgtttggaggtcgtatgcggctgacgagaagtcagtctcaattgctacttggaaacctcatttgaaggccctccatacatgcagtccaacgaagaaagagcagggggaggcatctagccgtttcgtaatctctttactgctgcacgtttgtctatag

SEQ ID NO: 60745 - DNA, 2469 bp, Artificial Sequence
  derived and/or modified sequence
atgcctaggcatcacgccggtggcgaagaaggtggcgccgccgggctgtgggtcaagagcggcgccgctgccgccgctgccgggggaggccgtcttgggtctggtatgaaggatgtggagtcaggacgcggtagggtgcttctcaatagcgcggctgcaaggggggatgggctgttgctgctggggaccagggctgctactctcggcggaggcggcggaggactgcgtgaatcaagacgtggcaagcagggcgcaagaatgtccttactgggcaagcccctttcatacacgagctctcagtcctgcagacgcaacgtaaagtaccgccgggtgcagaactatctgtacaacgtcttggaacgaccacggggctgggcgttcatttatcacgcctttgtgttcttactggtgtttggatgcctcatcctctccgtcttctccactatccctgagcacactaaactggccagctcttgcttgctgatcttagaattcgtgatgattgtcgtgtttggactggaatttatcattcggatctggtctgctggatgttgttgccgctatcgtggctggcagggaagactgaggtttgcgaggaagcctttttgtgttatcgatactattgtgctgatagcttcaattgctgtagtaagcgctaaaacacagggaaacatcttcgcaacatccgccctccgtagcctgagatttctccaaattctgaggatggtgcggatggaccgacggggcggcacttggaagctgttgggatcggtggtgtatgcacacagcaaggagcttattactgcttggtatattggattcctcgtgttaattttttcttccttcctggtctatctggtcgagaaagacgcaaacaaggagttctctacatacgcagacgctctgtggtgggggacaattaccctcactacaatcggctatggagacaagactcctcttacatggctggggagactcctttccgctggttttgctttgctgggaatcagttttttcgccctgccagccgggattctcgggagtggattcgccctgaaagtccaggaacagcaccgacaaaagcactttgaaaagagacgaaacccagctgctaatctcatacagtgcgtgtggagaagttatgcggcggatgagaaaagtgtatccattgctacctggaagcctcacctgaaggcgctgcatacctgttccccgaccaagaaggagcaaggtgaggcctcttctagaatcatgaagttccacgttgcaaagagaaagttcaaggagaccctgcggccctacgacgtcaaagatgtgattgagcagtactccgccgggcacctcgatatgctgtgtcgcatcaagtcactgcagactcgtgtagaccaaatcttaggaaaaggtcagatcacctccgataagaaatcccgggagaagattactgccgaacacgagacaacagacgatttaagcatgttgggccgagtggtgaaagtggagaagcaggtgcagtccattgaatctaaactggattgcctactggatatttatcagcaagtcctgcgcaaggggagcgcctccgcacttgcgctggcctccttccagattcccccattcgagtgcgagcaaacctccgattatcagtctcctgtcgactcaaaggacctgtcaggctccgcccagaacagcggttgcctctctaggtccacgtccgctaacatttctcgtggcttacagtttattctgacccctaacgaatttagcgcacagaccttctatgcactaagtccaactatgcacagccaagctactcaggtaccaattagccaaagcgacgggtcagctgtagccgctactaacactattgcgaatcagattaataccgcccccaaacccgcagctccaaccaccttgcagattcctccccctttgccggctataaagcacctgccccgtcccgaaacgcttcaccccaatcccgctggcctgcaggaatctatctccgatgtcacaacttgtctggtcgcgagcaaggaaaatgtacaggttgcccagagcaacctgacaaaggacaggtcaatgagaaagagttttgacatggggggcgaaacattgctgagtgtctgccctatggtccctaaggatctaggtaagagtttgtccgtccagaatttgatccgaagtacggaggagctgaacatccagcttagcgggtccgagtctagcggttcaagaggctcccaagacttctatcctaaatggcgggaatcaaagttattcatcactgatgaggaagtcggcccagaggaaacggagactgataccttcgatgctgcaccacagccagcccgagaagccgcctttgcaagcgactccctgcgcaccgggcgctcccgatcttcacagtccatatgtaaagctggggaatccacagatgccctgtcactgccacacgttaaactgaagtag

SEQ ID NO: 60746 - DNA, 1284 bp, Artificial Sequence
  derived and/or modified sequence
atgcccaggcaccacgccggcggggaggagggcggggccgccggcctgtgggtgaagagcggggctgctgctgctgctgctgggggcggccgcctgggcagcggcatgaaggatgtggagagcggccggggccgggtgctgctgaacagcgctgctgcccggggagatggcctgctgctgctgggcaccagggctgccaccctgggcggcggcggcggcggcctgcgggagagcagaagaggcaagcagggcgccaggatgagcctgctgggcaagcccctgagctacaccagcagccagagctgcagaagaaatgtgaagtacagaagagtgcagaactacctgtacaacgtgctggagcggccccggggctgggccttcatctaccacgcctttgtgttcctgctggtgtttggctgcctgatcctgagcgtcttcagcaccatccctgagcacaccaagctggccagcagctgcctgctgatcctggagtttgtgatgattgtggtgtttggcctggagttcatcatccgcatctggagcgctggctgctgctgccgctaccggggctggcagggccgcctgcgctttgccaggaagcccttctgtgtgattgacaccatcgtgctgattgccagcattgctgtggtgtctgccaagacccagggcaacatctttgccaccagcgccctgcggagcctgcgcttcctgcagatcctgaggatggtgaggatggacagaagaggaggcacctggaagctgctgggctctgtggtgtatgcccacagcaaggagctgatcacagcctggtacatcggcttcctggtgctgatcttcagcagcttcctggtgtacctggtggagaaggatgccaacaaggagttcagcacctatgcagatgccctgtggtggggcaccatcaccctgaccaccatcggctacggggacaagacccccctgacctggctgggccgcctgctgtctgctggctttgccctgctgggcatctccttctttgccctgcctgctggcatcctgggcagcggctttgccctgaaggtgcaggagcagcaccggcagaagcactttgagaagagaagaaatcctgctgccaacctgatccagtgtgtgtggaggagctatgctgctgatgagaagtctgtgtccatcgccacctggaagccccacctgaaggccctgcacacctgcagccccaccaagaaggagcagggcgaggccagcagcagatttgtgatcagcctgctgctgcacgtgtgcctgtag

SEQ ID NO: 60747 - DNA, 2469 bp, Artificial Sequence
  derived and/or modified sequence
atgcccaggcaccacgccggcggggaggagggcggggccgccggcctgtgggtgaagagcggggctgctgctgctgctgctgggggcggccgcctgggcagcggcatgaaggatgtggagagcggccggggccgggtgctgctgaacagcgctgctgcccggggagatggcctgctgctgctgggcaccagggctgccaccctgggcggcggcggcggcggcctgcgggagagcagaagaggcaagcagggcgccaggatgagcctgctgggcaagcccctgagctacaccagcagccagagctgcagaagaaatgtgaagtacagaagagtgcagaactacctgtacaacgtgctggagcggccccggggctgggccttcatctaccacgcctttgtgttcctgctggtgtttggctgcctgatcctgagcgtcttcagcaccatccctgagcacaccaagctggccagcagctgcctgctgatcctggagtttgtgatgattgtggtgtttggcctggagttcatcatccgcatctggagcgctggctgctgctgccgctaccggggctggcagggccgcctgcgctttgccaggaagcccttctgtgtgattgacaccatcgtgctgattgccagcattgctgtggtgtctgccaagacccagggcaacatctttgccaccagcgccctgcggagcctgcgcttcctgcagatcctgaggatggtgaggatggacagaagaggaggcacctggaagctgctgggctctgtggtgtatgcccacagcaaggagctgatcacagcctggtacatcggcttcctggtgctgatcttcagcagcttcctggtgtacctggtggagaaggatgccaacaaggagttcagcacctatgcagatgccctgtggtggggcaccatcaccctgaccaccatcggctacggggacaagacccccctgacctggctgggccgcctgctgtctgctggctttgccctgctgggcatctccttctttgccctgcctgctggcatcctgggcagcggctttgccctgaaggtgcaggagcagcaccggcagaagcactttgagaagagaagaaatcctgctgccaacctgatccagtgtgtgtggaggagctatgctgctgatgagaagtctgtgtccatcgccacctggaagccccacctgaaggccctgcacacctgcagccccaccaagaaggagcagggcgaggccagcagccgcatcatgaagttccacgtggccaagaggaagttcaaggagaccctgcggccctatgatgtgaaggatgtgattgagcagtacagcgctggccacctggacatgctgtgccgcatcaagagcctgcagaccagggtggaccagatcctgggcaagggccagatcaccagtgacaagaagagccgggagaagatcacagctgagcacgagaccacagatgacctgtccatgctgggccgggtggtgaaggtggagaagcaggtgcagagcattgagagcaagctggactgcctgctggacatctaccagcaggtgctgaggaaaggaagtgccagcgccctggccctggccagcttccagatccccccatttgaatgtgagcagaccagtgactaccagagccctgtggacagcaaggacctgagcggcagcgcccagaacagcggctgcctgagccgcagcaccagcgccaacatcagccggggcctgcagttcatcctgaccccaaatgagttcagcgcccagaccttctacgccctgagccccaccatgcacagccaggccacccaggtgcccatcagccagagtgatggcagcgctgtggccgccaccaacaccatcgccaaccagatcaacacagcccccaagccagctgcccccaccaccctgcagatccccccacccctgcctgccatcaagcacctgcccaggcctgagaccctgcaccccaacccagctggcctgcaggagagcatcagtgatgtgaccacctgcctggtggccagcaaagaaaatgtgcaggtggcccagagcaacctgaccaaggaccgctccatgaggaagagctttgacatgggcggggagaccctgctgtctgtgtgccccatggtgcccaaggacctgggcaagagcctgtctgtgcagaacctgatccgcagcacagaggagctgaacatccagctgagcggcagcgagagcagcggcagccggggcagccaggacttctaccccaagtggagggagagcaagctgttcatcacagatgaggaggtgggccctgaggagacagaaacagacacctttgatgctgccccccagcctgcccgggaggccgcctttgccagtgacagcctgaggacaggccgcagccgcagcagccagagcatctgcaaggccggggagagcacagatgccctgagcctgccccacgtgaagctgaagtag

SEQ ID NO: 60748 - DNA, 1284 bp, Artificial Sequence
  derived and/or modified sequence
atgccccggcaccacgccggcggcgaggagggcggcgccgccggcctgtgggtgaaaagtggcgccgcagccgccgccgcaggcggggggagactcggcagcggtatgaaggatgttgagagcggaagaggaagggtactgctgaacagtgccgcagcgagaggcgacggcctgttactgctggggactagagccgccacgttgggcggcggcgggggaggtctgagggaaagtaggaggggcaaacaaggagctcgaatgtcgcttcttggcaagccattatcttatacttccagccaaagctgtcgaaggaacgtgaaatacaggagagttcagaattacctgtacaacgtgctggaaagaccgagagggtgggcttttatctaccacgccttcgtgttcctgcttgtgtttggctgcctgattctctccgtgttttccacgatacctgaacatactaaactagccagtagctgccttctgattcttgagttcgtcatgatcgtggttttcggtttggaattcattattcggatttggagcgccgggtgctgttgtcgctacaggggatggcaagggagactgcggtttgctcgcaagcctttctgtgtaattgatactatcgtgctaattgcatccatagcggtcgtctcagccaagacacagggaaatatattcgcaacttccgcattacgttccttaaggttcctacagattttaaggatggttagaatggatcggcgtggaggaacatggaagctcttaggttcggtggtgtacgcccactccaaagaactcatcactgcctggtacataggcttcctagtgcttatttttagtagttttctggtgtatttggtcgaaaaagatgccaacaaggaattctctacgtatgccgatgctctttggtggggaactatcactttgaccacgatcggttacggagataaaacacctttgacatggctagggcgtctcctctctgcaggtttcgctcttctgggtatttctttctttgcattgccagccggcattttgggctccggcttcgccctgaaagtccaagaacagcatagacagaagcatttcgaaaagcggcgcaatcccgcggccaatctaatccagtgcgtgtggagaagctatgcggctgatgaaaaaagcgtctccattgcaacttggaaacctcatctcaaggccctccatacttgcagccctacgaagaaagaacagggcgaggcttctagtagatttgtcatcagcttgctcctgcacgtgtgtctatag

SEQ ID NO: 60749 - DNA, 2469 bp, Artificial Sequence
  derived and/or modified sequence
atgccccggcaccacgccggcggcgaggagggcggcgccgccggcctctgggtcaaatcaggagcagctgctgcagccgccggtggaggacgattagggtctggcatgaaagatgttgaaagcggtcgcggaagggtgctgcttaatagtgccgcagcccgcggcgacggtctcttgctgctcggaactagagctgcaacgctgggggggggcggcggcgggcttcgggagtctaggagaggcaagcagggtgcccgcatgtcccttctgggcaagcctctgagttatacgtcttcccagtcttgccgcagaaacgtgaaataccgtcgtgttcagaactacctatataacgtcctagagaggccacgcggatgggcgttcatttaccatgctttcgtattcctgctcgtgttcgggtgcttaatcctttccgtgttctcaacaatccccgaacacactaaattggcatcctcctgtcttttgattttggagttcgttatgatcgttgtgttcggactggagttcatcatccgcatttggtctgccgggtgttgttgtagatatcgggggtggcaggggaggctgagatttgctagaaaacccttctgcgtcattgatacgatagtgttgatcgcttcaattgccgtcgtgtcagcaaagacccagggcaatatattcgccacaagtgccttgaggagtttgaggttcctacagatcctgcgaatggtccgcatggatcgcagaggtgggacctggaaacttctggggagcgtggtatatgcccacagcaaagaactgatcacggcttggtatatcggattcctggtgctgatctttagctcctttttagtctacctggtggagaaagatgccaataaagagttctccacatatgccgatgcactttggtgggggacaatcaccctgactacgatcggttacggcgacaaaacgccactgacctggctcggaagactgctcagcgctggctttgcgctgctggggatctcctttttcgcattgcctgcgggaatcctgggatctgggttcgcgttaaaggtacaggagcagcaccgccagaaacactttgaaaaacggcgcaatcctgcggcaaatctgatccagtgcgtatggcggagttacgcagcggacgagaagtccgtgagcattgcaacttggaaaccacaccttaaggctctgcacacgtgtagcccgacaaagaaggagcaaggagaagcctcctcccggatcatgaaattccacgttgctaaacgcaagttcaaagaaacactgagaccatacgatgtcaaagacgtgattgaacagtactcagccgggcacctggacatgctttgtcggataaaatcacttcagacaagagttgaccaaattcttggcaagggtcaaattactagcgacaagaaatcacgggaaaagattaccgctgaacacgagactacagacgatttgagtatgttggggcgtgtcgtgaaggtggagaaacaagttcaatccatcgaatctaagctcgactgcctgctagacatctaccaacaggtgttgaggaaggggagcgccagtgctctggctctggcctcattccagattccgcctttcgaatgcgagcagacatcagactatcagtcaccagtagattccaaagacctttccggaagcgctcaaaactcagggtgtttgtcacgctctacatctgctaatatttctcgtgggctacagtttatcttgacgcccaacgagttctctgcgcaaacattctatgcgctcagccctacaatgcattctcaggcaactcaggttcctatctcccagagcgacggctcggccgtggcggcaacgaacacgatcgctaaccagatcaacaccgctcccaagccggcagctccaacaacactgcagattcctcctcctttgcctgccatcaaacacctgccacgccctgagaccctgcaccctaatcctgctggtctccaagagtccatctcggacgtgacaacctgtctcgttgcctcaaaggagaatgttcaggtcgcccagagcaacttgactaaagacagatcaatgaggaagagctttgatatgggcggggagacgctgcttagtgtatgtccaatggtcccaaaggatctgggcaaaagccttagcgtgcagaatctaattcgatccacagaggagctgaatattcagttgtctggtagtgagtcctctggaagtaggggctcccaagatttctaccccaagtggcgagaaagcaagttgtttattacagatgaagaggtggggccggaagagaccgagacagatacctttgacgcagccccgcaaccggcccgcgaagccgctttcgcttctgacagtctgcgtaccggccgtagtcgcagtagccagagcatttgcaaggctggtgaatctacagatgccttgtcattaccacacgtgaagctaaagtag

SEQ ID NO: 60750 - DNA, 1469 bp, Artificial Sequence
  derived and/or modified sequence
ctccttgaaacccgccggcgcacatgaggccgctgcccccgccgcaggcgctggcggccccctcgcggtgcccgtggtgatgccatgccccgccaccacgcgggaggagaggagggcggcgccgccgggctctgggtgaagagcggcgcagcggcggcggcggcgggcggggggcgcttgggcagcggcatgaaggatgtggagtccggccggggcagggtgctgctgaactcggcagccgccaggggcgacggcctgctactgctgggcacccgcgcggccacgctcggtggcggcggcggtggcctgagggagagccgccggggcaagcagggggcccggatgagcctgctggggaagccgctctcttacacgagtagccagagctgccggcgcaacgtcaagtaccggcgggtgcagaactacctgtacaacgtgctggagagaccccgcggctgggcgttcatctaccacgctttcgtttttctccttgtctttggttgcttgattttgtcagtgttttctaccatccctgagcacacaaaattggcctcaagttgcctcttgatcctggagttcgtgatgattgtcgtctttggtttggagttcatcattcgaatctggtctgcgggttgctgttgtcgatatagaggatggcaaggaagactgaggtttgctcgaaagcccttctgtgttatagataccattgttcttatcgcttcaatagcagttgtttctgcaaaaactcagggtaatatttttgccacgtctgcactcagaagtctccgtttcctacagatcctccgcatggtgcgcatggaccgaaggggaggcacttggaaattactgggttcagtggtttatgctcacagcaaggaattaatcacagcttggtacataggatttttggttcttattttttcgtctttccttgtctatctggtggaaaaggatgccaataaagagttttctacatatgcagatgctctctggtggggcacaattacattgacaactattggctatggagacaaaactcccctaacttggctgggaagattgctttctgcaggctttgcactccttggcatttctttctttgcacttcctgccggcattcttggctcaggttttgcattaaaagtacaagaacaacaccgccagaaacactttgagaaaagaaggaacccagctgccaacctcattcagtgtgtttggcgtagttacgcagctgatgagaaatctgtttccattgcaacctggaagccacacttgaaggccttgcacacctgcagccctaccaagaaagaacaaggggaagcatcaagcaggtttgtgatttctctcttgctacatgtttgtttataaatctgatacctaccaggtgttttaaatgtgtctcatgtgagtaaaatcgatcaacaaatacaagatgattaaaagtgacctttcacaagattgcctgcaaa

SEQ ID NO: 60751 - DNA, 2469 bp, Artificial Sequence
  derived and/or modified sequence
atgccccgccaccacgcgggaggagaggagggcggcgccgccgggctctgggtgaagagcggcgcagcggcggcggcggcgggcggggggcgcttgggcagcggcatgaaggatgtggagtccggccggggcagggtgctgctgaactcggcagccgccaggggcgacggcctgctactgctgggcacccgcgcggccacgctcggtggcggcggcggtggcctgagggagagccgccggggcaagcagggggcccggatgagcctgctggggaagccgctctcttacacgagtagccagagctgccggcgcaacgtcaagtaccggcgggtgcagaactacctgtacaacgtgctggagagaccccgcggctgggcgttcatctaccacgctttcgtttttctccttgtctttggttgcttgattttgtcagtgttttctaccatccctgagcacacaaaattggcctcaagttgcctcttgatcctggagttcgtgatgattgtcgtctttggtttggagttcatcattcgaatctggtctgcgggttgctgttgtcgatatagaggatggcaaggaagactgaggtttgctcgaaagcccttctgtgttatagataccattgttcttatcgcttcaatagcagttgtttctgcaaaaactcagggtaatatttttgccacgtctgcactcagaagtctccgtttcctacagatcctccgcatggtgcgcatggaccgaaggggaggcacttggaaattactgggttcagtggtttatgctcacagcaaggaattaatcacagcttggtacataggatttttggttcttattttttcgtctttccttgtctatctggtggaaaaggatgccaataaagagttttctacatatgcagatgctctctggtggggcacaattacattgacaactattggctatggagacaaaactcccctaacttggctgggaagattgctttctgcaggctttgcactccttggcatttctttctttgcacttcctgccggcattcttggctcaggttttgcattaaaagtacaagaacaacaccgccagaaacactttgagaaaagaaggaacccagctgccaacctcattcagtgtgtttggcgtagttacgcagctgatgagaaatctgtttccattgcaacctggaagccacacttgaaggccttgcacacctgcagccctaccaagaaagaacaaggggaagcatcaagcagaattatgaaatttcatgttgcaaaacggaagtttaaggaaacattacgtccatatgatgtaaaagatgtcattgaacaatattctgctggtcatctggacatgttgtgtagaattaaaagccttcaaacacgtgttgatcaaattcttggaaaagggcaaatcacatcagataagaagagccgagagaaaataacagcagaacatgagaccacagacgatctcagtatgctcggtcgggtggtcaaggttgaaaaacaggtacagtccatagaatccaagctggactgcctactagacatctatcaacaggtccttcggaaaggctctgcctcagccctcgctttggcttcattccagatcccaccttttgaatgtgaacagacatctgactatcaaagccctgtggatagcaaagatctttcgggttccgcacaaaacagtggctgcttatccagatcaactagtgccaacatctcgagaggcctgcagttcattctgacgccaaatgagttcagtgcccagactttctacgcgcttagccctactatgcacagtcaagcaacacaggtgccaattagtcaaagcgatggctcagcagtggcagccaccaacaccattgcaaaccaaataaatacggcacccaagccagcagccccaacaactttacagatcccacctcctctcccagccatcaagcatctgcccaggccagaaactctgcaccctaaccctgcaggcttacaggaaagcatttctgacgtcaccacctgccttgttgcctccaaggaaaatgttcaggttgcacagtcaaatctcaccaaggaccgttctatgaggaaaagctttgacatgggaggagaaactctgttgtctgtctgtcccatggtgccgaaggacttgggcaaatctttgtctgtgcaaaacctgatcaggtcgaccgaggaactgaatatacaactttcagggagtgagtcaagtggctccagaggcagccaagatttttaccccaaatggagggaatccaaattgtttataactgatgaagaggtgggtcccgaagagacagagacagacacttttgatgccgcaccgcagcctgccagggaagctgcctttgcatcagactctctaaggactggaaggtcacgatcatctcagagcatttgtaaggcaggagaaagtacagatgccctcagcttgcctcatgtcaaactgaaataa

SEQ ID NO: 60752 - DNA, 1284 bp, Artificial Sequence
  derived and/or modified sequence
atgccccgacatcatgcaggtggggaagaggggggagcagcgggactttgggtgaaatcgggcgcagccgcagcagctgccggaggaggtcggctcggaagcggaatgaaagatgtggagtctggaagaggacgagtgctcctcaatagcgccgctgccagaggagacggccttctccttctgggcactagggctgctaccctggggggaggcggaggagggctccgcgagagtcgccgtggcaagcagggggcacggatgtcgttgcttgggaagcctttaagctacacatctagccagtcttgtcgcagaaacgtaaagtatcgcagggttcaaaactacctctataatgtattagaacgtccaagaggctgggcctttatctatcatgctttcgtctttctgctggtctttggctgcctcatcctcagtgtgttcagtacaatcccagaacatacgaagcttgcatcatcctgtctgttaattctcgagtttgtaatgatcgtcgtgttcggcctggaattcataatcagaatttggagcgccggttgttgttgtaggtaccggggttggcagggtcgactgaggttcgccaggaagcctttctgcgttattgacacaatcgtcctgatagctagcattgctgtcgtctctgcaaagactcaggggaatatttttgctacttctgccctgcgtagcctacggtttctgcaaatcttgagaatggttagaatggacaggcgtggcggtacttggaaacttctaggcagtgtggtctatgcacattctaaggaactgataaccgcctggtatattggattcttagtactgatcttttcatcctttttggtgtacctggtagaaaaggatgcaaacaaagagttcagtacctacgccgacgctctttggtggggcaccatcactttaacaacaattgggtatggagataaaacccctctgacttggcttggccgactcttatctgccggattcgctttgctcggaatttctttctttgccttaccagcgggaatattagggtcaggctttgccctgaaggtgcaggagcagcatagacagaagcacttcgagaagcgtcgcaacccagctgccaacctgatccagtgtgtgtggaggtcatacgccgcagatgagaagtccgttagcatcgcaacatggaaacctcacctgaaagcgctccacacctgttcacccaccaagaaggaacagggcgaggcttcctctagattcgtgatttctcttctgcttcatgtgtgcctgtag

SEQ ID NO: 60753 - DNA, 2469 bp, Artificial Sequence
  derived and/or modified sequence
atgccaagacaccacgcgggtggggaggaagggggagcagccggactttgggttaagtcaggagccgctgccgcagctgccggaggaggacggttaggctccggtatgaaggatgtcgagtcgggtcgcggtcgggttcttctgaacagcgcagctgcaaggggggacggactgcttttactgggtacccgcgcagccacgcttggtggtggaggaggaggactccgagagtctcgccgaggcaagcagggggcaaggatgtccctgctgggcaaacctctgtcctatacatcaagtcaaagctgtagacgaaacgttaagtatagacgggtgcagaattacctctacaacgtactcgaacgccctagggggtgggcttttatctaccatgcattcgtgtttctgttggtgtttggttgcttaattctgagcgtgttttccaccatccccgaacacaccaagctcgcatcaagctgcttactgattctcgaatttgtcatgatcgtcgtcttcggactagagttcatcattaggatatggagcgccggatgttgctgccggtaccgtggctggcaggggaggttgcgctttgctcgcaagccgttctgcgtgattgatacaatagtcttaatagcctcgatcgccgtcgtgagtgctaagactcaagggaatatcttcgccacatcagcactgagaagtttgcgctttctgcaaatcctgagaatggtgaggatggaccggagagggggaacctggaagctcctcggctcagtggtttacgctcattctaaggagctgatcaccgcctggtatatcggatttctcgttctgatctttagtagttttctggtctaccttgttgagaaggacgctaacaaggaattctcaacctatgctgacgctctgtggtggggtacaattaccttgaccaccattgggtacggggacaagacgcctctcacttggctcggcagattactctcagcgggatttgcgctgctcggtatatcatttttcgccctcccagctggcatcttaggttctggcttcgccctcaaggtgcaagagcagcatcggcagaaacacttcgaaaagcggaggaacccagcggcaaatctcatacaatgtgtgtggagatcttacgccgcagatgagaagagtgttagcattgctacttggaaaccccacctgaaggcccttcatacctgcagtccaacaaagaaggaacaaggcgaagcctcatctcgtattatgaagtttcacgtagctaagaggaagttcaaagagaccctgaggccatatgacgtgaaggacgtgatcgagcagtatagtgctggacacttggacatgctgtgcagaatcaaaagtctgcagactagggtggaccagatccttggcaagggccaaatcacatcagataagaagtcacgcgagaagatcacagcagagcatgagacaaccgacgacctgtccatgttaggtagggttgtgaaagttgagaagcaggttcagtcgattgaatccaaactcgactgtctgttagatatctatcagcaggtgctaagaaagggcagcgctagcgctcttgcccttgccagtttccaaatacccccattcgagtgcgagcagacatccgattaccagagtcctgtggactctaaggacctgagcggctccgcacagaactccggatgcctatccaggagtacatccgcaaatatttcacgaggtctgcaattcatacttactcctaatgaatttagtgcccagaccttctatgcgctctcgcctacaatgcacagccaggccacacaggttccaatctcacaatcagatgggagcgccgtcgccgcaactaatacaatagcaaatcagattaacactgctccgaaaccggctgccccaaccaccctccaaattcctccacccctgcccgctattaaacatcttcctcggcctgagactctccaccctaaccctgccggtctccaggagtctatttccgatgtaactacttgtctagtcgccagtaaggagaacgtccaagtcgctcagagtaaccttacaaaagatcgtagcatgaggaagagttttgatatgggaggagagacgctgctcagtgtttgtccaatggttccaaaagatctcggaaaatcgctgagcgtgcagaacttgattcgatccaccgaggagttgaacattcagctatctgggagcgaatcatcgggttctcgcggttcccaagacttctatcccaagtggcgggagtctaagctgtttattacggatgaagaggtgggtccagaggagaccgaaaccgatacttttgatgccgcacctcagcctgcaagagaggcggctttcgcgtcggattctcttaggacagggaggtcgagaagctcccagagtatatgcaaggctggcgagtcaacggatgccttgagcctccctcatgtgaaactgaaatag

SEQ ID NO: 60754 - DNA, 1284 bp, Artificial Sequence
  derived and/or modified sequence
atgcccagacaccacgccggcggcgaggagggcggcgccgccggcctgtgggtgaagagcggcgccgccgccgccgccgccggcggcggcagactgggcagcggcatgaaggacgtggagagcggcagaggcagagtgctgctgaacagcgccgccgccagaggcgacggcctgctgctgctgggcaccagagccgccaccctgggcggcggcggcggcggcctgagagagagcagaagaggcaagcagggcgccagaatgagcctgctgggcaagcccctgagctacaccagcagccagagctgcagaagaaacgtgaagtacagaagagtgcagaactacctgtacaacgtgctggagagacccagaggctgggccttcatctaccacgccttcgtgttcctgctggtgttcggctgcctgatcctgagcgtgttcagcaccatccccgagcacaccaagctggccagcagctgcctgctgatcctggagttcgtgatgatcgtggtgttcggcctggagttcatcatcagaatctggagcgccggctgctgctgcagatacagaggctggcagggcagactgagattcgccagaaagcccttctgcgtgatcgacaccatcgtgctgatcgccagcatcgccgtggtgagcgccaagacccagggcaacatcttcgccaccagcgccctgagaagcctgagattcctgcagatcctgagaatggtgagaatggacagaagaggcggcacctggaagctgctgggcagcgtggtgtacgcccacagcaaggagctgatcaccgcctggtacatcggcttcctggtgctgatcttcagcagcttcctggtgtacctggtggagaaggacgccaacaaggagttcagcacctacgccgacgccctgtggtggggcaccatcaccctgaccaccatcggctacggcgacaagacccccctgacctggctgggcagactgctgagcgccggcttcgccctgctgggcatcagcttcttcgccctgcccgccggcatcctgggcagcggcttcgccctgaaggtgcaggagcagcacagacagaagcacttcgagaagagaagaaaccccgccgccaacctgatccagtgcgtgtggagaagctacgccgccgacgagaagagcgtgagcatcgccacctggaagccccacctgaaggccctgcacacctgcagccccaccaagaaggagcagggcgaggccagcagcagattcgtgatcagcctgctgctgcacgtgtgcctgtag

SEQ ID NO: 60755 - DNA, 2469 bp, Artificial Sequence
  derived and/or modified sequence
atgcccagacaccacgccggcggcgaggagggcggcgccgccggcctgtgggtgaagagcggcgccgccgccgccgccgccggcggcggcagactgggcagcggcatgaaggacgtggagagcggcagaggcagagtgctgctgaacagcgccgccgccagaggcgacggcctgctgctgctgggcaccagagccgccaccctgggcggcggcggcggcggcctgagagagagcagaagaggcaagcagggcgccagaatgagcctgctgggcaagcccctgagctacaccagcagccagagctgcagaagaaacgtgaagtacagaagagtgcagaactacctgtacaacgtgctggagagacccagaggctgggccttcatctaccacgccttcgtgttcctgctggtgttcggctgcctgatcctgagcgtgttcagcaccatccccgagcacaccaagctggccagcagctgcctgctgatcctggagttcgtgatgatcgtggtgttcggcctggagttcatcatcagaatctggagcgccggctgctgctgcagatacagaggctggcagggcagactgagattcgccagaaagcccttctgcgtgatcgacaccatcgtgctgatcgccagcatcgccgtggtgagcgccaagacccagggcaacatcttcgccaccagcgccctgagaagcctgagattcctgcagatcctgagaatggtgagaatggacagaagaggcggcacctggaagctgctgggcagcgtggtgtacgcccacagcaaggagctgatcaccgcctggtacatcggcttcctggtgctgatcttcagcagcttcctggtgtacctggtggagaaggacgccaacaaggagttcagcacctacgccgacgccctgtggtggggcaccatcaccctgaccaccatcggctacggcgacaagacccccctgacctggctgggcagactgctgagcgccggcttcgccctgctgggcatcagcttcttcgccctgcccgccggcatcctgggcagcggcttcgccctgaaggtgcaggagcagcacagacagaagcacttcgagaagagaagaaaccccgccgccaacctgatccagtgcgtgtggagaagctacgccgccgacgagaagagcgtgagcatcgccacctggaagccccacctgaaggccctgcacacctgcagccccaccaagaaggagcagggcgaggccagcagcagaatcatgaagttccacgtggccaagagaaagttcaaggagaccctgagaccctacgacgtgaaggacgtgatcgagcagtacagcgccggccacctggacatgctgtgcagaatcaagagcctgcagaccagagtggaccagatcctgggcaagggccagatcaccagcgacaagaagagcagagagaagatcaccgccgagcacgagaccaccgacgacctgagcatgctgggcagagtggtgaaggtggagaagcaggtgcagagcatcgagagcaagctggactgcctgctggacatctaccagcaggtgctgagaaagggcagcgccagcgccctggccctggccagcttccagatcccccccttcgagtgcgagcagaccagcgactaccagagccccgtggacagcaaggacctgagcggcagcgcccagaacagcggctgcctgagcagaagcaccagcgccaacatcagcagaggcctgcagttcatcctgacccccaacgagttcagcgcccagaccttctacgccctgagccccaccatgcacagccaggccacccaggtgcccatcagccagagcgacggcagcgccgtggccgccaccaacaccatcgccaaccagatcaacaccgcccccaagcccgccgcccccaccaccctgcagatccccccccccctgcccgccatcaagcacctgcccagacccgagaccctgcaccccaaccccgccggcctgcaggagagcatcagcgacgtgaccacctgcctggtggccagcaaggagaacgtgcaggtggcccagagcaacctgaccaaggacagaagcatgagaaagagcttcgacatgggcggcgagaccctgctgagcgtgtgccccatggtgcccaaggacctgggcaagagcctgagcgtgcagaacctgatcagaagcaccgaggagctgaacatccagctgagcggcagcgagagcagcggcagcagaggcagccaggacttctaccccaagtggagagagagcaagctgttcatcaccgacgaggaggtgggccccgaggagaccgagaccgacaccttcgacgccgccccccagcccgccagagaggccgccttcgccagcgacagcctgagaaccggcagaagcagaagcagccagagcatctgcaaggccggcgagagcaccgacgccctgagcctgccccacgtgaagctgaagtag

SEQ ID NO: 60756 - protein, 478 aa, Artificial Sequence
  derived and/or modified sequence
ELQLHAIATLSSVAPLLIEEYMSCQGNARVLAFLEWCESEDPFFSHGNSFHGTGGRGNKFAQMRYSLRLLRAVVYLEDETVNKDLCEKGTIQQMIGIFKNIISKPNEKEEAIVLEIQSDILLILSGLCENHIQRKEIFGTEGVDIVLHVMKTDPRKLQSGLGYNVLLFSTLDSIWCCILGCYPSEDYFLEKEGIFLLLDLLALNQKKFCNLILGIMVEFCDNPKTAAHVNAWQGKKDQTAASLLIKLWRKEEKELGVKRDKNGKIIDFENLPGLSAEDFVTLCIIHRYLDFKIGEIWNEIYEEIKLEKLRPVTTDKKALEAITTASENIGKMVASLQSDIIESQACQDMQNEQKVYAKIQATHKQRELANKSWEDFLARTSNAKTLKKAKSLQEKAIEASRYHKRPQNAIFHQTHIKGLNTTVPSGGVVTVESTPARLVGGPLVDTDIALKKLPIRGGALQRVKAVKIVDAPKKSIPT

SEQ ID NO: 60757 - protein, 923 aa, Artificial Sequence
  derived and/or modified sequence
MWTEEAGATAEAQESGIRNKSSSSSQIPVVGVVTEDDEAQDVFKPMDLNRVIKLLEETDKDGLEEKQLKFVKKLVQCYQNGLPLRDLAQIFKILNLCSGKIKNQPRFIESAYDIIKLCGLPFLKKKVSDEITYAEDTANSIALLGDLMKIPSSELRIQICYQQASSSYKIQMAEVGGLAKTMVQSMTLLENQLVEKLWVLKVLQHLSTSEVNCTIMMKAQAASGICTHLNDPDPSGQLLFRSSEILWNLLEKSSKEEVIQQLSNLECLLALKEVFKNLFMRGFSHYDRQLRNDILVITTIIAQNPEAPMIECGFTKDLILFATFNEVKSQNLLVKGLKLSNSYEDFELKKLLFNVIVILCKDLPTVQLLIDGKVILALFTYVKKPEKQKIIDWSAAQHEELQLHAIATLSSVAPLLIEEYMSCQGNARVLAFLEWCESEDPFFSHGNSFHGTGGRGNKFAQMRYSLRLLRAVVYLEDETVNKDLCEKGTIQQMIGIFKNIISKPNEKEEAIVLEIQSDILLILSGLCENHIQRKEIFGTEGVDIVLHVMKTDPRKLQSGLGYNVLLFSTLDSIWCCILGCYPSEDYFLEKEGIFLLLDLLALNQKKFCNLILGIMVEFCDNPKTAAHVNAWQGKKDQTAASLLIKLWRKEEKELGVKRDKNGKIIDTKKPLFTSFQEEQKIIPLPANCPSIAVMDVSENIRAKIYAILGKLDFENLPGLSAEDFVTLCIIHRYLDFKIGEIWNEIYEEIKLEKLRPVTTDKKALEAITTASENIGKMVASLQSDIIESQACQDMQNEQKVYAKIQATHKQRELANKSWEDFLARTSNAKTLKKAKSLQEKAIEASRYHKRPQNAIFHQTHIKGLNTTVPSGGVVTVESTPARLVGGPLVDTDIALKKLPIRGGALQRVKAVKIVDAPKKSIPT

SEQ ID NO: 60758 - DNA, 2772 bp, Artificial Sequence
  derived and/or modified sequence
atgtggaccgaggaggccggcgccaccgccgaggcccaggagagcggcatcagaaacaagagcagcagcagcagccagatccccgtggtgggcgtggtgaccgaggacgacgaggcccaggacgtgttcaagcccatggacctgaacagagtgatcaagctgctggaggagaccgacaaggacggcctggaggagaagcagctgaagttcgtgaagaagctggtgcagtgctaccagaacggcctgcccctgagagacctggcccagatcttcaagatcctgaacctgtgcagcggcaagatcaagaaccagcccagattcatcgagagcgcctacgacatcatcaagctgtgcggcctgcccttcctgaagaagaaggtgagcgacgagatcacctacgccgaggacaccgccaacagcatcgccctgctgggcgacctgatgaagatccccagcagcgagctgagaatccagatctgctaccagcaggccagcagcagctacaagatccagatggccgaggtgggcggcctggccaagaccatggtgcagagcatgaccctgctggagaaccagctggtggagaagctgtgggtgctgaaggtgctgcagcacctgagcaccagcgaggtgaactgcaccatcatgatgaaggcccaggccgccagcggcatctgcacccacctgaacgaccccgaccccagcggccagctgctgttcagaagcagcgagatcctgtggaacctgctggagaagagcagcaaggaggaggtgatccagcagctgagcaacctggagtgcctgctggccctgaaggaggtgttcaagaacctgttcatgagaggcttcagccactacgacagacagctgagaaacgacatcctggtgatcaccaccatcatcgcccagaaccccgaggcccccatgatcgagtgcggcttcaccaaggacctgatcctgttcgccaccttcaacgaggtgaagagccagaacctgctggtgaagggcctgaagctgagcaacagctacgaggacttcgagctgaagaagctgctgttcaacgtgatcgtgatcctgtgcaaggacctgcccaccgtgcagctgctgatcgacggcaaggtgatcctggccctgttcacctacgtgaagaagcccgagaagcagaagatcatcgactggagcgccgcccagcacgaggagctgcagctgcacgccatcgccaccctgagcagcgtggcccccctgctgatcgaggagtacatgagctgccagggcaacgccagagtgctggccttcctggagtggtgcgagagcgaggaccccttcttcagccacggcaacagcttccacggcaccggcggcagaggcaacaagttcgcccagatgagatacagcctgagactgctgagagccgtggtgtacctggaggacgagaccgtgaacaaggacctgtgcgagaagggcaccatccagcagatgatcggcatcttcaagaacatcatcagcaagcccaacgagaaggaggaggccatcgtgctggagatccagagcgacatcctgctgatcctgagcggcctgtgcgagaaccacatccagagaaaggagatcttcggcaccgagggcgtggacatcgtgctgcacgtgatgaagaccgaccccagaaagctgcagagcggcctgggctacaacgtgctgctgttcagcaccctggacagcatctggtgctgcatcctgggctgctaccccagcgaggactacttcctggagaaggagggcatcttcctgctgctggacctgctggccctgaaccagaagaagttctgcaacctgatcctgggcatcatggtggagttctgcgacaaccccaagaccgccgcccacgtgaacgcctggcagggcaagaaggaccagaccgccgccagcctgctgatcaagctgtggagaaaggaggagaaggagctgggcgtgaagagagacaagaacggcaagatcatcgacaccaagaagcccctgttcaccagcttccaggaggagcagaagatcatccccctgcccgccaactgccccagcatcgccgtgatggacgtgagcgagaacatcagagccaagatctacgccatcctgggcaagctggacttcgagaacctgcccggcctgagcgccgaggacttcgtgaccctgtgcatcatccacagatacctggacttcaagatcggcgagatctggaacgagatctacgaggagatcaagctggagaagctgagacccgtgaccaccgacaagaaggccctggaggccatcaccaccgccagcgagaacatcggcaagatggtggccagcctgcagagcgacatcatcgagagccaggcctgccaggacatgcagaacgagcagaaggtgtacgccaagatccaggccacccacaagcagagagagctggccaacaagagctgggaggacttcctggccagaaccagcaacgccaagaccctgaagaaggccaagagcctgcaggagaaggccatcgaggccagcagataccacaagagaccccagaacgccatcttccaccagacccacatcaagggcctgaacaccaccgtgcccagcggcggcgtggtgaccgtggagagcacccccgccagactggtgggcggccccctggtggacaccgacatcgccctgaagaagctgcccatcagaggcggcgccctgcagagagtgaaggccgtgaagatcgtggacgcccccaagaagagcatccccacctag

SEQ ID NO: 60759 - DNA, 3032 bp, Artificial Sequence
  derived and/or modified sequence
aggtctgggtcaactggggggcggcagcggcgctaagcggactgtatggcggtggcctaggcccctggcggaattttgggacctttcgcgactctagcgactctcaggctgccttcccttctcggtggcggggcctctttgggcccagcggctgcgggcgcactgtaggacaggaagatccccccactctccaccccgccgccaccggccatgtggacagaggaagccggggcgaccgccgaggcccaggaatccggcatcaggaacaagtctagcagttccagtcaaatcccggtggttggggtggtgacggaggacgatgaggcgcaggatgttttcaagcctatggaccttaatcgtgtcatcaaactcctcgaagagactgataaagatggcttggaagaaaaacaacttaaatttgtcaagaaactggtacagtgttatcagaatggacttccattaagggatttagcacagatatttaaaattctgaatctgtgttcaggaaaaataaaaaaccagcctcgttttatagaatctgcatatgatatcataaaactgtgtggcttgccatttttgaaaaagaaagtgtcggatgaaataacttatgctgaagatactgctaattcaattgcacttctgggtgacttaatgaaaataccaagttctgaattgaggatacaaatttgttaccagcaagcgagttcatcatacaagattcaaatggctgaagttggaggattagcaaaaacaatggtccagtcaatgaccttgcttgaaaatcaacttgttgagaaactttgggtacttaaagttctgcagcatctctcaacttctgaagttaattgtactataatgatgaaagcacaagcagccagtggaatctgtactcacctcaatgacccagatccctctggacagcttttatttcgttcatcagaaatactttggaacttgctggaaaaatcttcaaaagaagaagtcatacaacagcttagtaacttggaatgtttgctggctttgaaggaagtatttaaaaatctgtttatgagaggtttcagtcattatgaccgtcagcttagaaatgacatattagtgatcactacaattatagctcaaaatcctgaagcaccaatgattgaatgtggctttaccaaggatttgatactgtttgccacctttaatgaagttaaaagtcaaaatcttttggtaaaaggacttaagctttctaattcctatgaagattttgagttgaagaaattactattcaacgtaattgtgatcttatgtaaagatttacctactgtacagctattaattgatggcaaagttattttggctttgtttacctatgttaagaagcctgagaagcaaaaaataattgactggtctgcagcacagcatgaagaattacaactgcatgcaattgccactttgtcatcagtggctcctttattaatagaagaatacatgtcatgccagggaaatgctcgagtccttgcatttctagaatggtgtgagagtgaagatccgtttttcagtcatggtaacagttttcatggtacaggtggccgaggcaacaagtttgcccagatgcgttacagtttaagactcctgagagccgtggtctaccttgaagatgagactgtaaacaaagatctttgtgaaaagggaacaattcagcaaatgataggaatctttaaaaatataataagcaagcctaatgaaaaggaagaagccattgttttggaaatccagtctgatatattacttatcctatctggcctttgtgagaatcacattcaaaggaaggaaattttcggaactgaaggagtagatatcgttcttcatgtgatgaaaacagaccccaggaagttacagagtggcttaggctataatgtacttctttttagtacattggacagcatttggtgctgtattttgggatgttatccctcagaggattattttcttgaaaaggaaggcatttttctccttttggatttgttagcattgaaccaaaaaaaattctgtaatctaatacttggaataatggttgaattttgtgataatcccaaaactgcagctcatgtcaatgcttggcaagggaagaaggatcagacagctgctagtcttttaattaaattgtggagaaaggaggaaaaagaactaggagtaaaacgtgataaaaatgggaagatcattgatacaaaaaaacctctatttactagctttcaagaagagcaaaaaatcatcccactgcctgctaactgcccatctattgcggttatggatgtttctgagaatattagagcaaaaatttatgctatattgggcaaactagattttgaaaatttacctggcctatctgctgaagattttgtcaccctttgtatcatacatagatatcttgattttaaaattggagaaatatggaatgaaatatatgaagaaataaaattagaaaaattaagaccagtcactacagataaaaaagctttggaagctattacaacagcatcagaaaatattggaaagatggttgcttctctgcaaagtgatataattgaaagccaagcatgccaagacatgcaaaatgaacaaaaagtatatgcaaaaatacaggccacgcacaagcaaagagagctggctaataaatcatgggaagatttcttggctagaacatcaaacgctaaaacgttaaagaaagcaaaaagccttcaagaaaaagctatagaagcctccagataccataaacgaccacaaaatgcaatatttcaccaaacacatattaaaggccttaacacaacggtgccctctggtggagtagtaacagtggaaagcactcctgcccgattagtaggaggacctctggttgatacggatattgctcttaaaaaactgcccattcgaggaggagccttgcagagggtgaaagcagttaaaattgtggatgcaccaaaaaagagtattcctacgtaatatactatagagactttttgaaataaagtcagcttataattttttagctg

SEQ ID NO: 60760 - DNA, 2772 bp, Artificial Sequence
  derived and/or modified sequence
atgtggacagaagaggccggtgcaacagccgaggcccaagaatccggcatcagaaacaagtcatcctcgagttcccagattcctgtggtgggcgttgttactgaggacgatgaggcccaggacgtattcaaaccaatggacctgaacagagtcattaaactgcttgaagagaccgacaaggatgggctcgaggagaaacagctaaagtttgtcaaaaagcttgtgcaatgttatcagaatggactgccacttagagacttggctcagatatttaagatcctcaatctatgctccggcaagattaagaatcagcccaggtttatcgagtcggcttatgacattattaagctgtgcggcctcccatttctcaagaagaaggtgagtgacgagatcacttatgccgaagacacagcaaattccatcgctctactaggtgacttgatgaaaatcccctcatccgaactgcgaatccaaatttgctatcagcaagcctcaagcagctacaaaattcagatggctgaagtcggcggtctggcgaaaactatggtccagagcatgacacttctggagaaccagttggtggagaaactgtgggtcctcaaggttttacagcatttgtccacaagcgaggtgaattgcacaatcatgatgaaagcccaggctgcaagcggcatctgtactcacctgaatgaccccgatccaagtgggcagctcctgttccggagctcggagattctctggaatttattagagaaaagttcaaaagaagaagtgatccagcagctgagcaacctagagtgcctgctcgctctgaaggaagtgttcaaaaacctcttcatgcgcggattcagtcactatgacagacaactgcggaatgatatcctggttattacaactatcatcgcccaaaatccggaagcccccatgatagaatgtggattcacaaaggatctgatactgttcgctacgtttaatgaggtcaaatctcagaacctattggttaagggattgaagctgtccaatagctatgaagacttcgagcttaaaaaactgctttttaatgtcatcgtgatactctgcaaggatctcccaaccgtgcagttattgattgatggaaaggtcatactggctctgttcacttacgttaagaaacctgagaaacagaagatcatcgattggagcgcggctcagcacgaagagctgcagctgcatgcaatcgctaccctcagctctgtggctccactgctgattgaggagtacatgtcttgtcagggcaatgcgagagttcttgccttcctggagtggtgtgaatcagaggacccctttttcagccatggaaacagtttccacgggacgggtgggaggggcaacaagttcgcccaaatgaggtacagtctgaggctactgagggccgttgtctatctcgaggacgaaaccgtaaacaaagatctgtgcgagaaggggacgattcaacagatgatcggcatttttaaaaacatcatctcaaaaccgaacgaaaaagaggaggccatcgtactggagattcagagcgatatcttgttgatactgagtggcttgtgcgaaaatcacattcagaggaaggagatcttcggcacagaaggcgtagatattgtgctccatgtcatgaagacggatcccaggaagctccagagtggcctcggatataacgttctcctgttctccaccctcgattctatctggtgctgtatcctgggatgctacccctctgaggactatttcctggaaaaagaagggatcttcctcttactcgacctcttggcactcaaccaaaagaagttctgtaatctgatcctaggaattatggtggaattctgcgacaatcctaagaccgctgctcacgtaaatgcgtggcaggggaagaaagatcaaacagcggcatccttgttgattaaactctggcgaaaagaggaaaaagagctgggggttaagcgtgacaaaaatggaaagatcattgacactaaaaaaccactcttcacgtcctttcaagaggagcagaagatcattcctctcccggccaattgtcccagtatagcagttatggatgtcagcgagaacatccgagctaaaatttacgctatactgggcaagctggattttgagaatctgccaggcctgtctgccgaagacttcgtgactctgtgtataatccacagatacctggacttcaaaatcggggagatttggaatgaaatttacgaggagattaaactcgaaaagttgaggcccgttactactgataagaaggctttagaagcaataacaaccgcttctgaaaacatcggtaagatggtcgcctcgttgcagtctgacattatcgagtcccaggcctgccaagacatgcagaacgagcagaaggtgtacgccaagattcaggctacccacaaacagagagaattggctaataagagctgggaggatttccttgcccggacttccaatgcgaagacactcaagaaagccaaaagcctgcaggaaaaagcaatagaagcgtctcggtaccataagcggccccagaacgccatcttccaccaaacccacattaagggactcaataccaccgtcccgtcaggcggcgtagtcaccgtggaatctaccccagctagactcgtgggagggccactcgtagacaccgacatcgccctgaaaaagctccccataaggggtggcgctctgcaaagggtgaaggccgtgaaaatagttgacgcgcccaagaagagtatccctacctag

SEQ ID NO: 60761 - DNA, 2772 bp, Artificial Sequence
  derived and/or modified sequence
atgtggacagaggaggccggggccacagctgaggcccaggagagcggcatccggaacaagagcagcagcagcagccagatccctgtggtgggcgtggtgacagaagatgatgaggcccaggatgtgttcaagcccatggacctgaacagagtcatcaagctgctggaggagacagacaaggatggcctggaggagaagcagctgaagtttgtgaagaagctggtgcagtgctaccagaatggcctgcccctgcgggacctggcccagatcttcaagatcctgaacctgtgcagcggcaagatcaagaaccagccccgcttcatcgagagcgcctatgacatcatcaagctgtgtggcctgcccttcctgaagaagaaggtgtctgatgagatcacctatgcagaggacacagccaacagcatcgccctgctgggggacctgatgaagatccccagcagcgagctgcgcatccagatctgctaccagcaggccagcagcagctacaagatccagatggccgaggtgggcggcctggccaagaccatggtgcagagcatgaccctgctggagaaccagctggtggagaagctgtgggtgctgaaggtgctgcagcacctgagcaccagcgaggtgaactgcaccatcatgatgaaggcccaggccgccagcggcatctgcacccacctgaatgaccctgaccccagcggccagctgctcttccgcagcagcgagatcctgtggaacctgctggagaagagcagcaaggaggaggtgatccagcagctgagcaacctggagtgcctgctggccctgaaggaggtgttcaagaacctcttcatgaggggcttcagccactatgaccggcagctgagaaatgacatcctggtgatcaccaccatcatcgcccagaaccctgaggcccccatgattgaatgtggcttcaccaaggacctgatcctgtttgccaccttcaatgaggtgaagagccagaacctgctggtgaagggcctgaagctgagcaacagctatgaggactttgagctgaagaagctgctcttcaacgtcatcgtcatcctgtgcaaggacctgcccaccgtgcagctgctgattgatggcaaggtgatcctggccctcttcacctacgtgaagaagccagagaagcagaagatcatcgactggagcgctgcccagcacgaggagctgcagctgcacgccatcgccaccctgagctctgtggcccccctgctgattgaggagtacatgagctgccagggcaatgcccgggtgctggccttcctggagtggtgtgagagcgaggaccccttcttcagccacggcaacagcttccacggcaccggcggccggggcaacaagtttgcccagatgagatacagcctgcggctgctgcgggctgtggtgtacctggaggatgaaacagtgaacaaggacctgtgtgagaagggcaccatccagcagatgattggcatcttcaagaacatcatcagcaagcccaatgagaaggaggaggccatcgtgctggagatccagagcgacatcctgctgatcctgagcggcctgtgtgagaaccacatccagaggaaggagatctttggaacagaaggagtggacatcgtgctgcacgtgatgaagacagaccccaggaagctgcagagcggcctgggctacaacgtgctgctcttcagcaccctggacagcatctggtgctgcatcctgggctgctaccccagcgaggactacttcctggagaaggagggcatcttcctgctgctggacctgctggccctgaaccagaagaagttctgcaacctgatcctgggcatcatggtggagttctgtgacaaccccaagacagctgcccacgtgaatgcctggcagggcaagaaggaccagacagctgccagcctgctgatcaagctgtggaggaaggaggagaaggagctgggcgtgaagagggacaagaatggcaagatcatcgacaccaagaagcccctcttcaccagcttccaggaggagcagaagatcatccccctgcctgccaactgccccagcattgctgtgatggatgtgtctgagaacatccgggccaagatctatgccatcctgggcaagctggactttgagaacctgcccggcctgtctgctgaggactttgtgaccctgtgcatcatccaccgctacctggacttcaagatcggggagatctggaatgagatctatgaggagatcaagctggagaagctgcggcctgtgaccacagacaagaaggccctggaggccatcaccacagccagcgagaacatcggcaagatggtggccagcctgcagagcgacatcatcgagagccaggcctgccaggacatgcagaatgagcagaaggtgtatgccaagatccaggccacccacaagcagcgggagctggccaacaagtcctgggaggacttcctggcccggaccagcaatgccaagaccctgaagaaggccaagagcctgcaggagaaggccatcgaggccagccgctaccacaagaggccccagaatgccatcttccaccagacccacatcaagggcctgaacaccaccgtgcccagcggcggcgtggtgacagtggagagcaccccagcccggctggtgggcggccccctggtggacacagacatcgccctgaagaagctgcccatccggggcggggccctgcagagggtgaaggctgtgaagatcgtggatgcccccaagaagagcatccccacctag

SEQ ID NO: 60762 - DNA, 2772 bp, Artificial Sequence
  derived and/or modified sequence
atgtggaccgaggaggccggcgccaccgccgaggcccaggagagcgggatccgcaataagtcgtcatcctcatcccagattcccgtggtgggcgtcgtcacagaggacgacgaagctcaggacgtgttcaaaccaatggatctcaacagagtgatcaaactgctggaagagactgataaggatggtctagaagagaaacagctgaagttcgtcaagaagctcgtacaatgttaccagaacggtctaccgcttcgcgatttggcgcagatcttcaagatcctgaacctctgttccggcaagatcaaaaaccagccgagattcatcgagtccgcatatgatatcatcaagctatgcggcctccctttcctgaaaaagaaagtatccgatgagattacatatgctgaagacactgccaactccatagccttattaggcgacttgatgaagatcccatcaagcgaactaaggatccagatatgctaccagcaggcgtcttcgtcatacaagattcagatggcagaggtagggggtctggccaagacaatggtgcagagtatgaccctgctcgaaaaccaactcgttgagaaactttgggttctcaaagtgttgcagcatctcagtaccagcgaagtcaactgcacaatcatgatgaaggcccaagcagcttctggaatatgcacccacctcaacgacccagaccctagtggtcagctgctcttccggtccagtgagatcctgtggaacctgctggagaaatcaagcaaggaggaagtgatccagcagttgagtaatttagagtgtttgttggcccttaaggaagtgttcaaaaacctcttcatgaggggattttctcactatgacaggcagctgcggaatgatattctcgtcatcacgactatcatcgcacagaacccggaagcccccatgatcgaatgcggctttaccaaggacctaatcctgtttgctacatttaacgaggtcaagtctcagaacctcttagttaagggcctcaaactatctaatagctacgaggattttgaactgaaaaaactgctgttcaatgtgattgtgattctgtgcaaggatctccccaccgttcagcttcttattgatggtaaggtaatcctggccctttttacatacgtgaaaaagcctgagaagcagaagattatcgactggagtgccgcacagcacgaagagctccagctgcacgcaattgctactctctcctctgtcgcacccctcttgatcgaggagtacatgtcttgccaaggcaatgccagggtgttggcctttctggaatggtgtgaaagcgaggacccattcttctcccatggaaattcatttcacggcactggagggagagggaataaatttgcgcagatgcggtactccctgaggctcttgcgtgccgtggtctatcttgaagatgaaaccgtcaataaagatttgtgtgagaagggaaccatccagcagatgattgggatattcaagaatatcatatccaagcctaacgagaaagaagaagccatcgtgctagagatacaatctgacatcctgttgatcctcagcgggttgtgcgaaaaccacattcaacggaaggaaatcttcgggacagagggggttgacatcgtccttcatgtgatgaaaacagatccaagaaagctgcagagtggactcggttacaacgtcttactgttttctacactggacagtatttggtgctgcatcttagggtgctacccttcagaggattacttcttggagaaagagggcattttccttctgctcgatcttttagctctgaatcagaagaaattttgcaacctgatcttaggtattatggtagagttctgtgacaatcccaagaccgccgcacatgtcaatgcttggcaaggaaagaaagatcagacagccgcatcactgctgattaagctctggcgcaaagaagagaaagagctgggtgtgaagagggacaagaacggaaagataatagacacgaagaaacctcttttcacttcctttcaggaggaacagaagatcattccactaccagcgaactgtccctccatcgctgttatggatgtgtccgaaaatatccgcgccaaaatttatgctatcttgggtaaactcgatttcgagaacctccccggactaagcgcggaagattttgtgactctgtgcattattcaccggtacttagattttaagataggcgagatttggaatgaaatttatgaagaaattaaactggagaagcttagaccagtcacaaccgataagaaagccctcgaggctattaccacagctagcgaaaatatcggcaagatggtagcgtccttacagagtgacataatcgagtcacaggcttgtcaggacatgcaaaatgaacagaaagtgtacgcaaagatacaagccacccacaaacaacgggaactagctaacaagtcttgggaggactttctcgctcgtacatctaacgccaagaccctgaagaaggcaaagagcctacaggagaaggcaatcgaggcctctcgctatcataaaagaccccagaacgctatatttcaccagacccacatcaaggggctgaataccacggtcccgtccggcggggttgtgacagtagaatcgacacccgcccgtcttgtggggggcccactcgtggataccgatatagcgctgaagaaacttcccattcgaggaggagccctgcagcgcgtgaaggcagtgaaaatagtggacgcccccaaaaagagtattccgacgtag

SEQ ID NO: 60763 - DNA, 2772 bp, Artificial Sequence
  derived and/or modified sequence
atgtggacggaagaggctggcgcaactgcggaagcccaggagtccgggatcaggaataagagctcaagcagcagtcaaattcccgtcgttggagtagtgaccgaggatgacgaagcacaagacgtgttcaaaccaatggacctgaaccgcgtgattaaacttcttgaagaaacggacaaggacgggttggaggaaaagcagctgaagttcgtcaagaaactggtccagtgttaccagaacggacttccactcagagatctagcccagatttttaagatactgaatctatgttccgggaagataaaaaaccaaccacggttcatcgaatccgcttacgatattattaagctgtgtgggttacccttcctcaaaaagaaggtgagtgacgagatcacctacgccgaggatacagctaatagcattgcactgctcggagatcttatgaaaattccatcctccgaactccgtatccagatttgctaccagcaagcgtcctcaagttataagatccagatggctgaggtggggggacttgcaaaaacaatggtacagtccatgacacttctcgagaatcaacttgtcgaaaagttgtgggttctgaaggtcctccagcatctgagcacatccgaagttaactgtacaataatgatgaaggcccaagctgcttccggcatttgcacacatcttaatgaccccgatccctctggacagctgctgttccgatcttccgagatcctttggaatcttctagagaaatcctctaaagaggaggtgatacagcagctgtctaatctggagtgtctgctcgcgttgaaggaagttttcaaaaatcttttcatgcgcggatttagccactacgaccgacagctgcgaaacgacatcctggttattactaccatcatcgcccagaatcctgaagcgccaatgatagagtgtggattcactaaagatcttatcttgtttgcaactttcaatgaggtgaagtctcagaaccttctagtcaaaggcctgaaactgtctaacagctacgaggacttcgagctgaaaaagctcctgtttaacgttatcgtcatcttgtgtaaggatctcccaacagttcagctgctcatagacgggaaagtaattttggctttgtttacttacgtgaagaaacctgaaaaacagaaaattatcgattggagcgctgctcagcatgaagagttgcagcttcatgccatcgccactctgtcctctgttgcgccacttctgatcgaagagtatatgtcctgccaaggcaacgcacgggtgctggcctttctggaatggtgtgagagtgaagatcccttttttagccacggcaacagtttccacgggacaggaggcagaggcaataagtttgcacagatgagatacagtctgcgattactgcgtgcagttgtgtatctggaagatgagacggtaaacaaggacctttgcgagaagggtactatccaacagatgatcggaatcttcaaaaacattattagcaagcccaacgagaaggaagaggcaattgtcctggagattcagagtgacatactcctcatcctcagcggcctgtgtgaaaaccatatccagaggaaagagatcttcgggacggagggcgtagatatcgtgctgcatgtgatgaagaccgatccacgcaagctccaaagtggccttggctacaatgtgttattattttctaccctggattctatctggtgttgcatactcggctgctatccgtccgaggattatttcctggagaaagagggaatcttcctccttcttgacctgctggcattgaatcagaaaaaattctgtaatctgatcctcggtattatggtggagttctgcgacaaccctaaaaccgcggcacatgtgaacgcctggcagggaaagaaagatcaaaccgcggcatctttactgattaaactctggaggaaagaggagaaagaactcggcgtgaaaagagacaagaacgggaagattatagacacaaaaaagcctctgttcactagttttcaagaagagcagaagataatacctttgccagctaactgtccatctattgctgtgatggacgtttccgagaacatccgggcaaagatttacgcaattctgggaaagctggatttcgagaaccttcctggcttatctgccgaggattttgtaacgttatgcatcattcatcggtatttggacttcaagatcggggagatctggaacgagatatacgaagagattaagttggagaaactgcgtccggttactacagacaaaaaagccctggaggccataacaaccgcttccgagaatattggaaaaatggtagccagccttcagtccgatataatcgagtcacaggcatgtcaagatatgcaaaatgagcaaaaggtgtatgccaaaatccaggcgacccacaagcagcgggaactcgctaataagtcatgggaggattttctggctagaacctcaaacgctaagacactgaagaaagccaaaagtctgcaggaaaaagctattgaggcctctcgctaccacaagcgccctcagaatgctattttccatcagacacacatcaagggactcaacaccaccgtgccctccggcggtgtcgtaaccgtcgagtctacacccgctcgcctggtgggcggaccactggtagatactgatattgccctcaagaagctgccgatcagagggggagctctgcagagagtgaaggctgtaaaaattgtagacgccccaaagaagtctatacctacgtag

SEQ ID NO: 60764 - protein, 879 aa, Artificial Sequence
  derived and/or modified sequence
MNYPGRGSPRSPEHNGRGGGGGAWELGSDARPAFGGGVCCFEHLPGGDPDDGDVPLALLRGEPGLHLAPGTDDHNHHLALDPCLSDENYDFSSAESGSSLRYYSEGESGGGGSSLSLHPPQQPPLVPTNSGGGGATGGSPGERKRTRLGGPAARHRYEVVTELGPEEVRWFYKEDKKTWKPFIGYDSLRIELAFRTLLQTTGARPQGGDRDGDHVCSPTGPASSSGEDDDEDRACGFCQSTTGHEPEMVELVNIEPVCVRGGLYEVDVTQGECYPVYWNQADKIPVMRGQWFIDGTWQPLEEEESNLIEQEHLNCFRGQQMQENFDIEVSKSIDGKDGSGINYSAVHSFKLSRNHVDWHSVDEVYLYSDATTSKIARTVTQKLGFSKASSSGTRLHRGYVEEATLEDKPSQTTHIVFVVHGIGQKMDQGRIIKNTAMMREAARKIEERHFSNHATHVEFLPVEWRSKLTLDGDTVDSITPDKVRGLRDMLNSSAMDIMYYTSPLYRDELVKGLQQELNRLYSLFCSRNPDFEEKGGKVSIVSHSLGCVITYDIMTGWNPVRLYEQLLQKEEELPDERWMSYEERHLLDELYITKRRLKEIEERLHGLKASSMTQTPALKFKVENFFCMGSPLAVFLALRGIRPGNTGSQDHILPREICNRLLNIFHPTDPVAYRLEPLILKHYSNISPVQIHWYNTSNPLPYEHMKPSFLNPAKEPTSVSENEGISTIPSPVTSPVLSRRHYGESITNIGKASILGAASIGKGLGGMLFSRFGRSSTTQSSETSKDSMEDEKKPVASPSATTVGTQTLPHSSSGFLDSALELDHRIDFELREGLVESRYWSAVTSHTAYWSSLDVALFLLTFMYKHEHDDDAKPNLDPI

SEQ ID NO: 60765 - DNA, 2640 bp, Artificial Sequence
  derived and/or modified sequence
atgaactaccccggcagaggcagccccagaagccccgagcacaacggcagaggcggcggcggcggcgcctgggagctgggcagcgacgccagacccgccttcggcggcggcgtgtgctgcttcgagcacctgcccggcggcgaccccgacgacggcgacgtgcccctggccctgctgagaggcgagcccggcctgcacctggcccccggcaccgacgaccacaaccaccacctggccctggacccctgcctgagcgacgagaactacgacttcagcagcgccgagagcggcagcagcctgagatactacagcgagggcgagagcggcggcggcggcagcagcctgagcctgcaccccccccagcagccccccctggtgcccaccaacagcggcggcggcggcgccaccggcggcagccccggcgagagaaagagaaccagactgggcggccccgccgccagacacagatacgaggtggtgaccgagctgggccccgaggaggtgagatggttctacaaggaggacaagaagacctggaagcccttcatcggctacgacagcctgagaatcgagctggccttcagaaccctgctgcagaccaccggcgccagaccccagggcggcgacagagacggcgaccacgtgtgcagccccaccggccccgccagcagcagcggcgaggacgacgacgaggacagagcctgcggcttctgccagagcaccaccggccacgagcccgagatggtggagctggtgaacatcgagcccgtgtgcgtgagaggcggcctgtacgaggtggacgtgacccagggcgagtgctaccccgtgtactggaaccaggccgacaagatccccgtgatgagaggccagtggttcatcgacggcacctggcagcccctggaggaggaggagagcaacctgatcgagcaggagcacctgaactgcttcagaggccagcagatgcaggagaacttcgacatcgaggtgagcaagagcatcgacggcaaggacggcagcggcatcaactacagcgccgtgcacagcttcaagctgagcagaaaccacgtggactggcacagcgtggacgaggtgtacctgtacagcgacgccaccaccagcaagatcgccagaaccgtgacccagaagctgggcttcagcaaggccagcagcagcggcaccagactgcacagaggctacgtggaggaggccaccctggaggacaagcccagccagaccacccacatcgtgttcgtggtgcacggcatcggccagaagatggaccagggcagaatcatcaagaacaccgccatgatgagagaggccgccagaaagatcgaggagagacacttcagcaaccacgccacccacgtggagttcctgcccgtggagtggagaagcaagctgaccctggacggcgacaccgtggacagcatcacccccgacaaggtgagaggcctgagagacatgctgaacagcagcgccatggacatcatgtactacaccagccccctgtacagagacgagctggtgaagggcctgcagcaggagctgaacagactgtacagcctgttctgcagcagaaaccccgacttcgaggagaagggcggcaaggtgagcatcgtgagccacagcctgggctgcgtgatcacctacgacatcatgaccggctggaaccccgtgagactgtacgagcagctgctgcagaaggaggaggagctgcccgacgagagatggatgagctacgaggagagacacctgctggacgagctgtacatcaccaagagaagactgaaggagatcgaggagagactgcacggcctgaaggccagcagcatgacccagacccccgccctgaagttcaaggtggagaacttcttctgcatgggcagccccctggccgtgttcctggccctgagaggcatcagacccggcaacaccggcagccaggaccacatcctgcccagagagatctgcaacagactgctgaacatcttccaccccaccgaccccgtggcctacagactggagcccctgatcctgaagcactacagcaacatcagccccgtgcagatccactggtacaacaccagcaaccccctgccctacgagcacatgaagcccagcttcctgaaccccgccaaggagcccaccagcgtgagcgagaacgagggcatcagcaccatccccagccccgtgaccagccccgtgctgagcagaagacactacggcgagagcatcaccaacatcggcaaggccagcatcctgggcgccgccagcatcggcaagggcctgggcggcatgctgttcagcagattcggcagaagcagcaccacccagagcagcgagaccagcaaggacagcatggaggacgagaagaagcccgtggccagccccagcgccaccaccgtgggcacccagaccctgccccacagcagcagcggcttcctggacagcgccctggagctggaccacagaatcgacttcgagctgagagagggcctggtggagagcagatactggagcgccgtgaccagccacaccgcctactggagcagcctggacgtggccctgttcctgctgaccttcatgtacaagcacgagcacgacgacgacgccaagcccaacctggaccccatctag

SEQ ID NO: 60766 - DNA, 2640 bp, Artificial Sequence
  derived and/or modified sequence
atgaactacccaggtaggggcagccctagatctccagaacacaatggacgggggggaggcggtggggcatgggaactggggtcagacgcccggcctgctttcggaggtggagtgtgctgctttgagcacttaccaggcggcgaccccgatgatggagacgtgccactcgccctgctacgaggtgagcctggactccatttagcgcccggcactgatgaccataaccatcacctcgcactggatccttgcctgtcggatgaaaattatgatttctcctctgcggagtcaggcagctccctccgatactatagtgaaggtgagtcaggtggtgggggaagttctttgagtctgcatccaccccagcagccacccttagtacctaccaactccgggggtggcggagctacagggggttctcccggcgaaagaaagaggacacggctgggcggtccagccgctaggcaccgatacgaagtggtgacagagcttggacctgaagaagtgaggtggttttacaaagaagataagaagacatggaaaccctttattgggtacgactccctcaggattgaactggcttttcggaccctccttcagacaacgggcgcaagacctcagggtggtgatagagacggagaccatgtttgtagccccaccggccccgctagctctagcggggaggacgatgatgaggacagagcttgcggcttttgtcagtcaactacaggtcacgagcccgagatggttgaactcgtcaacattgagcctgtgtgtgtgaggggaggtctctatgaagtcgacgtcacccagggagagtgttatcccgtgtattggaatcaggctgataaaatacctgttatgagagggcagtggtttattgatgggacctggcaaccattggaagaagaggagtctaatctgatcgaacaggaacatctgaactgtttccgcggccagcaaatgcaagagaacttcgacattgaggtttctaagtccatcgacgggaaggatggttcaggcatcaactacagcgccgtacatagttttaaactatctagaaaccatgtggattggcacagtgtggacgaagtttacttgtacagtgacgcaaccacaagtaagatcgctcgcaccgttactcagaaattgggattcagcaaggcttcctcaagcgggaccagactgcatcgcggctatgtggaagaggcaactctcgaagacaagccttcccaaactacccatatcgtgttcgtggttcacggtatcgggcaaaaaatggaccagggtcggatcattaaaaatacggccatgatgcgtgaggccgcccgtaagatagaggaaaggcacttctctaaccacgctacacatgtcgaatttttgccggtggagtggaggtccaagttaacacttgacggagacacagtggattccatcaccccggataaggttcgaggactgcgggatatgctgaatagtagtgcaatggacattatgtactatacatctcctttatatcgggatgagttagtcaaggggttgcaacaggagcttaatcgcctttatagccttttttgttcgagaaatcccgacttcgaggagaaaggtgggaaagtgagtatcgtttctcactcactgggatgtgtgattacttacgacatcatgaccggatggaatccggtcagactctatgagcaactcctccaaaaagaggaggaactgcccgatgaacggtggatgtcctatgaagaaaggcatttgctggatgagctctacattaccaagaggaggctgaaagagatagaggagaggctgcatggcctaaaggcatcttccatgacccagacaccggcgctgaagtttaaggttgagaatttcttctgtatgggctccccgctggccgttttcctggctcttcggggtatccgcccgggcaacaccggctcccaggaccatattctgcccagagaaatctgtaacaggctgttgaatatattccatcccactgatcccgtggcctatcggcttgagcccctgattctaaaacactactctaatatctctccggttcagattcattggtacaacacatcgaatccgctgccatatgagcacatgaagccctcctttctgaatccggctaaggagccgacctccgtctcagaaaacgaagggatctctaccatccctagtcctgtgacctctccagtgctgtcacgccgccactacggcgaatccatcacaaacatcggtaaggcaagcatactaggggccgccagcattggcaagggacttggtggaatgctattctcccgcttcgggcgcagctccacaacccagtccagtgaaacgtccaaagatagcatggaagacgagaaaaagccagtggcctccccatctgctacaactgtcgggacccagaccttgccccactcctcctcgggcttcctggacagcgctttggagctggaccatcggatcgacttcgagttgcgcgagggcctggtggagtcacggtactggtcggctgtgacctcccacaccgcatattggagcagtctggatgtggccctatttctactgacttttatgtataaacacgagcatgatgatgatgccaagcccaatctcgaccccatctag

SEQ ID NO: 60767 - DNA, 2640 bp, Artificial Sequence
  derived and/or modified sequence
atgaactacccaggccggggcagccccaggagccctgagcacaacggccggggcggcggcggcggggcctgggagctgggcagtgatgcccggcctgccttcggcggcggcgtgtgctgctttgagcacctgcctggaggagaccctgatgatggagatgtgcccctggccctgctgcggggggagcccggcctgcacctggcccctggaacagatgaccacaaccaccacctggccctggacccctgcctgagtgatgaaaattatgacttcagcagcgctgagagcggcagcagcctgcgctactacagcgagggggagagcggcggcggcggcagcagcctgagcctgcaccccccccagcagccccccctggtgcccaccaacagcggcggcggcggggccaccggcggcagccctggagagaggaagaggacccggctgggcggccctgctgcccggcacagatatgaggtggtgacagagctgggccctgaggaggtgcgctggttctacaaggaggacaagaagacctggaagcccttcatcggctatgacagcctgcgcatcgagctggccttccgcaccctgctgcagaccactggagcccggccccagggcggggacagagatggagaccacgtgtgcagccccactggacctgccagcagcagtggagaagatgatgatgaagatcgggcctgtggcttctgccagagcaccaccggccacgagcctgagatggtggagctggtgaacatcgagcctgtgtgtgtgcggggcggcctgtatgaggtggatgtgacccagggcgagtgctaccctgtgtactggaaccaggccgacaagatccctgtgatgaggggccagtggttcattgatggcacctggcagcccctggaggaggaggagagcaacctgattgagcaggagcacctgaactgcttccggggccagcagatgcaggagaactttgatattgaggtgtccaagagcattgatggcaaggatggcagcggcatcaactacagcgctgtgcacagcttcaagctgagcagaaatcatgtggactggcacagcgtggatgaggtgtacctgtacagtgatgccaccaccagcaagatcgccaggacagtgacccagaagctgggcttcagcaaggccagcagcagcggcacccggctgcaccggggctacgtggaggaggccaccctggaggacaagcccagccagaccacccacatcgtgtttgtggtgcacggcatcggccagaagatggaccagggccgcatcatcaagaacacagccatgatgagggaggccgccaggaagattgaggagcggcacttcagcaaccacgccacccacgtggagttcctgcctgtggagtggaggagcaagctgaccctggatggagacacagtggacagcatcaccccagacaaggtgcggggcctgcgggacatgctgaacagcagcgccatggacatcatgtactacaccagccccctgtacagagatgagctggtgaagggcctgcagcaggagctgaaccggctgtacagcctcttctgcagcagaaatccagactttgaggagaagggcggcaaggtgtccatcgtgagccacagcctgggctgtgtgatcacctatgacatcatgacaggctggaaccctgtgcggctgtatgagcagctgctgcagaaggaggaggagctgcctgatgagcgctggatgtcctatgaggagcggcacctgctggatgagctgtacatcaccaagaggcggctgaaggagattgaggagcggctgcacggcctgaaggccagctccatgacccagaccccagccctgaagttcaaggtggagaacttcttctgcatgggcagccccctggccgtgttcctggccctgcggggcatccggcccggcaacacaggcagccaggaccacatcctgccccgggagatctgcaaccggctgctgaacatcttccaccccacagatcctgtggcctaccgcctggagcccctcatcctgaagcactacagcaacatcagccctgtgcagatccactggtacaacaccagcaaccccctgccctatgagcacatgaagcccagcttcctgaacccagccaaggagcccacctctgtgtctgaaaatgaaggcatcagcaccatccccagccctgtgaccagccctgtgctgagcagaagacactacggggagagcatcaccaacatcggcaaggccagcatcctgggcgccgccagcatcggcaagggcctgggcggcatgctgttcagccgcttcggccgcagcagcaccacccagagcagcgagaccagcaaggacagcatggaggatgagaagaagcctgtggccagccccagcgccaccaccgtgggcacccagaccctgccccacagcagcagcggcttcctggacagcgccctggagctggaccacagaattgactttgagctgcgggagggcctggtggagagccgctactggagcgctgtgaccagccacacagcctactggagcagcctggatgtggccctcttcctgctgaccttcatgtacaagcatgaacatgatgatgatgccaagcccaacctggaccccatctag

SEQ ID NO: 60768 - DNA, 5546 bp, Artificial Sequence
  derived and/or modified sequence
agattagaaacttcgggtggagagggcggcggcgttgaatgtgtggcggaagcgctgggggtcacggctccgcgcgccgccggacagccggcggcgtctccacagcatgaattacccgggccgcgggtccccacggagccccgagcataacggccgaggcggcggcggcggcgcctgggagctgggctcagacgcgaggccagcgttcggcggcggcgtctgctgcttcgagcacctgcccggcggggacccggacgacggcgacgtgcccctggccctgctgcgcggggaacccgggctgcatttggcgccgggcaccgacgaccacaaccaccacctcgcgctggacccctgcctcagtgacgagaactatgacttcagctccgccgagtcgggctcctcgctgcgctactacagcgagggtgagagcggcggcggcggcagctccttgtcgctgcacccgccgcagcagcctccgctggtcccgacgaactcggggggcggcggcgcgacaggagggtcccccggggaaaggaaacgtacccggcttggcggcccggcggcccggcaccgctatgaggtagtgacggagctgggcccggaggaggtacgctggttctacaaggaggacaagaagacctggaagcccttcatcggctacgactcgctccgcatcgagctcgccttccggaccctgctgcagaccacgggtgcccggccccagggcggggaccgggacggcgaccatgtgtgctcccccacgggcccagcctccagttccggagaagatgacgatgaggaccgcgcctgcggcttctgccagagtacgacggggcacgagccggagatggtggagcttgtgaacatcgagcctgtgtgcgtgcggggcggcctctacgaggtggatgtgacccaaggagagtgctacccggtgtactggaaccaggctgataaaataccagtaatgcgtggacagtggtttattgacggcacttggcagcctctagaagaggaagaaagtaatttaattgagcaagaacatctcaattgttttaggggccagcagatgcaggaaaatttcgatattgaagtgtcaaaatccatagatggaaaagatggcagtgggatcaactattctgctgttcatagtttcaagttgagtcgaaaccatgtggactggcacagtgtggatgaagtatatctttatagtgatgcaacaacatctaaaattgcaagaacagttacccaaaaactgggattttctaaagcatcaagtagtggtaccagacttcatagaggttatgtagaagaagccacattagaagacaagccatcacagactacccatattgtatttgttgtgcatggcattgggcagaaaatggaccaaggaagaattatcaaaaatacagctatgatgagagaagctgcaagaaaaatagaagaaaggcatttttccaaccatgcaacacatgttgaatttctgcctgttgagtggcggtcaaaacttactcttgatggagacactgttgattccattactcctgacaaagtacgaggtttaagggatatgctgaacagcagtgcaatggacataatgtattatactagtccactttatagagatgaactagttaaaggccttcagcaagagctgaatcgattgtattcccttttctgttctcggaatccagactttgaagaaaaagggggtaaagtctcaatagtatcacattccttgggatgtgtaattacttatgacataatgactggctggaatccagttcggctgtatgaacagttgctgcaaaaggaagaagagttgcctgatgaacgatggatgagctatgaagaacgacatcttcttgatgaactctatataactaaacgacggctgaaggaaatagaagaacggcttcacggattgaaagcatcatctatgacacaaacacctgccttaaaatttaaggttgagaatttcttctgtatgggatccccattagcagttttcttggcgttgcgtggcatccgcccaggaaatactggaagtcaagaccatattttgcctagagagatttgtaaccggttactaaatatttttcatcctacagatccagtggcttatagattagaaccattaatactgaaacactacagcaacatttcacctgtccagatccactggtacaatacttcaaatcctttaccttatgaacatatgaagccaagctttctcaacccagctaaagaacctacctcagtttcagagaatgaaggcatttcaaccataccaagccctgtgacctcaccagttttgtcccgccgacactatggagaatctataacaaatataggcaaagcaagcatattaggggctgctagcattggaaagggacttggaggaatgttgttctcaagatttggacgttcatctacaacacagtcatctgaaacatcaaaagactcaatggaagatgagaagaagccagttgcctcaccttctgctaccaccgtagggacacagacccttccacatagcagttctggcttcctcgattctgcattggagttggatcacaggattgattttgaactcagagaaggccttgtggagagccgctattggtcagctgtcacgtcgcatactgcctattggtcatccttggatgttgccctttttcttttaaccttcatgtataaacatgagcacgatgatgatgcaaaacccaatttagatccaatctgaactctcttgaaggacatgaatggcctaaaactgattttttttttttccgttaaaatgtgtgtgtcaagatacggagatttcagggttaaagtatatttcagttttctttagggcaacatatatttgaatttaaaagcactttatttaaaaaaaaaagaagttttcagttctgaagaagtcatttacagtttgcatcattttaattatgagtctgacaaaaccttctccagagaatcaagcaagacctggatgtgaagaaggtttgggtaaactgcatgtaaaggctacaaatcacaatctgattcctcccaaatataaaggcatatggaacataatgtattaaccaaagtatgttataaatcaaaaatggtcaaggttcagcatattctatatgaagatcacaaggtggtatcgttttagatttctatgaaggctttcatttgtacatccctttgaaaaaatataacagatttaaaatgttttgaatttaacttgtttagaaaaactaatgcttaaaacaatatttgaactactgtatttataatttattacctctaattgctttatttcagtgtatgagacattactgttttaatgtttgctttgaacataatttaagaaccagatttattttctatagtgataaacccttttttctcagaactccatctttgtactcttcagatgaatatatagacactgtggcatacattttttttcattaaaaacttatggcttcatacaacactagttcaattttttaaataaactttttattatgttacatgtacttcagagaaagctaaagtttctctaaacttgacacggagtactccataatgggtacatttcattagctttattagaaaactagtaaatgcttttgaataggtagtatgacagctattttaaatgtataaacatttgtgtgccaaacaacatatatgaagggatgtgatgccactaactagtgcacattgtttctcaatgtgccattgagacacaaggcacagtaagtcaggattctgaggcattggaagggttttcttcagctgtaattgtttccacagtgcttttcatctgaggggctcaaagtttaagagtgcattcaataacccatgtactagcttcttgaggtaagtaaataaatcttgttctcatgttacatgttaatacaccaaggcaccaaaacatttaaagtgccatgaattagattacatcagaaatcagaaaagcttggattgagctagtcaccgtggttcacgcctgtaatcccaacacttcgggaggccaagatgggaggatctcttgagcccaggatttcaagaccagcttgggcaacatagtgagaccctcttctctgcaaaaactgacaaaaattagccacttgtagtggtgtacacctgtagtcccagctactcaagaggctgaggtgggaggatcacccgagcccagaagttcaaagctgcagtgagctctgatcacaccaatgcactccagcctgggtgacagagccagaccctgtctctaaaaaacaaaaaagaaaagcttgggttgaagccaggccatattcttttatatgctgttcaatgacttgattcacatgtgaccttttagtagtttgcaaacaataataacagaagttgcaattcataattcagagaaatgaccatgaagccggtgtttccctgcttgatttctatgttcttggattctcacacaaaagaggagttacctagaggggatcagtagccatccctgttgcacacaaccctcacttctgagtggtttccactaggttccacttaaggtgctgtcttttcttaacttgcaaggaattgcttagcttcccaataatcattgtcaaactgggagcaaagttggtcagctgtatctctcacctcctcctttcttcataagatagtagaatctgtggcttacttgtaggttttacttagtgcttcagtactgttggctgttttggccttttgctgaatttgcacaacaacataaagcacttctttttaatgtttaaaaaaaattccaaggctccatgaccaagtatgtgactcactaagaaacccttgctataaaaggcttttgatgaaatcttagcaaagctaaattatctctaacttagagattcctatgaactcaggtcattttcatagcctgtttattttgtaggtctaatttagttctcaggaaaattaaactcatgctatatgactgtatcgttaaaggtacttgagcgtatgttgctgtaggtggtatgacactcaaatgcataagaacttgaagggatttattcttaaccactagaatatgaagagccctttttacctgagaagagtgaaattatgtcagaccttttaatttgatatcactgagtaaaaggtatgttcctatagccataggaatatgtctgcttcctttttttcatgttgagaaaacagtcaaatttaaccatttggagtttatttgaattcttggaaagagcaatattcaaaaccttttcaaaaataagatattctggactactggatggatgttttgttttcagttcatttttcatcagtagagatggtgatttcggttttgtagtatccttgtttctatgtctgtgcatgttaacattggatgtatttgtatatacttaattaatatacagactgtgtgtcattctggcttgattagaagctaagtcagttactgagtaacattttgcaactttattccagcaagtactaaatcggccaaaaaaagttttgtttttgataccattaaaattttattctct

SEQ ID NO: 60769 - DNA, 2640 bp, Artificial Sequence
  derived and/or modified sequence
atgaactaccccggccggggcagcccccggagccccgagcacaacggccgcgggggaggtgggggcgcttgggagctcggaagcgacgccaggcccgccttcggaggaggggtgtgctgtttcgaacacttacctggaggcgacccagatgatggcgatgtcccgctggcattgctgaggggagagccagggctgcatctggccccagggaccgacgatcacaaccatcacctggcactggacccatgtctctccgatgaaaactatgacttctcctctgccgagtcaggttcctccctgagatactactctgaaggggaatctggaggcgggggaagctcactctcactacatccccctcaacaaccccctctcgttccaaccaattccggagggggaggcgcaactggtggttcacctggagaaagaaaacgcacccgattaggtgggcctgcagcacgccatcggtacgaagtggtgaccgaactcgggcccgaagaagttcgttggttttacaaggaagacaaaaaaacatggaagccatttattggatacgactccctacggattgaactggcttttcgaacactgctgcagactaccggggcccgccctcagggtggggaccgggacggagatcacgtgtgctccccaactgggccggcctcttctagtggcgaggatgacgatgaagaccgcgcctgcggcttctgtcagtcgactactggtcacgagcccgagatggtcgagctggtcaacatcgaacctgtttgcgtgagggggggactgtatgaagttgatgtcacccagggcgagtgttaccctgtctactggaatcaagcagacaagattcccgttatgagaggacagtggtttatcgatggtacgtggcagcctcttgaagaagaagagtcgaatctcatcgagcaagagcacttgaattgttttcgtggccaacagatgcaggagaacttcgacatcgaggtgtccaagtctatcgacggtaaggatggatcaggtattaactactctgccgtgcactcttttaagctgagcaggaaccatgtcgattggcactccgttgatgaggtctacctatatagcgatgcaacaacctcaaagatcgcaagaacagtgacacagaagctcggtttttctaaagcctcctcgagcgggacccggctccataggggctatgtggaagaagctacgttggaagataagccatcccaaactacgcacattgtgtttgttgtgcacggtattggccaaaagatggatcagggaaggataatcaagaacactgccatgatgagagaggccgccaggaaaatcgaagagcggcacttctcgaaccacgctacacatgtagagttcctacctgttgaatggaggagcaaactgaccctggacggcgacactgtcgactctataacccctgataaggtgagaggtctgagagatatgctgaattcatccgcaatggatattatgtattacaccagcccgctgtaccgagacgagctggtgaagggccttcaacaggagttaaatcgcctttactctttgttttgttcacgcaatcctgattttgaggagaagggaggaaaggtgagcattgtatcacactcccttggctgtgtgatcacttacgatatcatgactggatggaatccggtgcgtctgtacgagcagctcctgcaaaaggaagaggagctccctgatgagagatggatgtcttacgaagagcgccaccttctggatgagctgtatattacaaagcgcagactgaaggagatcgaggaaaggttacacggactgaaggcatccagtatgacgcaaacccccgccctgaagttcaaagtcgagaactttttttgcatgggatccccgctcgctgtgtttctggcgttgcgggggattagacctggaaatacaggaagccaagatcatattcttccgcgggaaatctgtaatcgcctgttaaatatctttcaccctacagatcctgtggcctaccggcttgagcctctgatcctaaaacactactctaacattagccccgtgcagattcattggtacaacacatcaaaccctcttccttatgaacacatgaagccttcgtttttgaacccagctaaagagcccaccagtgtgagcgagaacgagggaatttccacgatacccagtccagttactagccccgtgctcagtcggagacattacggagagagcatcaccaatatcgggaaagcctctattctcggcgccgcttctataggcaagggactcggcggtatgctgttttcccggttcggtcggagtagtacaacccagagcagtgagacatcaaaagacagcatggaagacgagaagaaacccgtagcttcacccagcgccaccactgttggtacgcagaccctgccacacagtagctccggcttcctcgatagcgctttagagctggaccataggatcgactttgaactcagggaaggattagtggaaagcagatactggtccgccgtgaccagccatacagcctactggagctccctggacgtggccttgttcctgcttactttcatgtacaagcatgaacatgatgacgatgctaagccgaacctggacccgatatag

SEQ ID NO: 60770 - DNA, 2640 bp, Artificial Sequence
  derived and/or modified sequence
atgaattaccccggtcgtggttcacctaggtcccctgagcataatggtagaggcggtgggggtggagcttgggaactggggagcgatgcacgacctgcgttcggcggaggcgtttgctgcttcgaacatttgcccggaggcgatcctgatgacggcgatgtgcctcttgcgctgctgcggggtgaacctggtctccatctcgcccctggcaccgatgaccacaatcaccatctggctttggatccctgccttagtgacgagaactacgacttctctagcgccgagagcgggagttccctgcggtactatagtgagggggagtcaggcggaggcggatcttctctctcacttcatcctcctcagcagccacccctagtccccacaaactccggagggggaggagctacaggcggaagtccgggagaacgcaagagaactagactcggtggacccgctgctaggcatagatacgaagtcgtaacagagctgggcccagaggaggtacgatggttctacaaggaagataagaagacctggaagcctttcattggttatgacagcttgagaatcgagctggcctttcgtacgcttttgcagacaacaggtgccaggcctcaaggcggtgacagagacggagatcacgtttgctcaccaacaggccctgcatcctcaagcggcgaagacgatgacgaagatagagcttgtgggttttgccaatcaacaacaggacacgagcctgagatggtggaactagtcaatattgagcccgtttgcgtccgcggaggactgtacgaagtagacgttactcagggcgaatgctatccagtctattggaaccaggcagacaagatccctgtgatgagaggccagtggttcatcgatgggacatggcagcccctggaggaggaggaaagcaatctgatcgaacaggagcacctcaactgttttcgaggacagcagatgcaggaaaacttcgatatcgaagtcagtaaaagcatagatggaaaggacggcagcggtatcaattatagcgccgtgcatagctttaagctcagccgcaatcatgtagactggcactccgtagatgaagtgtacctttactcagatgcaacaacatcaaaaattgctagaaccgtcacacagaaactgggtttctccaaggcctccagtagcgggacccggcttcacagaggttacgtagaggaggctaccctggaagacaagccatctcagaccacacacattgtgttcgtggtgcatggcattggtcagaagatggaccagggacggatcattaagaatactgcaatgatgcgagaggccgcacgaaaaatcgaggagagacatttcagcaaccatgcaactcacgtagagttccttcctgtggagtggaggagcaagctcacactcgatggcgataccgtagactcaataactccagacaaggtgcgaggcttgcgagatatgcttaacagttcagcgatggatatcatgtattacaccagcccgctatatagggacgagctagttaaggggttgcaacaggagctaaataggctgtattctctgttctgtagtagaaaccccgatttcgaagaaaaaggcggaaaagtgtcaattgtcagccattcactcgggtgcgtcatcacctacgacattatgaccggatggaaccctgtccggctatatgaacagctccttcagaaagaagaagagctccctgatgaaagatggatgagttacgaggaacgacacctgctggatgagctttatatcactaaacgacgcttgaaagagatcgaagaaaggctgcatgggcttaaggcttcgtcaatgactcagactcccgcattaaagttcaaggtggaaaattttttctgtatgggctctcccttggccgtgttcctggcacttaggggaatcagacccggaaatacaggatcacaagaccatattctgccccgtgagatctgcaaccgtctccttaatatcttccatccaacggatccagtcgcctatcggcttgagccactgattcttaagcactacagtaacattagtcccgttcaaatccattggtacaacacatccaaccctctgccatacgagcatatgaagccttcctttctaaatcctgctaaggaaccaacgtcggtatccgagaatgaaggcatctccacaataccatcaccggttacatccccggtgctgtccaggaggcactacggtgagagtattaccaatatcggcaaagcttcaattctgggggcagctagcatcggtaaagggctaggaggaatgctgttttctcgcttcggccgtagctccacgacccagagctctgagaccagcaaagactccatggaggatgaaaagaagccggttgcctcccctagcgccactaccgtgggaacgcagactctgccacatagcagttctggctttttagacagcgcccttgagttagatcacagaattgacttcgaacttagagaagggttagttgagagtcggtattggtcagcagtgaccagccacacagcatactggagttccctggacgtggctcttttcttactcaccttcatgtacaagcacgaacacgacgacgatgccaagcccaatctcgatccaatctag

SEQ ID NO: 60771 - protein, 900 aa, Artificial Sequence
  derived and/or modified sequence
MNYPGRGSPRSPEHNGRGGGGGAWELGSDARPAFGGGVCCFEHLPGGDPDDGDVPLALLRGEPGLHLAPGTDDHNHHLALDPCLSDENYDFSSAESGSSLRYYSEGESGGGGSSLSLHPPQQPPLVPTNSGGGGATGGSPGERKRTRLGGPAARHRYEVVTELGPEEVRWFYKEDKKTWKPFIGYDSLRIELAFRTLLQTTGARPQGGDRDGDHVCSPTGPASSSGEDDDEDRACGFCQSTTGHEPEMVELVNIEPVCVRGGLYEVDVTQGECYPVYWNQADKIPVMRGQWFIDGTWQPLEEEESNLIEQEHLNCFRGQQMQENFDIEVSKSIDGKDAVHSFKLSRNHVDWHSVDEVYLYSDATTSKIARTVTQKLGFSKASSSGTRLHRGYVEEATLEDKPSQTTHIVFVVHGIGQKMDQGRIIKNTAMMREAARKIEERHFSNHATHVEFLPVEWRSKLTLDGDTVDSITPDKVRGLRDMLNSSAMDIMYYTSPLYRDELVKGLQQELNRLYSLFCSRNPDFEEKGGKVSIVSHSLGCVITYDIMTGWNPVRLYEQLLQKEEELPDERWMSYEERHLLDELYITKRRLKEIEERLHGLKASSMTQTPALKFKVENFFCMGSPLAVFLALRGIRPGNTGSQDHILPREICNRLLNIFHPTDPVAYRLEPLILKHYSNISPVQIHWYNTSNPLPYEHMKPSFLNPAKEPTSVSENEGISTIPSPVTSPVLSRRHYGESITNIGKASILGAASIGKGLGGMLFSRFGRSSTTQSSETSKDSMEDEKKPVASPSATTVGTQTLPHSSSGFLDSAYFRLQESFFNLPQLLFPENVMQNKDNALVELDHRIDFELREGLVESRYWSAVTSHTAYWSSLDVALFLLTFMYKHEHDDDAKPNLDPI

SEQ ID NO: 60772 - protein, 771 aa, Artificial Sequence
  derived and/or modified sequence
MNYPGRGSPRSPEHNGRGGGGGAWELGSDARPAFGGGVCCFEHLPGGDPDDGDVPLALLRGEPGLHLAPGTDDHNHHLALDPCLSDENYDFSSAESGSSLRYYSEGESGGGGSSLSLHPPQQPPLVPTNSGGGLYEVDVTQGECYPVYWNQADKIPVMRGQWFIDGTWQPLEEEESNLIEQEHLNCFRGQQMQENFDIEVSKSIDGKDAVHSFKLSRNHVDWHSVDEVYLYSDATTSKIARTVTQKLGFSKASSSGTRLHRGYVEEATLEDKPSQTTHIVFVVHGIGQKMDQGRIIKNTAMMREAARKIEERHFSNHATHVEFLPVEWRSKLTLDGDTVDSITPDKVRGLRDMLNSSAMDIMYYTSPLYRDELVKGLQQELNRLYSLFCSRNPDFEEKGGKVSIVSHSLGCVITYDIMTGWNPVRLYEQLLQKEEELPDERWMSYEERHLLDELYITKRRLKEIEERLHGLKASSMTQTPALKFKVENFFCMGSPLAVFLALRGIRPGNTGSQDHILPREICNRLLNIFHPTDPVAYRLEPLILKHYSNISPVQIHWYNTSNPLPYEHMKPSFLNPAKEPTSVSENEGISTIPSPVTSPVLSRRHYGESITNIGKASILGAASIGKGLGGMLFSRFGRSSTTQSSETSKDSMEDEKKPVASPSATTVGTQTLPHSSSGFLDSAYFRLQESFFNLPQLLFPENVMQNKDNALVELDHRIDFELREGLVESRYWSAVTSHTAYWSSLDVALFLLTFMYKHEHDDDAKPNLDPI

SEQ ID NO: 60773 - DNA, 2316 bp, Artificial Sequence
  derived and/or modified sequence
atgaactaccccggcagaggcagccccagaagccccgagcacaacggcagaggcggcggcggcggcgcctgggagctgggcagcgacgccagacccgccttcggcggcggcgtgtgctgcttcgagcacctgcccggcggcgaccccgacgacggcgacgtgcccctggccctgctgagaggcgagcccggcctgcacctggcccccggcaccgacgaccacaaccaccacctggccctggacccctgcctgagcgacgagaactacgacttcagcagcgccgagagcggcagcagcctgagatactacagcgagggcgagagcggcggcggcggcagcagcctgagcctgcaccccccccagcagccccccctggtgcccaccaacagcggcggcggcctgtacgaggtggacgtgacccagggcgagtgctaccccgtgtactggaaccaggccgacaagatccccgtgatgagaggccagtggttcatcgacggcacctggcagcccctggaggaggaggagagcaacctgatcgagcaggagcacctgaactgcttcagaggccagcagatgcaggagaacttcgacatcgaggtgagcaagagcatcgacggcaaggacgccgtgcacagcttcaagctgagcagaaaccacgtggactggcacagcgtggacgaggtgtacctgtacagcgacgccaccaccagcaagatcgccagaaccgtgacccagaagctgggcttcagcaaggccagcagcagcggcaccagactgcacagaggctacgtggaggaggccaccctggaggacaagcccagccagaccacccacatcgtgttcgtggtgcacggcatcggccagaagatggaccagggcagaatcatcaagaacaccgccatgatgagagaggccgccagaaagatcgaggagagacacttcagcaaccacgccacccacgtggagttcctgcccgtggagtggagaagcaagctgaccctggacggcgacaccgtggacagcatcacccccgacaaggtgagaggcctgagagacatgctgaacagcagcgccatggacatcatgtactacaccagccccctgtacagagacgagctggtgaagggcctgcagcaggagctgaacagactgtacagcctgttctgcagcagaaaccccgacttcgaggagaagggcggcaaggtgagcatcgtgagccacagcctgggctgcgtgatcacctacgacatcatgaccggctggaaccccgtgagactgtacgagcagctgctgcagaaggaggaggagctgcccgacgagagatggatgagctacgaggagagacacctgctggacgagctgtacatcaccaagagaagactgaaggagatcgaggagagactgcacggcctgaaggccagcagcatgacccagacccccgccctgaagttcaaggtggagaacttcttctgcatgggcagccccctggccgtgttcctggccctgagaggcatcagacccggcaacaccggcagccaggaccacatcctgcccagagagatctgcaacagactgctgaacatcttccaccccaccgaccccgtggcctacagactggagcccctgatcctgaagcactacagcaacatcagccccgtgcagatccactggtacaacaccagcaaccccctgccctacgagcacatgaagcccagcttcctgaaccccgccaaggagcccaccagcgtgagcgagaacgagggcatcagcaccatccccagccccgtgaccagccccgtgctgagcagaagacactacggcgagagcatcaccaacatcggcaaggccagcatcctgggcgccgccagcatcggcaagggcctgggcggcatgctgttcagcagattcggcagaagcagcaccacccagagcagcgagaccagcaaggacagcatggaggacgagaagaagcccgtggccagccccagcgccaccaccgtgggcacccagaccctgccccacagcagcagcggcttcctggacagcgcctacttcagactgcaggagagcttcttcaacctgccccagctgctgttccccgagaacgtgatgcagaacaaggacaacgccctggtggagctggaccacagaatcgacttcgagctgagagagggcctggtggagagcagatactggagcgccgtgaccagccacaccgcctactggagcagcctggacgtggccctgttcctgctgaccttcatgtacaagcacgagcacgacgacgacgccaagcccaacctggaccccatctag

SEQ ID NO: 60774 - DNA, 2703 bp, Artificial Sequence
  derived and/or modified sequence
atgaattatcccggaagagggtctcccaggagccccgaacataacgggcgggggggcggaggcggagcttgggaactggggagcgacgctaggcccgcgtttggaggaggggtgtgctgctttgagcatcttcctggaggagatcccgacgatggagacgttccactagccctcttacggggagagcccggtctgcacctggcaccaggaactgacgaccataatcaccacctcgctctggatccgtgtttgtcagatgaaaactacgacttcagttcagctgaatcggggtcaagcttgaggtactatagtgaaggtgagagcggtggaggaggctcatctctgagcctccatcctccacaacaacctcctctggtgcccaccaattccggaggcgggggagcgactggtgggtctccgggggagcgcaagcgaaccaggctggggggacccgcggcccgccacagatacgaagtggtgactgagttagggcctgaagaagtaaggtggttctacaaagaagataaaaaaacctggaaaccatttataggctatgattccctaagaattgagctggcctttcgaactcttttacagacaacaggcgctcgcccacagggcggggatcgcgatggcgatcacgtctgctccccaactggacctgcatcttcttcaggtgaagatgatgacgaggaccgggcctgtgggttctgccagtctactactggccatgaaccagaaatggttgaacttgttaacattgagcccgtgtgtgtgagaggtggcttatacgaggttgacgtgacacagggagaatgttacccggtgtactggaatcaggcagacaagatcccagtgatgcggggtcagtggtttatagacggaacatggcaaccactagaagaggaggagtctaatctaatcgagcaggaacatctgaactgttttagaggacaacagatgcaggaaaatttcgacatcgaggtatctaagagcatcgacggaaaggatgccgtccattccttcaaactgtctaggaaccatgtggactggcacagcgtggatgaggtctacctttatagcgatgccacaacgtctaaaatcgcccgaacagtgacacagaagttaggtttcagtaaggcctcctctagcgggacacggctccatcgcggctatgtggaagaagccacactggaagacaaaccctcccagacaacacacatagttttcgtggtgcacgggataggacaaaaaatggatcaaggcagaataataaaaaacacagctatgatgcgggaggcagcccgcaagatcgaagaaaggcacttcagcaaccacgctacgcacgtggaatttctgcccgttgaatggcggtctaaactgacactagacggggatacggtggattcgataaccccggacaaggtccgtgggttaagagatatgctgaacagctccgccatggacatcatgtattacactagccctctgtaccgggatgagctggtaaaaggcctccagcaagagctgaaccgcctctatagcctcttctgcagtcggaatccagacttcgaggaaaaggggggtaaggtgtcaatagtgagtcattcacttggttgtgttatcacctatgacattatgaccgggtggaaccccgttcgtctctatgaacagctattacagaaagaggaagagctgcccgacgagcgctggatgtcttatgaggagcgccacttgctcgacgaactttacatcaccaaacggcgattaaaggaaatagaagaaagattacatgggcttaaggctagttctatgacccaaactcctgcgttaaagttcaaagtcgaaaacttcttctgcatgggtagtccattagctgtatttcttgccttacgcggaattcggccggggaacacaggctctcaggaccatatactgccacgcgaaatttgcaatagactgttgaacatctttcacccgaccgaccccgtcgcatataggctggagccgctgatactgaaacactatagtaatattagcccagtgcagattcactggtacaacactagcaaccccttgccttatgaacacatgaagccctctttcctgaacccagctaaggaacccactagcgtaagcgagaacgaagggatctccaccatccccagccccgttaccagccccgtcctgagccgcagacactacggcgagagtattacaaatattggcaaagctagcatcctgggtgctgcaagcattggtaagggtctgggtggaatgctgttctctaggttcggacggtctagcactacccaatcttccgaaacctcaaaggatagcatggaagatgagaaaaagcctgtagcgtcaccatctgcgaccactgttggtacacagacactgccacattccagcagtgggttcctggactccgcctatttccgcctgcaggagtcgttctttaacttgccacaattactgttccctgagaacgtaatgcagaacaaagataatgctctggtcgagctagaccatcggattgactttgaactgagggagggtctcgtggagagtaggtactggtcagcggtaacctcccacacagcgtactggtcaagcttagacgtggctctctttcttcttactttcatgtacaagcatgaacatgacgatgacgcaaagcccaacctggacccgatttag

SEQ ID NO: 60775 - DNA, 2316 bp, Artificial Sequence
  derived and/or modified sequence
atgaactaccccggtagaggctcgcccagatcccctgagcacaacggtagggggggagggggtggcgcatgggagctagggtctgatgccagacccgcattcgggggcggagtttgttgcttcgaacatttaccgggtggggaccccgatgacggagacgtgcccttggctttgctccggggagagcctggactccacctagcaccaggcaccgatgaccacaaccatcatctcgctctcgatccctgtctcagcgatgaaaactacgacttttcatcagccgaaagcggctccagccttcggtactattccgaaggagaatcaggcggcggtggttcatctctcagtttgcatccacctcagcagccacctctggtgccaactaacagtggagggggcctctatgaagtagacgtaacgcagggagagtgctaccccgtgtattggaaccaggcagataaaatccctgtgatgagagggcagtggttcatcgatgggacttggcagccattagaagaggaggaatctaacttaatcgagcaggaacatttgaattgttttcgaggacagcagatgcaagaaaacttcgatattgaagtctcgaaatccatcgatgggaaggatgccgtccatagttttaaactgtccaggaaccatgtcgattggcactcagtcgatgaagtgtacctctatagcgacgccacgacttccaaaattgcaagaacagttacccagaagttaggctttagtaaagcatcatcgagcggaacacgtctccataggggatatgtagaagaagctaccttggaagacaagccaagccagaccacccacatcgtgtttgtcgttcatggtattggacagaaaatggatcaggggagaatcatcaagaacacagccatgatgagagaggctgcacgcaagatcgaggaaaggcattttagtaatcatgctacacatgtcgagttccttcccgtggagtggcgctcaaagttaacccttgacggggacactgtagatagtataaccccagataaggtgcgcgggctacgcgacatgctgaactcttccgcgatggatattatgtactatacttcaccactttatcgagacgaactcgtgaagggcctgcagcaggaacttaatagactctactcattgttttgttccaggaatcctgactttgaagagaagggaggcaaggtctctatcgtttctcacagcttggggtgcgtaattacatatgatattatgaccggatggaaccccgtgcggttatacgagcaattgctgcaaaaggaagaggagcttcccgacgagcggtggatgagttacgaggagcgccatttactagacgagctgtatatcacaaagagaagactgaaagagatcgaggagagactgcacggtctgaaagcatcgtcaatgacgcagacccccgctttgaaatttaaagtcgaaaatttcttctgtatgggctccccccttgctgttttcctcgcattgcgcggcatacggcctggtaacactgggtcgcaggaccacatcttgccaagagagatctgcaataggcttctcaatatcttccacccaaccgaccctgtggcatacaggttagagccactcatcttgaagcattacagcaacatctctccagtacagatccactggtataacaccagcaacccgctaccatacgaacacatgaaaccttcgtttctcaaccctgccaaagaacctaccagtgtcagcgaaaacgagggaattagcacaataccttctccggtgacaagcccagtactgtcccgacgacattacggagaatccataaccaacatcggcaaggcttcgatcctgggggccgccagtataggtaaaggcctggggggtatgctgttttcacgatttggcaggtcttccacaacccagagcagcgagactagcaaagattcaatggaagatgaaaagaagcccgtggcatctcctagtgccactacggtgggtactcagacactcccacacagtagctcagggttcctggactctgcctattttcggctgcaggagtctttttttaacttgccccagctcctcttcccggaaaacgtaatgcagaataaggacaatgctctcgtggaactggatcatagaattgattttgaactgcgggagggtctcgtcgaaagccgctactggtccgcagttacgtcccacacggcctactggagctccctggacgtagcgttgttcttgttaacctttatgtacaagcacgagcacgacgatgatgcgaaaccaaatctggaccctatttag

SEQ ID NO: 60776 - DNA, 2703 bp, Artificial Sequence
  derived and/or modified sequence
atgaactacccaggccggggcagccccaggagccctgagcacaacggccggggcggcggcggcggggcctgggagctgggcagtgatgcccggcctgccttcggcggcggcgtgtgctgctttgagcacctgcctggaggagaccctgatgatggagatgtgcccctggccctgctgcggggggagcccggcctgcacctggcccctggaacagatgaccacaaccaccacctggccctggacccctgcctgagtgatgaaaattatgacttcagcagcgctgagagcggcagcagcctgcgctactacagcgagggggagagcggcggcggcggcagcagcctgagcctgcaccccccccagcagccccccctggtgcccaccaacagcggcggcggcggggccaccggcggcagccctggagagaggaagaggacccggctgggcggccctgctgcccggcacagatatgaggtggtgacagagctgggccctgaggaggtgcgctggttctacaaggaggacaagaagacctggaagcccttcatcggctatgacagcctgcgcatcgagctggccttccgcaccctgctgcagaccactggagcccggccccagggcggggacagagatggagaccacgtgtgcagccccactggacctgccagcagcagtggagaagatgatgatgaagatcgggcctgtggcttctgccagagcaccaccggccacgagcctgagatggtggagctggtgaacatcgagcctgtgtgtgtgcggggcggcctgtatgaggtggatgtgacccagggcgagtgctaccctgtgtactggaaccaggccgacaagatccctgtgatgaggggccagtggttcattgatggcacctggcagcccctggaggaggaggagagcaacctgattgagcaggagcacctgaactgcttccggggccagcagatgcaggagaactttgatattgaggtgtccaagagcattgatggcaaggatgctgtgcacagcttcaagctgagcaggaaccacgtggactggcacagcgtggatgaggtgtacctgtacagtgatgccaccaccagcaagatcgccaggacagtgacccagaagctgggcttcagcaaggccagcagcagcggcacccggctgcaccggggctacgtggaggaggccaccctggaggacaagcccagccagaccacccacatcgtgtttgtggtgcatggaattggccagaagatggaccagggccgcatcatcaagaacacagccatgatgagggaggccgccaggaagattgaggagcggcacttcagcaaccacgccacccacgtggagttcctgcctgtggagtggaggagcaagctgaccctggatggagacacagtggacagcatcaccccagacaaggtgcggggcctgcgggacatgctgaacagcagcgccatggacatcatgtactacaccagccccctgtacagagatgagctggtgaagggcctgcagcaggagctgaacagactctacagcctcttctgcagcaggaacccagactttgaggagaagggcggcaaggtgtccatcgtgagccacagcctgggctgcgtcatcacctatgacatcatgacaggctggaaccctgtgcggctgtatgagcagctgctgcagaaggaggaggagctgcctgatgagcgctggatgtcctatgaggagcggcacctgctggatgagctgtacatcaccaagaggcggctgaaggagattgaggagcggctgcacggcctgaaggccagctccatgacccagaccccagccctgaagttcaaggtggagaacttcttctgcatgggcagccccctggccgtgttcctggccctgcggggcatccggcccggcaacacaggcagccaggaccacatcctgccccgggagatctgcaaccggctgctgaacatcttccaccccacagatcctgtggcctaccgcctggagcccctcatcctgaagcactacagcaacatcagccctgtgcagatccactggtacaacaccagcaaccccctgccctatgagcacatgaagcccagcttcctgaacccagccaaggagcccacctctgtgtctgaaaatgaaggcatcagcaccatccccagccctgtgaccagccctgtgctgagccgccgccactatggagagagcatcaccaacatcggcaaggccagcatcctgggcgccgccagcatcggcaagggcctgggcggcatgctgttcagcagatttggccgcagcagcaccacccagagcagcgagaccagcaaggacagcatggaggatgagaagaagcctgtggccagccccagcgccaccaccgtgggcacccagaccctgccccacagcagcagcggcttcctggacagcgcctacttccggctgcaggagagcttcttcaacctgccccagctgctcttcccagaaaatgtgatgcagaacaaggacaatgccctggtggagctggaccacagaattgactttgagctgcgggagggcctggtggagagccgctactggagcgctgtgaccagccacacagcctactggagcagcctggatgtggccctcttcctgctgaccttcatgtacaagcatgaacatgatgatgatgccaagcccaacctggaccccatctag

SEQ ID NO: 60777 - DNA, 2316 bp, Artificial Sequence
  derived and/or modified sequence
atgaactacccaggccggggcagccccaggagccctgagcacaacggccggggcggcggcggcggggcctgggagctgggcagtgatgcccggcctgccttcggcggcggcgtgtgctgctttgagcacctgcctggaggagaccctgatgatggagatgtgcccctggccctgctgcggggggagcccggcctgcacctggcccctggaacagatgaccacaaccaccacctggccctggacccctgcctgagtgatgaaaattatgacttcagcagcgctgagagcggcagcagcctgcgctactacagcgagggggagagcggcggcggcggcagcagcctgagcctgcaccccccccagcagccccccctggtgcccaccaacagcggcggcggcctgtatgaggtggatgtgacccagggcgagtgctaccctgtgtactggaaccaggccgacaagatccctgtgatgaggggccagtggttcattgatggcacctggcagcccctggaggaggaggagagcaacctgattgagcaggagcacctgaactgcttccggggccagcagatgcaggagaactttgacatcgaggtgtccaagagcattgatggcaaggatgctgtgcacagcttcaagctgagcagaaatcatgtggactggcacagcgtggatgaggtgtacctgtacagtgatgccaccaccagcaagatcgccaggacagtgacccagaagctgggcttcagcaaggccagcagcagcggcacccggctgcaccggggctacgtggaggaggccaccctggaggacaagcccagccagaccacccacatcgtgtttgtggtgcacggcatcggccagaagatggaccagggccgcatcatcaagaacacagccatgatgagggaggccgccaggaagattgaggagcggcacttcagcaaccacgccacccacgtggagttcctgcctgtggagtggaggagcaagctgaccctggatggagacacagtggacagcatcaccccagacaaggtgcggggcctgcgggacatgctgaacagcagcgccatggacatcatgtactacaccagccccctgtacagagatgagctggtgaagggcctgcagcaggagctgaaccggctgtacagcctcttctgcagcagaaatccagactttgaggagaagggcggcaaggtgtccatcgtgagccacagcctgggctgtgtgatcacctatgacatcatgacaggctggaaccctgtgcggctgtatgagcagctgctgcagaaggaggaggagctgcctgatgagcgctggatgtcctatgaggagcggcacctgctggatgagctgtacatcaccaagaggcggctgaaggagattgaggagcggctgcacggcctgaaggccagctccatgacccagaccccagccctgaagttcaaggtggagaacttcttctgcatgggcagccccctggccgtgttcctggccctgcggggcatccggcccggcaacacaggcagccaggaccacatcctgccccgggagatctgcaaccggctgctgaacatcttccaccccacagatcctgtggcctaccgcctggagcccctcatcctgaagcactacagcaacatcagccctgtgcagatccactggtacaacaccagcaaccccctgccctatgagcacatgaagcccagcttcctgaacccagccaaggagcccacctctgtgtctgaaaatgaaggcatcagcaccatccccagccctgtgaccagccctgtgctgagcagaagacactacggggagagcatcaccaacatcggcaaggccagcatcctgggcgccgccagcatcggcaagggcctgggcggcatgctgttcagccgcttcggccgcagcagcaccacccagagcagcgagaccagcaaggacagcatggaggatgagaagaagcctgtggccagccccagcgccaccaccgtgggcacccagaccctgccccacagcagcagcggcttcctggacagcgcctacttccggctgcaggagagcttcttcaacctgccccagctgctcttcccagaaaatgtgatgcagaacaaggacaatgccctggtggagctggaccacagaattgactttgagctgcgggagggcctggtggagagccgctactggagcgctgtgaccagccacacagcctactggagcagcctggatgtggccctcttcctgctgaccttcatgtacaagcatgaacatgatgatgatgccaagcccaacctggaccccatctag

SEQ ID NO: 60778 - DNA, 2703 bp, Artificial Sequence
  derived and/or modified sequence
atgaactaccccggccggggcagcccccggagccccgagcacaacgggaggggaggcggagggggggcatgggagctgggatccgacgctcgcccggccttcgggggcggggtgtgttgctttgagcatctaccaggcggcgaccctgacgacggggatgtgccacttgccctcttgaggggagaacccgggttgcatctggcacctggcactgatgaccacaatcatcacctggcactagacccatgtctctcagatgagaattacgacttttcaagcgccgagagtgggagcagtctgcgctattactcagaaggcgaatctggaggaggcgggtcctcattgtcattacatccaccacagcaaccccccctagttccaaccaatagtggaggaggaggcgctacaggaggaagccccggtgaacgtaaacgcacacgcctgggcggtcctgccgctcgacatcgctacgaagtggtcactgagttgggccccgaagaggtgaggtggttctataaggaggacaaaaagacatggaaacctttcatcggctacgactccctgagaatcgagcttgcatttagaactcttctccaaaccaccggcgcgcgcccacagggcggcgaccgcgatggcgaccacgtttgcagtccgacgggaccagcctcctcaagcggggaagatgatgatgaagatcgggcctgtgggttttgtcagtctacaactggacatgaaccggagatggtcgagttggtgaatatagagcctgtctgtgtgcggggcgggctgtatgaagttgatgtgactcaaggcgaatgttacccagtgtattggaaccaagctgacaaaataccggtaatgagaggccagtggtttatcgatggaacttggcagcctctcgaggaagaggaaagcaacctgatcgagcaagagcatctaaactgcttcagaggacaacagatgcaggaaaacttcgacatcgaggtgagtaaatccattgatgggaaggatgcagtgcacagctttaaattgagcaggaatcacgtcgattggcacagcgtggatgaggtctacctgtacagtgacgccaccacctctaaaattgctcgtactgtgactcagaaactaggatttagcaaggcatcctccagtggtaccagactgcaccgggggtacgtggaagaggccaccctagaggataaaccttcgcaaacaactcatatagtatttgtggttcacggaatcggacagaagatggatcagggccgaattattaagaacacagcaatgatgagggaggccgcccggaagattgaagaacgacatttcagtaaccatgccacacacgttgagttcctgccagtcgaatggcgctccaaactcactctggacggtgatactgtggatagtattaccccagataaagtacggggtctcagggacatgctgaactcttcagcaatggatattatgtactacactagtcctctgtaccgcgatgaactagtcaaaggactgcagcaagagctaaataggctgtactctctgttttgcagcaggaaccctgactttgaagaaaaaggtggaaaggtgagcattgtaagtcatagtttagggtgtgtaattacatatgatatcatgaccgggtggaatccagttagactttacgaacagttgcttcaaaaggaagaggaactgcctgatgagagatggatgtcgtacgaagagaggcatctgctggatgagctgtacattacaaaacgccgcctaaaggaaatcgaagaaagactgcacggcctcaaggccagctcaatgactcaaacacctgctctcaaatttaaggttgagaactttttctgtatgggctctcctttggccgtattcctggccctgagaggcattcgccccgggaacacgggttcacaggaccacatccttcctcgagaaatctgtaataggctgttgaatatatttcaccccacggaccctgtggcttacaggctggaacccctgatccttaagcactacagcaacatctcaccagttcagatccattggtataacacctccaaccccctgccatacgaacatatgaagccctctttcctgaacccagctaaagaaccaacctcagttagtgagaacgaaggtatttctacgattccatcacccgttacatcaccagtcttgtcacggcgccactacggcgagtcaataaccaacatcggcaaagctagcatccttggcgcagcctccatcggcaaggggctcggaggaatgctgttctcgaggtttggaaggtccagcacgacacagtcatccgaaacatccaaagattccatggaagacgaaaagaaacccgtggcaagtccttccgcgacaacagttggtacccaaacactgccacacagctcatctggctttctggactccgcctacttcaggctgcaggagtcattctttaacttaccgcagctcttgtttccagaaaatgtcatgcaaaacaaagacaatgcccttgttgagttggatcacaggatcgatttcgaactgcgtgagggtttggtggagtcgagatattggtcagccgtgacttcacataccgcttactggtcctcattggatgtggctctctttttacttacgttcatgtacaaacacgagcatgatgacgacgctaaacccaacctcgatccaatctag

SEQ ID NO: 60779 - DNA, 2929 bp, Artificial Sequence
  derived and/or modified sequence
ctcgggtcgggatttgaaagattagaaacttcgggtggagagggcggcggcgttgaatgtgtggcggaagcgctgggggtcacggctccgcgcgccgccggacagccggcggcgtctccacagcatgaattacccgggccgcgggtccccacggagccccgagcataacggccgaggcggcggcggcggcgcctgggagctgggctcagacgcgaggccagcgttcggcggcggcgtctgctgcttcgagcacctgcccggcggggacccggacgacggcgacgtgcccctggccctgctgcgcggggaacccgggctgcatttggcgccgggcaccgacgaccacaaccaccacctcgcgctggacccctgcctcagtgacgagaactatgacttcagctccgccgagtcgggctcctcgctgcgctactacagcgagggtgagagcggcggcggcggcagctccttgtcgctgcacccgccgcagcagcctccgctggtcccgacgaactcggggggcggcctctacgaggtggatgtgacccaaggagagtgctacccggtgtactggaaccaggctgataaaataccagtaatgcgtggacagtggtttattgacggcacttggcagcctctagaagaggaagaaagtaatttaattgagcaagaacatctcaattgttttaggggccagcagatgcaggaaaatttcgatattgaagtgtcaaaatccatagatggaaaagatgctgttcatagtttcaagttgagtcgaaaccatgtggactggcacagtgtggatgaagtatatctttatagtgatgcaacaacatctaaaattgcaagaacagttacccaaaaactgggattttctaaagcatcaagtagtggtaccagacttcatagaggttatgtagaagaagccacattagaagacaagccatcacagactacccatattgtatttgttgtgcatggcattgggcagaaaatggaccaaggaagaattatcaaaaatacagctatgatgagagaagctgcaagaaaaatagaagaaaggcatttttccaaccatgcaacacatgttgaatttctgcctgttgagtggcggtcaaaacttactcttgatggagacactgttgattccattactcctgacaaagtacgaggtttaagggatatgctgaacagcagtgcaatggacataatgtattatactagtccactttatagagatgaactagttaaaggccttcagcaagagctgaatcgattgtattcccttttctgttctcggaatccagactttgaagaaaaagggggtaaagtctcaatagtatcacattccttgggatgtgtaattacttatgacataatgactggctggaatccagttcggctgtatgaacagttgctgcaaaaggaagaagagttgcctgatgaacgatggatgagctatgaagaacgacatcttcttgatgaactctatataactaaacgacggctgaaggaaatagaagaacggcttcacggattgaaagcatcatctatgacacaaacacctgccttaaaatttaaggttgagaatttcttctgtatgggatccccattagcagttttcttggcgttgcgtggcatccgcccaggaaatactggaagtcaagaccatattttgcctagagagatttgtaaccggttactaaatatttttcatcctacagatccagtggcttatagattagaaccattaatactgaaacactacagcaacatttcacctgtccagatccactggtacaatacttcaaatcctttaccttatgaacatatgaagccaagctttctcaacccagctaaagaacctacctcagtttcagagaatgaaggcatttcaaccataccaagccctgtgacctcaccagttttgtcccgccgacactatggagaatctataacaaatataggcaaagcaagcatattaggggctgctagcattggaaagggacttggaggaatgttgttctcaagatttggacgttcatctacaacacagtcatctgaaacatcaaaagactcaatggaagatgagaagaagccagttgcctcaccttctgctaccaccgtagggacacagacccttccacatagcagttctggcttcctcgattctgcatatttcagacttcaagaatcgttctttaatctcccacaacttctttttccggaaaatgtaatgcagaataaagataatgccctcgtggagttggatcacaggattgattttgaactcagagaaggccttgtggagagccgctattggtcagctgtcacgtcgcatactgcctattggtcatccttggatgttgccctttttcttttaaccttcatgtataaacatgagcacgatgatgatgcaaaacccaatttagatccaatctgaactctcttgaaggacatgaatggcctaaaactgattttttttttttccgttaaaatgtgtgtgtcaagatacggagatttcagggttaaagtatatttcagttttctttagggcaacatatatttgaatttaaaagcactttatttaaaaaaaaaagaagttttcagttctgaagaagtcatttacagtttgcatcattttaattatgagtctgacaaaaccttctccagagaatcaagcaagacctggatgtgaagaaggtttgggtaaactgcatgtaaaggctacaaatcacaatctgattcctcccaaatataaaggcatatggaacataatgtattaaccaaagtatgttataaatcaaaaatggtcaaggttcagcatattctatatgaagatcacaaggtggtatcgttttagatttctatgaaggctttcatttgtacatccctttgaaaaaatataacagatttaaaatgttttgaattt

SEQ ID NO: 60780 - DNA, 2316 bp, Artificial Sequence
  derived and/or modified sequence
atgaactaccccggccggggcagcccccggagccccgagcacaacggacgcggcggaggcggaggcgcgtgggaactggggagcgacgcaaggccagcctttggtgggggagtctgttgctttgaacacctgccaggcggtgatcctgacgacggtgacgtgcccttggctctgctgaggggcgaacctggtcttcacttggcgccggggaccgatgatcataaccatcacctggcactggacccttgcctttccgatgaaaactacgatttcagttctgcagagtccggctcctcactccggtactattctgagggggaaagcggcggtggcggcagtagcctaagtctccatccgccccagcagcctccactggtgcccaccaatagcggaggcggcctctacgaggtggacgtaacccagggggaatgttatcccgtctactggaatcaggctgataagattccagtcatgaggggccagtggtttattgacgggacctggcagccactggaggaggaggagagtaacctcattgaacaggagcatctgaattgctttcgaggccagcagatgcaggagaactttgacatcgaggtaagtaaatctatcgacggcaaagatgccgttcacagctttaagcttagtcggaatcacgtagactggcactccgtggacgaggtgtacctatatagcgatgccaccacctccaaaattgctcggaccgtgacacagaagctaggcttctcaaaggcttcaagcagcgggactcggctgcacaggggatatgttgaggaggctaccctcgaagacaaacctagccagacgactcacatagtgttcgttgtgcacggcataggccagaagatggatcaggggcgcatcataaagaatacagctatgatgcgagaggctgccaggaagattgaggagcgacattttagcaatcatgcaactcacgtcgagtttctgcccgtagaatggcgctcaaaactgacacttgacggagatacagtcgattcaatcaccccagataaagttcggggactgcgggacatgctgaactcctcagcgatggacatcatgtattatacgagcccactgtatagggacgagctggtcaagggactgcaacaagagttaaaccggctgtattcgttgttttgttcccgtaatccagattttgaggaaaagggtggtaaggtgagtattgtgagtcacagtttaggctgcgtgataacatatgacatcatgaccggctggaacccagtccgcctgtacgaacagctgctccagaaggaggaggagttaccagacgagcggtggatgtcctatgaggaaaggcacctgcttgacgagctgtacatcacgaagcggcgccttaaggaaattgaggagcggctccacgggttgaaggcctcatctatgactcagaccccggccctcaagtttaaagtagagaactttttctgcatgggctctccgctggccgtattcctggctctgaggggaatacggcccggcaacacggggagccaggaccacatcctgcctagggaaatatgtaacagactcctgaacatctttcatcccaccgaccccgtggcgtacaggctagagccattgattctcaagcattactctaacatttcgcccgtgcagattcattggtacaacacctccaaccctctgccctacgagcacatgaagcccagcttcttaaatcccgccaaagagccaaccagcgtatcagagaatgaaggcatatccacaatcccttcacctgtgacctctcccgtcctgtcgcgccgccactacggagaaagcatcactaatatcggaaaagcgtcaatcttgggagcggcttccataggcaagggtttagggggcatgttgttctccaggtttggtcggtcatccacgacacaatcctcagagacctcgaaggattcaatggaagatgagaagaagcctgtcgcctcccctagtgctaccaccgttggtacccaaaccctgccacattcgtcttctggattcctcgattccgcttactttagactacaggagtcgttcttcaaccttcctcaacttctttttcccgaaaacgtgatgcagaacaaggacaacgcacttgtggaactcgatcacagaatcgatttcgagctgcgcgaggggctagttgaatctagatattggagtgccgtcacatctcacactgcctactggtcatctctagacgtcgccttgttcctgttgaccttcatgtacaagcatgaacacgacgatgacgcaaagccgaatctcgatcctatctag

SEQ ID NO: 60781 - DNA, 2703 bp, Artificial Sequence
  derived and/or modified sequence
atgaactatccgggtcggggtagccctcgctccccagagcacaatggtagggggggaggcggtggagcctgggagctcggcagcgacgcgcgtcccgcatttggaggaggcgtatgctgctttgagcacttacccggtggcgatccagacgatggtgacgtgcctctggcactcctgcggggagagcccggactccatctcgcaccgggaaccgatgaccacaaccaccatcttgctctggacccatgtctgtccgacgagaattacgatttttctagtgccgaaagcggctcatccctgaggtattactctgagggtgagtcagggggaggaggcagcagtttgtccctccatcccccacaacagcctccactggtgcctactaattcaggtggagggggagctacaggtgggagtcccggagagaggaagcgcacccgattgggtggtcccgctgcgaggcacaggtacgaagttgttaccgagctcggccctgaggaggtgcggtggttttacaaggaggataaaaagacctggaagccttttattggctacgattctctccggatagaattggcgtttaggacacttctgcagacaaccggtgctagaccccagggaggagatagagatggcgaccatgtttgctcacctacaggtccagcatcctcaagcggggaagacgacgacgaagatagagcatgtggattctgtcagagtactacaggtcacgaacctgaaatggtcgagttggtgaacattgaaccagtctgtgtcaggggtgggctgtatgaagttgatgttactcagggcgaatgctatccagtttattggaatcaggctgacaaaatccccgtcatgagagggcagtggtttatcgatggaacttggcaaccactggaagaggaagagtctaatttgattgagcaagagcacctcaattgctttagagggcagcagatgcaggaaaattttgacatagaggttagtaagagtatcgacggcaaagatgccgtgcactcattcaagttatcacggaatcatgtggactggcattccgtcgacgaggtttacctttattcagatgcaacgaccagcaagatcgcgcgtactgtcacacagaagctcggattttctaaagcatctagctccggaacgaggctgcaccgtggatatgtggaagaagcgacactggaggacaaaccaagtcaaaccactcatattgtattcgtggtacacggtattgggcagaaaatggaccagggtaggatcattaagaatacagcaatgatgcgtgaagccgctcgaaagattgaggaacgtcacttttcaaaccacgccacgcacgtagagttcctacccgttgaatggcgaagcaaactgactctggacggggacacagttgactcaattacccccgataaagttcgcggtctgagggacatgttgaactccagtgccatggatataatgtattacacatccccgttgtatagagatgaactggtcaaggggttgcagcaggaactaaatcgcctgtacagccttttctgttctcggaacccagacttcgaagagaaaggaggcaaggtatctattgtctctcacagcctgggatgtgtgatcacttatgacataatgaccgggtggaacccagtgcgcctgtacgaacaactcctgcaaaaagaggaagagctgccagatgaacggtggatgagctacgaggagcgacacctcctcgacgaactgtacataacaaagaggagactaaaggaaatcgaggaacgtttgcacggtctgaaggcgtcaagtatgacccagacacccgcactgaagttcaaagtcgagaatttcttttgtatggggtctcctttagccgtgttccttgctctgcgaggcatacgaccaggaaacaccggctcccaggaccatattctgcccagagaaatatgtaaccgcctgcttaacatatttcatcccacggatccagttgcatacaggctggaaccactgatactcaagcattatagcaacatctcacccgtacaaattcactggtataatacctctaatccacttccgtatgagcacatgaaaccatcttttctgaatccagccaaagagcccacgtctgtgagcgagaatgagggcatcagcacgatcccatcgcccgtaacctccccagtcttatccagacggcattacggcgaatctatcaccaacataggaaaggcgtctatcctgggagcagcctccattgggaaaggcctagggggtatgctcttttccaggtttggaagaagctcaactacccagagctctgagacctcgaaagattctatggaagacgagaagaagccagttgcatccccttctgccacaactgtgggcacacaaacgctgccccactcctcttctggtttcttagacagtgcatattttagactccaggagtccttcttcaatctgccgcagctgctctttcccgaaaacgtgatgcagaacaaagacaacgctctggttgagctggaccataggatagatttcgaattaagggagggactcgtcgagagtcgctactggtccgcagtaacctcccatacagcatattggtcttccctcgatgtcgccttattcttgttaaccttcatgtataagcacgagcatgatgacgacgctaaacctaacctggatccgatttag

SEQ ID NO: 60782 - DNA, 2316 bp, Artificial Sequence
  derived and/or modified sequence
atgaactaccctggccgtgggtctcctaggagcccagaacacaacgggagaggcggaggcggtggcgcttgggagcttggcagcgatgctagacccgcttttggaggtggcgtgtgttgcttcgaacatctgccgggtggagaccccgatgacggagacgttcccctggccctccttagaggggaaccgggactacacctcgcaccgggaaccgatgaccacaaccaccacctcgctttggacccttgtctgtccgacgagaattacgatttctctagcgcagagagcgggagcagcttacgatactatagtgagggcgaatcagggggtgggggaagcagtctgtcgctgcacccccctcagcaacccccactcgtgccaacaaattctggaggcggtctgtatgaggtcgacgtaacccagggcgaatgctacccagtctactggaatcaggctgataagattcctgtgatgcggggtcaatggtttatcgatggtacctggcagcctttagaagaggaagagtcaaatctcattgagcaggagcacctcaattgttttcgtggccaacagatgcaggagaatttcgacatcgaagtgtcaaagtccattgacggtaaagacgccgttcacagctttaaactgtccagaaaccacgttgattggcacagtgtagatgaagtgtacttgtatagtgatgccaccaccagcaagattgcccgtactgtgacccaaaagctgggtttcagcaaagcctcttccagtggcacaagactgcaccggggatatgtagaggaagccaccctggaggataaaccttcccaaactacacatatcgtttttgtggtgcatgggattggtcagaaaatggaccagggcagaataataaagaacaccgcaatgatgagggaggctgccaggaaaatcgaagagcggcatttttcaaaccacgcgacacacgtcgagttccttcctgtggagtggcgaagtaaactcaccctagacggggatacggtagactcaataacccctgataaagtacggggactgagggatatgttgaactcaagcgctatggatatcatgtactacacgtcaccattgtatcgtgacgaactcgttaaaggtctgcagcaggagctgaatcggctgtactcactcttttgtagtcggaatccggactttgaggaaaagggaggcaaggtctcaatagtctcccacagtctcggctgcgttataacatatgacattatgaccggttggaaccctgtaagactttacgaacagcttcttcagaaggaggaagagctcccagatgagagatggatgagctacgaagaaaggcatctcttggatgagctatacatcactaagcgaaggctgaaggaaattgaagagagacttcacgggctcaaggctagttctatgactcagacgcccgctcttaaattcaaagtcgagaattttttctgtatggggtcacctctcgcagtgttcttggcccttagggggatccggcctggcaacactgggagtcaggaccatatcttgcctagggaaatatgtaaccgcctattgaacatttttcaccctactgacccagttgcttaccgactagaacctctgattctaaagcactactccaacatttcaccagtgcaaatccattggtacaacaccagtaatccacttccgtacgagcatatgaagccctctttcctgaaccccgctaaggaacctacctctgtctccgagaatgaggggatctccaccatccccagtcccgttacttctccagtcctgagccgtcgccattacggcgaaagcatcacgaacataggcaaagcctctatccttggtgcggcttcgatcggtaagggccttgggggaatgcttttctcacgattcgggaggagttcgaccacccaatcaagtgagacaagcaaagactctatggaagacgagaagaaacccgtggcctctccttcggctactactgttgggacacagacgctgccgcatagtagcagcgggtttctcgactccgcttattttcgtcttcaggagtcatttttcaacctgccccagcttctctttcccgagaatgtgatgcagaacaaggacaacgctctggtcgagcttgaccataggatcgattttgaattacgtgaaggcctggtggagagcagatactggagcgccgtgacatcccacacggcatactggtccagcctcgatgtggctttatttttactgaccttcatgtataagcacgagcacgatgacgacgctaaacctaacctagaccccatttag

SEQ ID NO: 60783 - DNA, 5503 bp, Artificial Sequence
  derived and/or modified sequence
atgaattacccgggccgcgggtccccacggagccccgagcataacggccgaggcggcggcggcggcgcctgggagctgggctcagacgcgaggccagcgttcggcggcggcgtctgctgcttcgagcacctgcccggcggggacccggacgacggcgacgtgcccctggccctgctgcgcggggaacccgggctgcatttggcgccgggcaccgacgaccacaaccaccacctcgcgctggacccctgcctcagtgacgagaactatgacttcagctccgccgagtcgggctcctcgctgcgctactacagcgagggtgagagcggcggcggcggcagctccttgtcgctgcacccgccgcagcagcctccgctggtcccgacgaactcggggggcggcggcgcgacaggagggtcccccggggaaaggaaacgtacccggcttggcggcccggcggcccggcaccgctatgaggtagtgacggagctgggcccggaggaggtacgctggttctacaaggaggacaagaagacctggaagcccttcatcggctacgactcgctccgcatcgagctcgccttccggaccctgctgcagaccacgggtgcccggccccagggcggggaccgggacggcgaccatgtgtgctcccccacgggcccagcctccagttccggagaagatgacgatgaggaccgcgcctgcggcttctgccagagtacgacggggcacgagccggagatggtggagcttgtgaacatcgagcctgtgtgcgtgcggggcggcctctacgaggtggatgtgacccaaggagagtgctacccggtgtactggaaccaggctgataaaataccagtaatgcgtggacagtggtttattgacggcacttggcagcctctagaagaggaagaaagtaatttaattgagcaagaacatctcaattgttttaggggccagcagatgcaggaaaatttcgatattgaagtgtcaaaatccatagatggaaaagatgctgttcatagtttcaagttgagtcgaaaccatgtggactggcacagtgtggatgaagtatatctttatagtgatgcaacaacatctaaaattgcaagaacagttacccaaaaactgggattttctaaagcatcaagtagtggtaccagacttcatagaggttatgtagaagaagccacattagaagacaagccatcacagactacccatattgtatttgttgtgcatggcattgggcagaaaatggaccaaggaagaattatcaaaaatacagctatgatgagagaagctgcaagaaaaatagaagaaaggcatttttccaaccatgcaacacatgttgaatttctgcctgttgagtggcggtcaaaacttactcttgatggagacactgttgattccattactcctgacaaagtacgaggtttaagggatatgctgaacagcagtgcaatggacataatgtattatactagtccactttatagagatgaactagttaaaggccttcagcaagagctgaatcgattgtattcccttttctgttctcggaatccagactttgaagaaaaagggggtaaagtctcaatagtatcacattccttgggatgtgtaattacttatgacataatgactggctggaatccagttcggctgtatgaacagttgctgcaaaaggaagaagagttgcctgatgaacgatggatgagctatgaagaacgacatcttcttgatgaactctatataactaaacgacggctgaaggaaatagaagaacggcttcacggattgaaagcatcatctatgacacaaacacctgccttaaaatttaaggttgagaatttcttctgtatgggatccccattagcagttttcttggcgttgcgtggcatccgcccaggaaatactggaagtcaagaccatattttgcctagagagatttgtaaccggttactaaatatttttcatcctacagatccagtggcttatagattagaaccattaatactgaaacactacagcaacatttcacctgtccagatccactggtacaatacttcaaatcctttaccttatgaacatatgaagccaagctttctcaacccagctaaagaacctacctcagtttcagagaatgaaggcatttcaaccataccaagccctgtgacctcaccagttttgtcccgccgacactatggagaatctataacaaatataggcaaagcaagcatattaggggctgctagcattggaaagggacttggaggaatgttgttctcaagatttggacgttcatctacaacacagtcatctgaaacatcaaaagactcaatggaagatgagaagaagccagttgcctcaccttctgctaccaccgtagggacacagacccttccacatagcagttctggcttcctcgattctgcatatttcagacttcaagaatcgttctttaatctcccacaacttctttttccggaaaatgtaatgcagaataaagataatgccctcgtggagttggatcacaggattgattttgaactcagagaaggccttgtggagagccgctattggtcagctgtcacgtcgcatactgcctattggtcatccttggatgttgccctttttcttttaaccttcatgtataaacatgagcacgatgatgatgcaaaacccaatttagatccaatctgaactctcttgaaggacatgaatggcctaaaactgattttttttttttccgttaaaatgtgtgtgtcaagatacggagatttcagggttaaagtatatttcagttttctttagggcaacatatatttgaatttaaaagcactttatttaaaaaaaaaagaagttttcagttctgaagaagtcatttacagtttgcatcattttaattatgagtctgacaaaaccttctccagagaatcaagcaagacctggatgtgaagaaggtttgggtaaactgcatgtaaaggctacaaatcacaatctgattcctcccaaatataaaggcatatggaacataatgtattaaccaaagtatgttataaatcaaaaatggtcaaggttcagcatattctatatgaagatcacaaggtggtatcgttttagatttctatgaaggctttcatttgtacatccctttgaaaaaatataacagatttaaaatgttttgaatttaacttgtttagaaaaactaatgcttaaaacaatatttgaactactgtatttataatttattacctctaattgctttatttcagtgtatgagacattactgttttaatgtttgctttgaacataatttaagaaccagatttattttctatagtgataaacccttttttctcagaactccatctttgtactcttcagatgaatatatagacactgtggcatacattttttttcattaaaaacttatggcttcatacaacactagttcaattttttaaataaactttttattatgttacatgtacttcagagaaagctaaagtttctctaaacttgacacggagtactccataatgggtacatttcattagctttattagaaaactagtaaatgcttttgaataggtagtatgacagctattttaaatgtataaacatttgtgtgccaaacaacatatatgaagggatgtgatgccactaactagtgcacattgtttctcaatgtgccattgagacacaaggcacagtaagtcaggattctgaggcattggaagggttttcttcagctgtaattgtttccacagtgcttttcatctgaggggctcaaagtttaagagtgcattcaataacccatgtactagcttcttgaggtaagtaaataaatcttgttctcatgttacatgttaatacaccaaggcaccaaaacatttaaagtgccatgaattagattacatcagaaatcagaaaagcttggattgagctagtcaccgtggttcacgcctgtaatcccaacacttcgggaggccaagatgggaggatctcttgagcccaggatttcaagaccagcttgggcaacatagtgagaccctcttctctgcaaaaactgacaaaaattagccacttgtagtggtgtacacctgtagtcccagctactcaagaggctgaggtgggaggatcacccgagcccagaagttcaaagctgcagtgagctctgatcacaccaatgcactccagcctgggtgacagagccagaccctgtctctaaaaaacaaaaaagaaaagcttgggttgaagccaggccatattcttttatatgctgttcaatgacttgattcacatgtgaccttttagtagtttgcaaacaataataacagaagttgcaattcataattcagagaaatgaccatgaagccggtgtttccctgcttgatttctatgttcttggattctcacacaaaagaggagttacctagaggggatcagtagccatccctgttgcacacaaccctcacttctgagtggtttccactaggttccacttaaggtgctgtcttttcttaacttgcaaggaattgcttagcttcccaataatcattgtcaaactgggagcaaagttggtcagctgtatctctcacctcctcctttcttcataagatagtagaatctgtggcttacttgtaggttttacttagtgcttcagtactgttggctgttttggccttttgctgaatttgcacaacaacataaagcacttctttttaatgtttaaaaaaaattccaaggctccatgaccaagtatgtgactcactaagaaacccttgctataaaaggcttttgatgaaatcttagcaaagctaaattatctctaacttagagattcctatgaactcaggtcattttcatagcctgtttattttgtaggtctaatttagttctcaggaaaattaaactcatgctatatgactgtatcgttaaaggtacttgagcgtatgttgctgtaggtggtatgacactcaaatgcataagaacttgaagggatttattcttaaccactagaatatgaagagccctttttacctgagaagagtgaaattatgtcagaccttttaatttgatatcactgagtaaaaggtatgttcctatagccataggaatatgtctgcttcctttttttcatgttgagaaaacagtcaaatttaaccatttggagtttatttgaattcttggaaagagcaatattcaaaaccttttcaaaaataagatattctggactactggatggatgttttgttttcagttcatttttcatcagtagagatggtgatttcggttttgtagtatccttgtttctatgtctgtgcatgttaacattggatgtatttgtatatacttaattaatatacagactgtgtgtcattctggcttgattagaagctaagtcagttactgagtaacattttgcaactttattccagcaagtactaaatcggccaaaaaaagttttgtttttgataccattaaaattttattctct

SEQ ID NO: 60784 - DNA, 2703 bp, Artificial Sequence
  derived and/or modified sequence
atgaactaccccggcagaggcagccccagaagccccgagcacaacggcagaggcggcggcggcggcgcctgggagctgggcagcgacgccagacccgccttcggcggcggcgtgtgctgcttcgagcacctgcccggcggcgaccccgacgacggcgacgtgcccctggccctgctgagaggcgagcccggcctgcacctggcccccggcaccgacgaccacaaccaccacctggccctggacccctgcctgagcgacgagaactacgacttcagcagcgccgagagcggcagcagcctgagatactacagcgagggcgagagcggcggcggcggcagcagcctgagcctgcaccccccccagcagccccccctggtgcccaccaacagcggcggcggcggcgccaccggcggcagccccggcgagagaaagagaaccagactgggcggccccgccgccagacacagatacgaggtggtgaccgagctgggccccgaggaggtgagatggttctacaaggaggacaagaagacctggaagcccttcatcggctacgacagcctgagaatcgagctggccttcagaaccctgctgcagaccaccggcgccagaccccagggcggcgacagagacggcgaccacgtgtgcagccccaccggccccgccagcagcagcggcgaggacgacgacgaggacagagcctgcggcttctgccagagcaccaccggccacgagcccgagatggtggagctggtgaacatcgagcccgtgtgcgtgagaggcggcctgtacgaggtggacgtgacccagggcgagtgctaccccgtgtactggaaccaggccgacaagatccccgtgatgagaggccagtggttcatcgacggcacctggcagcccctggaggaggaggagagcaacctgatcgagcaggagcacctgaactgcttcagaggccagcagatgcaggagaacttcgacatcgaggtgagcaagagcatcgacggcaaggacgccgtgcacagcttcaagctgagcagaaaccacgtggactggcacagcgtggacgaggtgtacctgtacagcgacgccaccaccagcaagatcgccagaaccgtgacccagaagctgggcttcagcaaggccagcagcagcggcaccagactgcacagaggctacgtggaggaggccaccctggaggacaagcccagccagaccacccacatcgtgttcgtggtgcacggcatcggccagaagatggaccagggcagaatcatcaagaacaccgccatgatgagagaggccgccagaaagatcgaggagagacacttcagcaaccacgccacccacgtggagttcctgcccgtggagtggagaagcaagctgaccctggacggcgacaccgtggacagcatcacccccgacaaggtgagaggcctgagagacatgctgaacagcagcgccatggacatcatgtactacaccagccccctgtacagagacgagctggtgaagggcctgcagcaggagctgaacagactgtacagcctgttctgcagcagaaaccccgacttcgaggagaagggcggcaaggtgagcatcgtgagccacagcctgggctgcgtgatcacctacgacatcatgaccggctggaaccccgtgagactgtacgagcagctgctgcagaaggaggaggagctgcccgacgagagatggatgagctacgaggagagacacctgctggacgagctgtacatcaccaagagaagactgaaggagatcgaggagagactgcacggcctgaaggccagcagcatgacccagacccccgccctgaagttcaaggtggagaacttcttctgcatgggcagccccctggccgtgttcctggccctgagaggcatcagacccggcaacaccggcagccaggaccacatcctgcccagagagatctgcaacagactgctgaacatcttccaccccaccgaccccgtggcctacagactggagcccctgatcctgaagcactacagcaacatcagccccgtgcagatccactggtacaacaccagcaaccccctgccctacgagcacatgaagcccagcttcctgaaccccgccaaggagcccaccagcgtgagcgagaacgagggcatcagcaccatccccagccccgtgaccagccccgtgctgagcagaagacactacggcgagagcatcaccaacatcggcaaggccagcatcctgggcgccgccagcatcggcaagggcctgggcggcatgctgttcagcagattcggcagaagcagcaccacccagagcagcgagaccagcaaggacagcatggaggacgagaagaagcccgtggccagccccagcgccaccaccgtgggcacccagaccctgccccacagcagcagcggcttcctggacagcgcctacttcagactgcaggagagcttcttcaacctgccccagctgctgttccccgagaacgtgatgcagaacaaggacaacgccctggtggagctggaccacagaatcgacttcgagctgagagagggcctggtggagagcagatactggagcgccgtgaccagccacaccgcctactggagcagcctggacgtggccctgttcctgctgaccttcatgtacaagcacgagcacgacgacgacgccaagcccaacctggaccccatctag

SEQ ID NO: 60785 - protein, 423 aa, Artificial Sequence
  derived and/or modified sequence
MNYSITVSIVMGIPTVKREVKSYLIETLHSLIDNLYPEEKLDCVIVVFIGETDIDYVHGVVANLEKEFSKEISSGLVEVISPPESYYPDLTNLKETFGDSKERVRWRTKQNLDYCFLMMYAQEKGIYYIQLEDDIIVKQNYFNTIKNFALQLSSEEWMILEFSQLGFIGKMFQAPDLTLIVEFIFMFYKEKPIDWLLDHILWVKVCNPEKDAKHCDRQKANLRIRFRPSLFQHVGLHSSLSGKIQKLTDKDYMKPLLLKIHVNPPAEVSTSLKVYQGHTLEKTYMGEDFFWAITPIAGDYILFKFDKPVNVESYLFHSGNQEHPGDILLNTTVEVLPFKSEGLEISKETKDKRLEDGYFRIGKFENGVAEGMVDPSLNPISAFRLSVIQNSAVWAILNEQRVFSGWWQKSRDKAEGPQAPLLF

SEQ ID NO: 60786 - DNA, 1272 bp, Artificial Sequence
  derived and/or modified sequence
atgaattattcaatcacagttagcattgtgatgggcataccgaccgtcaagcgggaagttaaaagctatctgattgaaacactccattcactgattgataacctctacccagaggaaaaacttgactgtgtcatcgtggtattcattggagagacagacatcgattatgtacacggcgttgtggcaaacttggaaaaagaattctctaaagaaatcagcagcgggttggtggaggtgatatcacccccagaaagctactacccggacctcacaaacctgaaggagacattcggagacagcaaagagagagtgagatggagaaccaagcagaaccttgattattgcttcttgatgatgtacgcacaggagaaaggcatttactatatccagctcgaagacgatatcattgtcaagcagaattacttcaacactatcaagaacttcgcattacagctgagctctgaagagtggatgattttggagttttcccagcttggctttattggaaaaatgtttcaagcccccgaccttacactcatcgtggaattcatctttatgttctataaagagaaacctatagattggctgttagatcacatactgtgggtgaaggtgtgtaaccctgagaaagatgctaaacactgcgaccgtcagaaggccaacctccgcatacggttccggccgtctctcttccaacacgtcggactacactccagtctgtccggaaaaattcagaagctcacggataaagattacatgaaacctctgcttctgaagatccacgtgaatccgcccgctgaggttagcacaagcctaaaagtataccagggacacactttggagaaaacatatatgggcgaggactttttctgggctataacacccattgctggagactacattctttttaagttcgataagcccgtgaatgtagagagttacttatttcattcagggaatcaggagcacccaggggacatactgctcaatacaacagtggaggtattgccgtttaaatctgaagggctggaaatatccaaggagaccaaagacaagaggctggaggatggctacttcaggatcggtaaatttgaaaatggagttgccgagggtatggtcgacccttccttaaacccaatcagcgctttcagactgtctgtgatccagaacagcgccgtctgggcaatccttaatgaacagcgcgtgttctctggctggtggcagaaaagtagagacaaggctgagggtcctcaggcacccttattgttttag

SEQ ID NO: 60787 - DNA, 1272 bp, Artificial Sequence
  derived and/or modified sequence
atgaactacagcatcaccgtgtccatcgtgatgggcatccccaccgtgaagcgggaggtgaagagctacctgattgagaccctgcacagcctgattgacaacctgtacccagaggagaagctggactgtgtgattgtggtgttcatcggggagacagacatcgactatgtgcacggcgtggtggccaacctggagaaggagttcagcaaggagatcagcagcggcctggtggaggtgatcagccccccagagagctactacccagacctgaccaacctgaaggagacctttggagacagcaaggagcgggtgcgctggaggaccaagcagaacctggactactgcttcctgatgatgtatgcccaggagaagggcatctactacatccagctggaggatgacatcatcgtgaagcagaactacttcaacaccatcaagaactttgccctgcagctgagcagcgaggagtggatgatcctggagttcagccagctgggcttcatcggcaagatgttccaggccccagacctgaccctcatcgtggagttcatcttcatgttctacaaggagaagcccatcgactggctgctggaccacatcctgtgggtgaaggtgtgcaaccctgagaaggatgccaagcactgtgaccggcagaaggccaacctgcgcatccgcttccggcccagcctcttccagcacgtgggcctgcacagcagcctgagcggcaagatccagaagctgacagacaaggactacatgaagcccctgctgctgaagatccacgtgaaccccccagctgaggtgtccaccagcctgaaggtgtaccagggccacaccctggagaagacctacatgggagaggacttcttctgggccatcacccccatcgccggggactacatcctcttcaagtttgacaagcctgtgaatgtggagagctacctgttccacagcggcaaccaggagcaccctggggacatcctgctgaacaccaccgtggaggtgctgcccttcaagtctgagggcctggagatcagcaaggagaccaaggacaagaggctggaggatggctacttcagaattggcaagtttgaaaatggagtggccgagggcatggtggaccccagcctgaaccccatcagcgccttccggctgagcgtcatccagaacagcgctgtgtgggccatcctgaatgagcagagggtcttcagcggctggtggcagaagagccgggacaaggccgagggcccccaggcccccctgctcttctag

SEQ ID NO: 60788 - DNA, 3709 bp, Artificial Sequence
  derived and/or modified sequence
agttgtaaaatacagtttgctgtttatacttcgcagccattcattttttagtgtgaagtttaatgtctttcatttttatcagttctttttttcttatggttaagccatgtgaaaatgaattacagtattacagtttcaatagtcatgggcattcccacagtgaagagagaagttaaatcttacctcatagaaactcttcattcccttattgataacctgtatcctgaagagaagttggactgtgttatagtagtcttcataggagagacagatattgattatgtacatggtgttgtagccaacctggagaaagaattttctaaagaaatcagttctggcttggtggaagtcatatcaccccctgaaagctattatcctgacttgacaaacctaaaggagacatttggagactccaaagaaagagtaagatggagaacaaagcaaaacctagattactgttttctaatgatgtatgctcaagaaaagggcatatattacattcagcttgaagatgatattattgtcaaacaaaattattttaataccataaaaaattttgcacttcaactttcttctgaggaatggatgattctagagttttcccagctgggcttcattggtaaaatgtttcaagcgccggatcttactctgattgtagaattcatattcatgttttacaaggagaaacccattgattggctcctggaccatattctctgggtgaaagtctgcaaccctgaaaaagatgcaaaacattgtgatagacagaaagcaaatctgcgaattcgcttcagaccttcccttttccaacatgttggtctgcactcatcactatcaggaaaaatccaaaaactcacggataaagattatatgaaaccattacttcttaaaatccatgtaaacccacctgcggaggtatctacttccttgaaggtctaccaagggcatacgctggagaaaacttacatgggagaggatttcttctgggctatcacaccgatagctggagactacatcttgtttaaatttgataaaccagtcaatgtagaaagttatttgttccatagcggcaaccaagaacatcctggagatattctgctaaacacaactgtggaagttttgccttttaagagtgaaggtttggaaataagcaaagaaaccaaagacaaacgattagaagatggctatttcagaataggaaaatttgagaatggtgttgcagaaggaatggtggatccaagtctcaatcccatttcagcctttcgactttcagttattcagaattctgctgtttgggccattcttaatgagcagagagttttctcgggctggtggcagaagtcaagagacaaagcagaaggacctcaggcaccattgctgttttaaggtagagggggctgcatgagaaggaatgcacatggctttgaggagctgagagaggccttggctaacagcaaaggagctgggaactgcagtcctacagccacgggaactgaattcagcccataagctcattcataggcttggaaaggcattcatctccagtctccagataagacccagcctggccaacactttgaatccagccttgtgagaccctaagccgagaactcacttaagcctgcttggacttctgacctacagaactatgagataataaatcagtggtgttttaagctgctaaatttgtggcaatttgttatgtaggaataggaaatgaatacagtattttaaaagaggtaaagaggaaatcttcatacttgattccctgtagtatgctggatatttcttggtaaatgcatgaataaagtctttagtagcaagtcatgtacctggaccttgttggggatgttctcgccagagatctcaattagtcttcattggacgtttgttggcaaagttgcagcatcttactgagtagcgtttggtaaaggaactgctagaatgagactataggaataggactgaaacagtgtgtaagggatcttttttatttctagaagaggtgttactttatactgatttagactgctctgagcctgtcagaagtaaattcaagaatgattaacagtggtattttagatacattaagagcaaaaataacctttgccttgtagagatcagataatctgtgtatcgagggatttaattttttttaaccaaaacttagtttctctttttatcatctagcacagatcaaatcctgtatgggccagccaaatgtttgtagtttgagaatgttttgcaaatacctctctgcttccaagccattaatagctaatgaagttttattttggtttgtccattaatttttctgcttatttttactgtattgccatgtccttgatacgagacaagtagaactaaaagagagaaaatgagaggttaagactgtcagaagatgagaaatgtgagtcataaccataccttagtgttttaagggaactttatccagtccaatccctttatagaaaaggaacttttccaagttatgttgcagtatttatagtgtgtaaaattttgtttgactttggtagttgtgcattttaaattatgaatcttatatgctacgataactagtatgcttactttctttaatgcatgtgatcatacaatgctaaaaaggtattttttaaagacccaaccaaactgaggattttgttatacatatctgtatcaacacctatatataaactcttcttcttacctgaaacactccttcacccggtttgggcactaactagatcattttcaaaggaacaaacaggaaggagcaagctggcactccagggtgcatctgagctgagaatttagaagacctcattcaagaaagtaaactgagcattgatgggaaagcactttgcgcgaagtaacattcccactgttaatgttgcagtcaaaattgtggaaaaaaaaaagtggtgctaaaattgttctgaaatgaagattgtttgttgtggggaatattttaatactcttggactttagggaggctattttatgtgtcacttgctcctagttgtttcattgtattagtaattagcaaactgtcctggaaccaagggtttggtacttttgcctgattagcattccattatttatttgaaatgctcagtgtttgctcaaatttggtgaaaatatcttttgaagacatattctctgagccttaaaaatggctgctatcgacagtactgtaagatgcactgccagtagatttgatacttttcatttcagtgtaggcagtaatgttttctaagaaagatttagaaatcagcaaagtgtaacaattgtgtttcatttatggaatggaaaaactgaagtgtcccattcagaacactttggaaaggttgtctgcattaggggatgtttctggaagcatcccttagagaagctgcctgaggaatctccttgccaggttgtaccagatttttttttttcttaaatgtattgtatatattttccttaaaatgtcttcattggctgaatgattcctatccgtagtaatattttaggtacttgttggatttttaaaggaagattatttattttcagatttgctgctataattgaaaacctagtaactggtcctgttgattgtgccttcatcactgtttctctgtgccacgaccgttcatgtgtatttgaaataaagaagtttaaaaagccatgttgaattcaagattccttctaataaaaataggtgaaactt

SEQ ID NO: 60789 - DNA, 1272 bp, Artificial Sequence
  derived and/or modified sequence
atgaactacagcatcaccgtgagcatcgtgatgggcatccccaccgtgaagagggaggtaaagagttacctgatcgaaactctccactctctgatcgacaatctctatcctgaggagaagctagactgcgtgatagtggtctttattggcgagacagacatcgactacgtgcatggggtcgtcgcaaacctggagaaggaattttccaaagagatatcctccggtctcgtcgaggtgatctccccacccgagtcctattacccagacctgacgaatctaaaggagacctttggcgattccaaggaaagggtgaggtggcggaccaaacagaacctggactattgcttcctgatgatgtatgcccaggaaaaaggaatctactacatccagctggaagatgatatcattgtgaaacaaaactactttaacaccatcaagaattttgcgttacagttatccagcgaggagtggatgattctcgagttcagtcagttagggttcatcggaaagatgttccaggcaccggacctcactctgatagtcgagttcatcttcatgttctacaaagaaaagccaattgactggctgctggatcatattctgtgggttaaggtgtgcaatcccgaaaaagatgcgaagcactgtgaccggcagaaggccaacctgcgtattagatttcgtccaagcctgttccagcacgtgggcctccactcatcactgtcaggaaagatccagaagttgacagacaaagattatatgaagcccctcttactcaagatccatgtgaaccctcctgctgaggtatccacttccttaaaggtgtatcagggacataccctggaaaaaacatatatgggcgaggacttcttttgggccattaccccaattgctggcgattacattctctttaaattcgataagcccgtgaatgtggagtcctacctgtttcatagcggaaatcaggagcaccctggagacattctgctgaatacaacggtcgaagtcttgccattcaaatctgaggggctggaaattagtaaagaaaccaaggacaaacggttggaggatgggtatttcaggattggcaagtttgaaaacggggtggccgaaggaatggtggatccgtcactaaaccccataagtgccttcagactgagcgtcatccaaaactcagcagtttgggcaatcttgaacgaacaacgcgtgttttcaggatggtggcagaaatcaagggataaggcggagggaccacaggctcctttactgttctag

SEQ ID NO: 60790 - DNA, 1272 bp, Artificial Sequence
  derived and/or modified sequence
atgaattactccatcacagtcagcatagtaatgggcattcctactgttaagcgggaggtgaaaagttacttgattgagacactgcattcgctaattgacaacctgtaccctgaggaaaagctggactgtgttatagtggttttcatcggtgaaaccgatatcgattacgttcatggcgttgtcgctaatctggagaaagagttttcaaaagagatatcatcagggctggtagaagtgatctcccctcctgagtcctactatcccgatctgaccaacctgaaggaaacgttcggggactcgaaggagagggtacgctggcgcacaaagcagaacttggactattgctttctgatgatgtacgcacaggaaaaggggatttattacatccagctagaggacgacattatcgtcaaacagaactattttaatactatcaagaacttcgctctgcaactgagttcagaggaatggatgattctggagttttcgcagctgggatttattggaaaaatgttccaggctcccgacctgacgcttatcgtggaattcatttttatgttctacaaagagaaaccaattgactggctcctggaccacattctttgggtcaaagtgtgtaatcccgagaaggacgccaagcactgcgatagacaaaaagccaaccttaggatccgttttcgaccttccctgttccaacacgtgggcctgcattctagcttaagtggcaaaatccagaaacttactgataaggactatatgaagcccctccttctcaaaatccatgtaaatccgcctgcagaggtgagcacatccctaaaagtgtaccaaggacatacgctggagaaaacgtatatgggcgaagattttttctgggcaataacaccaatcgctggagactatatcttgtttaagtttgataagcctgtgaacgtggagtcctatttgtttcattccggaaatcaggaacatcccggtgacattctcctgaatacgaccgttgaggtgctcccctttaaaagtgagggattggagattagtaaggagacaaaggataaaaggctcgaagacgggtatttcaggatcggcaagtttgagaatggcgtcgcagaagggatggtagatccttcactcaatcccatttccgcgttccgactaagcgtcattcagaattcagccgtgtgggccatattgaatgagcagagggttttttctggatggtggcagaaatcacgtgacaaggccgagggccctcaggctccactgctcttttag

SEQ ID NO: 60791 - DNA, 1272 bp, Artificial Sequence
  derived and/or modified sequence
atgaactacagcatcaccgtgagcatcgtgatgggcatccccaccgtgaagagagaggtgaagagctacctgatcgagaccctgcacagcctgatcgacaacctgtaccccgaggagaagctggactgcgtgatcgtggtgttcatcggcgagaccgacatcgactacgtgcacggcgtggtggccaacctggagaaggagttcagcaaggagatcagcagcggcctggtggaggtgatcagcccccccgagagctactaccccgacctgaccaacctgaaggagaccttcggcgacagcaaggagagagtgagatggagaaccaagcagaacctggactactgcttcctgatgatgtacgcccaggagaagggcatctactacatccagctggaggacgacatcatcgtgaagcagaactacttcaacaccatcaagaacttcgccctgcagctgagcagcgaggagtggatgatcctggagttcagccagctgggcttcatcggcaagatgttccaggcccccgacctgaccctgatcgtggagttcatcttcatgttctacaaggagaagcccatcgactggctgctggaccacatcctgtgggtgaaggtgtgcaaccccgagaaggacgccaagcactgcgacagacagaaggccaacctgagaatcagattcagacccagcctgttccagcacgtgggcctgcacagcagcctgagcggcaagatccagaagctgaccgacaaggactacatgaagcccctgctgctgaagatccacgtgaacccccccgccgaggtgagcaccagcctgaaggtgtaccagggccacaccctggagaagacctacatgggcgaggacttcttctgggccatcacccccatcgccggcgactacatcctgttcaagttcgacaagcccgtgaacgtggagagctacctgttccacagcggcaaccaggagcaccccggcgacatcctgctgaacaccaccgtggaggtgctgcccttcaagagcgagggcctggagatcagcaaggagaccaaggacaagagactggaggacggctacttcagaatcggcaagttcgagaacggcgtggccgagggcatggtggaccccagcctgaaccccatcagcgccttcagactgagcgtgatccagaacagcgccgtgtgggccatcctgaacgagcagagagtgttcagcggctggtggcagaagagcagagacaaggccgagggcccccaggcccccctgctgttctag

SEQ ID NO: 60792 - protein, 1983 aa, Artificial Sequence
  derived and/or modified sequence
MANFLLPRGTSSFRRFTRESLAAIEKRMAEKQARGSTTLQESREGLPEEEAPRPQLDLQASKKLPDLYGNPPQELIGEPLEDLDPFYSTQKTFIVLNKGKTIFRFSATNALYVLSPFHPIRRAAVKILVHSLFNMLIMCTILTNCVFMAQHDPPPWTKYVEYTFTAIYTFESLVKILARGFCLHAFTFLRDPWNWLDFSVIIMAYVSENIKLGNLSALRTFRVLRALKTISVIPGLKTIVGALIQSVKKLADVMVLTVFCLSVFALIGLQLFMGNLRHKCVRNFTALNGTNGSVEADGLVWESLDLYLSDPENYLLKNGTSDVLLCGNSSDAGTCPEGYRCLKAGENPDHGYTSFDSFAWAFLALFRLMTQDCWERLYQQTLRSAGKIYMIFFMLVIFLGSFYLVNLILAVVAMAYEEQNQATIAETEEKEKRFQEAMEMLKKEHEALTIRGVDTVSRSSLEMSPLAPVNSHERRSKRRKRMSSGTEECGEDRLPKSDSEDGPRAMNHLSLTRGLSRTSMKPRSSRGSIFTFRRRDLGSEADFADDENSTAGESESHHTSLLVPWPLRRTSAQGQPSPGTSAPGHALHGKKNSTVDCNGVVSLLGAGDPEATSPGSHLLRPVMLEHPPDTTTPSEEPGGPQMLTSQAPCVDGFEEPGARQRALSAVSVLTSALEELEESRHKCPPCWNRLAQRYLIWECCPLWMSIKQGVKLVVMDPFTDLTITMCIVLNTLFMALEHYNMTSEFEEMLQVGNLVFTGIFTAEMTFKIIALDPYYYFQQGWNIFDSIIVILSLMELGLSRMSNLSVLRSFRLLRVFKLAKSWPTLNTLIKIIGNSVGALGNLTLVLAIIVFIFAVVGMQLFGKNYSELRDSDSGLLPRWHMMDFFHAFLIIFRILCGEWIETMWDCMEVSGQSLCLLVFLLVMVIGNLVVLNLFLALLLSSFSADNLTAPDEDREMNNLQLALARIQRGLRFVKRTTWDFCCGLLRQRPQKPAALAAQGQLPSCIATPYSPPPPETEKVPPTRKETRFEEGEQPGQGTPGDPEPVCVPIAVAESDTDDQEEDEENSLGTEEESSKQESQPVSGGPEAPPDSRTWSQVSATASSEAEASASQADWRQQWKAEPQAPGCGETPEDSCSEGSTADMTNTAELLEQIPDLGQDVKDPEDCFTEGCVRRCPCCAVDTTQAPGKVWWRLRKTCYHIVEHSWFETFIIFMILLSSGALAFEDIYLEERKTIKVLLEYADKMFTYVFVLEMLLKWVAYGFKKYFTNAWCWLDFLIVDVSLVSLVANTLGFAEMGPIKSLRTLRALRPLRALSRFEGMRVVVNALVGAIPSIMNVLLVCLIFWLIFSIMGVNLFAGKFGRCINQTEGDLPLNYTIVNNKSQCESLNLTGELYWTKVKVNFDNVGAGYLALLQVATFKGWMDIMYAAVDSRGYEEQPQWEYNLYMYIYFVIFIIFGSFFTLNLFIGVIIDNFNQQKKKLGGQDIFMTEEQKKYYNAMKKLGSKKPQKPIPRPLNKYQGFIFDIVTKQAFDVTIMFLICLNMVTMMVETDDQSPEKINILAKINLLFVAIFTGTVLSDIIQKYFFSPTLFRVIRLARIGRILRLIRGAKGIRTLLFALMMSLPALFNIGLLLFLVMFIYSIFGMANFAYVKWEAGIDDMFNFQTFANSMLCLFQITTSAGWDGLLSPILNTGPPYCDPTLPNSNGSRGDCGSPAVGILFFTTYIIISFLIVVNMYIAIILENFSVATEESTEPLSEDDFDMFYEIWEKFDPEATQFIEYSVLSDFADALSEPLRIAKPNQISLINMDLPMVSGDRIHCMDILFAFTKRVLGESGEMDALKIQMEEKFMAANPSKISYEPITTTLRRKHEEVSAMVIQRAFRRHLLQRSLKHASFLFRQQAGSGLSEEDAPEREGLIAYVMSENFSRPLGPPSSSSISSTSFPPSYDSVTRATSDNLQVRGSDYSHSEDLADFPPSPDRDRESIV

SEQ ID NO: 60793 - DNA, 8406 bp, Artificial Sequence
  derived and/or modified sequence
gagacggcggcggcgcccgtaggatgcagggatcgctcccccggggccgctgagcctgcgcccagtgccccgagccccgcgccgagccgagtccgcgccaagcagcagccgcccaccccggggcccggccgggggaccagcagcttccccacaggcaacgtgaggagagcctgtgcccagaagcaggatgagaagatggcaaacttcctattacctcggggcaccagcagcttccgcaggttcacacgggagtccctggcagccatcgagaagcgcatggcagagaagcaagcccgcggctcaaccaccttgcaggagagccgagaggggctgcccgaggaggaggctccccggccccagctggacctgcaggcctccaaaaagctgccagatctctatggcaatccaccccaagagctcatcggagagcccctggaggacctggaccccttctatagcacccaaaagactttcatcgtactgaataaaggcaagaccatcttccggttcagtgccaccaacgccttgtatgtcctcagtcccttccaccccatccggagagcggctgtgaagattctggttcactcgctcttcaacatgctcatcatgtgcaccatcctcaccaactgcgtgttcatggcccagcacgaccctccaccctggaccaagtatgtcgagtacaccttcaccgccatttacacctttgagtctctggtcaagattctggctcgaggcttctgcctgcacgcgttcactttccttcgggacccatggaactggctggactttagtgtgattatcatggcgtatgtatcagaaaatataaaactaggcaatttgtcggctcttcgaactttcagagtcctgagagctctaaaaactatttcagttatcccagggctgaagaccatcgtgggggccctgatccagtctgtgaagaagctggctgatgtgatggtcctcacagtcttctgcctcagcgtctttgccctcatcggcctgcagctcttcatgggcaacctaaggcacaagtgcgtgcgcaacttcacagcgctcaacggcaccaacggctccgtggaggccgacggcttggtctgggaatccctggacctttacctcagtgatccagaaaattacctgctcaagaacggcacctctgatgtgttactgtgtgggaacagctctgacgctgggacatgtccggagggctaccggtgcctaaaggcaggcgagaaccccgaccacggctacaccagcttcgattcctttgcctgggcctttcttgcactcttccgcctgatgacgcaggactgctgggagcgcctctatcagcagaccctcaggtccgcagggaagatctacatgatcttcttcatgcttgtcatcttcctggggtccttctacctggtgaacctgatcctggccgtggtcgcaatggcctatgaggagcaaaaccaagccaccatcgctgagaccgaggagaaggaaaagcgcttccaggaggccatggaaatgctcaagaaagaacacgaggccctcaccatcaggggtgtggataccgtgtcccgtagctccttggagatgtcccctttggccccagtaaacagccatgagagaagaagcaagaggagaaaacggatgtcttcaggaactgaggagtgtggggaggacaggctccccaagtctgactcagaagatggtcccagagcaatgaatcatctcagcctcacccgtggcctcagcaggacttctatgaagccacgttccagccgcgggagcattttcacctttcgcaggcgagacctgggttctgaagcagattttgcagatgatgaaaacagcacagcgggggagagcgagagccaccacacatcactgctggtgccctggcccctgcgccggaccagtgcccagggacagcccagtcccggaacctcggctcctggccacgccctccatggcaaaaagaacagcactgtggactgcaatggggtggtctcattactgggggcaggcgacccagaggccacatccccaggaagccacctcctccgccctgtgatgctagagcacccgccagacacgaccacgccatcggaggagccaggcgggccccagatgctgacctcccaggctccgtgtgtagatggcttcgaggagccaggagcacggcagcgggccctcagcgcagtcagcgtcctcaccagcgcactggaagagttagaggagtctcgccacaagtgtccaccatgctggaaccgtctcgcccagcgctacctgatctgggagtgctgcccgctgtggatgtccatcaagcagggagtgaagttggtggtcatggacccgtttactgacctcaccatcactatgtgcatcgtactcaacacactcttcatggcgctggagcactacaacatgacaagtgaattcgaggagatgctgcaggtcggaaacctggtcttcacagggattttcacagcagagatgaccttcaagatcattgccctcgacccctactactacttccaacagggctggaacatcttcgacagcatcatcgtcatccttagcctcatggagctgggcctgtcccgcatgagcaacttgtcggtgctgcgctccttccgcctgctgcgggtcttcaagctggccaaatcatggcccaccctgaacacactcatcaagatcatcgggaactcagtgggggcactggggaacctgacactggtgctagccatcatcgtgttcatctttgctgtggtgggcatgcagctctttggcaagaactactcggagctgagggacagcgactcaggcctgctgcctcgctggcacatgatggacttctttcatgccttcctcatcatcttccgcatcctctgtggagagtggatcgagaccatgtgggactgcatggaggtgtcggggcagtcattatgcctgctggtcttcttgcttgttatggtcattggcaaccttgtggtcctgaatctcttcctggccttgctgctcagctccttcagtgcagacaacctcacagcccctgatgaggacagagagatgaacaacctccagctggccctggcccgcatccagaggggcctgcgctttgtcaagcggaccacctgggatttctgctgtggtctcctgcggcagcggcctcagaagcccgcagcccttgccgcccagggccagctgcccagctgcattgccaccccctactccccgccacccccagagacggagaaggtgcctcccacccgcaaggaaacacggtttgaggaaggcgagcaaccaggccagggcacccccggggatccagagcccgtgtgtgtgcccatcgctgtggccgagtcagacacagatgaccaagaagaagatgaggagaacagcctgggcacggaggaggagtccagcaagcaggaatcccagcctgtgtccggtggcccagaggcccctccggattccaggacctggagccaggtgtcagcgactgcctcctctgaggccgaggccagtgcatctcaggccgactggcggcagcagtggaaagcggaaccccaggccccagggtgcggtgagaccccagaggacagttgctccgagggcagcacagcagacatgaccaacaccgctgagctcctggagcagatccctgacctcggccaggatgtcaaggacccagaggactgcttcactgaaggctgtgtccggcgctgtccctgctgtgcggtggacaccacacaggccccagggaaggtctggtggcggttgcgcaagacctgctaccacatcgtggagcacagctggttcgagacattcatcatcttcatgatcctactcagcagtggagcgctggccttcgaggacatctacctagaggagcggaagaccatcaaggttctgcttgagtatgccgacaagatgttcacatatgtcttcgtgctggagatgctgctcaagtgggtggcctacggcttcaagaagtacttcaccaatgcctggtgctggctcgacttcctcatcgtagacgtctctctggtcagcctggtggccaacaccctgggctttgccgagatgggccccatcaagtcactgcggacgctgcgtgcactccgtcctctgagagctctgtcacgatttgagggcatgagggtggtggtcaatgccctggtgggcgccatcccgtccatcatgaacgtcctcctcgtctgcctcatcttctggctcatcttcagcatcatgggcgtgaacctctttgcggggaagtttgggaggtgcatcaaccagacagagggagacttgcctttgaactacaccatcgtgaacaacaagagccagtgtgagtccttgaacttgaccggagaattgtactggaccaaggtgaaagtcaactttgacaacgtgggggccgggtacctggcccttctgcaggtggcaacatttaaaggctggatggacattatgtatgcagctgtggactccagggggtatgaagagcagcctcagtgggaatacaacctctacatgtacatctattttgtcattttcatcatctttgggtctttcttcaccctgaacctctttattggtgtcatcattgacaacttcaaccaacagaagaaaaagttagggggccaggacatcttcatgacagaggagcagaagaagtactacaatgccatgaagaagctgggctccaagaagccccagaagcccatcccacggcccctgaacaagtaccagggcttcatattcgacattgtgaccaagcaggcctttgacgtcaccatcatgtttctgatctgcttgaatatggtgaccatgatggtggagacagatgaccaaagtcctgagaaaatcaacatcttggccaagatcaacctgctctttgtggccatcttcacaggcactgtgctctcggacatcatccagaagtacttcttctccccgacgctcttccgagtcatccgcctggcccgaataggccgcatcctcagactgatccgaggggccaaggggatccgcacgctgctctttgccctcatgatgtccctgcctgccctcttcaacatcgggctgctgctcttcctcgtcatgttcatctactccatctttggcatggccaacttcgcttatgtcaagtgggaggctggcatcgacgacatgttcaacttccagaccttcgccaacagcatgctgtgcctcttccagatcaccacgtcggccggctgggatggcctcctcagccccatcctcaacactgggccgccctactgcgaccccactctgcccaacagcaatggctctcggggggactgcgggagcccagccgtgggcatcctcttcttcaccacctacatcatcatctccttcctcatcgtggtcaacatgtacattgccatcatcctggagaacttcagcgtggccacggaggagagcaccgagcccctgagtgaggacgacttcgatatgttctatgagatctgggagaaatttgacccagaggccactcagtttattgagtattcggtcctgtctgactttgccgatgccctgtctgagccactccgtatcgccaagcccaaccagataagcctcatcaacatggacctgcccatggtgagtggggaccgcatccattgcatggacattctctttgccttcaccaaaagggtcctgggggagtctggggagatggacgccctgaagatccagatggaggagaagttcatggcagccaacccatccaagatctcctacgagcccatcaccaccacactccggcgcaagcacgaagaggtgtcggccatggttatccagagagccttccgcaggcacctgctgcaacgctctttgaagcatgcctccttcctcttccgtcagcaggcgggcagcggcctctccgaagaggatgcccctgagcgagagggcctcatcgcctacgtgatgagtgagaacttctcccgaccccttggcccaccctccagctcctccatctcctccacttccttcccaccctcctatgacagtgtcactagagccaccagcgataacctccaggtgcgggggtctgactacagccacagtgaagatctcgccgacttccccccttctccggacagggaccgtgagtccatcgtgtgagcctcggcctggctggccaggacacactgaaaagcagcctttttcaccatggcaaacctaaatgcagtcagtcacaaaccagcctggggccttcctggctttgggagtaagaaatgggcctcagccccgcggatcaaccaggcagagttctgtggcgccgcgtggacagccggagcagttggcctgtgcttggaggcctcagatagacctgtgacctggtctggtcaggcaatgccctgcggctctggaaagcaacttcatcccagctgctgaggcgaaatataaaactgagactgtatatgttgtgaatgggctttcataaatttattatatttgatatttttttacttgagcaaagaactaaggatttttccatggacatgggcagcaattcacgctgtctcttcttaaccctgaacaagagtgtctatggagcagccggaagtctgttctcaaagcagaagtggaatccagtgtggctcccacaggtcttcactgcccaggggtcgaatggggtccccctcccacttgacctgagatgctgggagggctgaacccccactcacacaagcacacacacacagtcctcacacacggaggccagacacaggccgtgggacccaggctcccagcctaagggagacaggcctttccctgccggccccccaaggatggggttcttgtccacggggctcactctggccccctattgtctccaaggtcccattttccccctgtgttttcacgcaggtcatattgtcagtcctacaaaaataaaaggcttccagaggagagtggcctgggtcccagggctggccctaggcactgatagttgccttttcttcccctcctgtaagagtattaacaaaaccaaaggacacaagggtgcaagccccattcacggcctggcatgcagcttgtccttgctcctggaacctggcaggccctgcccagccagccatcggaagagagggctgagccatgggggtttggggctaagaagttcaccagccctgagccatggcggcccctcagcctgcctgaagagaggaaactggcgatctcccagggctctctggaccatacgcggaggagttttctgtgtggtctccagctcctctccagacacagagacatgggagtggggagcggagcttggccctgcgccctgtgcagggaaagggatggtcaggcccagttctcgtgcccttagaggggaatgaaccatggcacctttgagagagggggcactgtggtcaggcccagcctctctggctcagcccgggatcctgatggcacccacacagaggacctctttggggcaagatccaggtggtcccataggtcttgtgaaaaggctttttcagggaaaaatattttactagtccaatcacccccaggacctcttcagctgctgacaatcctatttagcatatgcaaatcttttaacatagagaactgtcaccctgaggtaacagggtcaactggcgaagcctgagcaggcaggggcttggctgccccattccagctctcccatggagcccctccaccgggcgcatgcctcccaggccacctcagtctcacctgccggctctgggctggctgctcctaacctacctcgccgagctgtcggagggctggacatttgtggcagtgctgaagggggcattgccggcgagtaaagtattatgtttcttcttgtcaccccagttcccttggtggcaaccccagacccaacccatgcccctgacagatctagttctcttctcctgtgttccctttgagtccagtgtgggacacggtttaactgtcccagcgacatttctccaagtggaaatcctatttttgtagatctccatgctttgctctcaaggcttggagaggtatgtgcccctcctgggtgctcaccgcctgctacacaggcaggaatgcggttgggaggcaggtcgggctgccagcccagctggccggaaggagactgtggtttttgtgtgtgtggacagcccgggagctttgagacaggtgcctggggctggctgcagacggtgtggttgggggtgggaggtgagctagacccaacccttagcttttagcctggctgtcacctttttaatttccagaactgcacaatgaccagcaggagggaaggacagacatcaagtgccagatgttgtctgaactaatcgagcacttctcaccaaacttcatgtataaataaaatacatatttttaaaacaaaccaataaatggcttacatga

SEQ ID NO: 60794 - DNA, 5952 bp, Artificial Sequence
  derived and/or modified sequence
atggcaaattttctgcttcccagaggtacctcctctttcagaaggtttactcgggaaagcctggccgctatcgaaaaaaggatggccgaaaaacaggcccgtggatccaccaccttacaggagtcacgggaaggtttgcctgaagaagaagcgccacggccgcagctggatttgcaggccagtaaaaagctccctgacttatacggtaatccccctcaagaattgatcggagaacccctggaggacttagaccctttctacagcacccagaaaacattcattgtcttgaacaagggtaagactatcttccggttttccgctacgaatgccctgtacgtgctaagcccttttcatcccatccggagggcggccgtcaaaattctggtgcactccctgtttaacatgctgatcatgtgtactatcttgactaactgcgtctttatggcccagcatgatccccccccctggaccaaatacgtcgagtataccttcacagcgatttacacgtttgagtcactagtcaaaatcctcgctaggggtttctgcctacacgcttttacctttctcagagatccatggaactggctagacttttccgtgatcatcatggcgtacgtcagtgagaatataaagctcggcaatttatcagctctcagaacgttcagagtcttgagggccttgaagacgattagcgtgattcccggacttaaaacaatagtcggagcccttattcagagcgtcaagaagctcgccgacgtaatggtcctgactgtgttttgtctcagcgtgttcgccctgatcggattgcagttgttcatggggaatttaagacacaaatgtgttagaaacttcacagctctaaatgggaccaatggatcggtcgaggccgatggactcgtgtgggaatctttagacctgtacctctccgatcccgagaactatctgctaaaaaacgggacgagcgacgtcctcctttgcgggaacagtagcgatgccggtacatgccctgagggatatcgatgtctcaaagccggcgagaatcccgatcacggttacaccagtttcgattccttcgcttgggcgttcctcgccttattcaggctgatgacccaagattgctgggagagactctaccagcagaccttgcgatccgccgggaaaatctacatgattttcttcatgttggttatatttctgggctctttctacctcgtgaacttaattttggccgttgtcgccatggcctacgaggaacagaatcaggctaccatcgcagagacggaagagaaagagaagcggttccaggaagcaatggagatgctcaaaaaagagcatgaagccctgacaatcagaggcgtggatacagtatctcggtcatctttagaaatgagtcctttagccccggtaaacagccacgagcgcaggagcaaacgtaggaaaagaatgtcaagtggaacagaggagtgcggtgaggacaggctgccaaagagcgactctgaggacggtccccgtgcaatgaaccacttgagtctcacccgagggctgagtaggacttctatgaagcccagatcctcgcgaggttccatttttactttcaggcggcgagacctggggtccgaggccgacttcgccgatgatgaaaactcaacagcgggtgagagtgaaagtcatcacacctccctgcttgtaccttggccactcaggaggacctctgctcaggggcagcccagcccaggtacctctgccccaggccacgcccttcacggcaagaaaaattcaaccgtagactgcaatggtgtggtgtctctgctgggggccggtgatcctgaggctaccagcccggggtcccatctgttgaggccagtaatgttagaacatccacccgacactacaacacccagcgaggagcccggcggtcctcaaatgctcaccagccaggcaccttgcgtggatggtttcgaggagccgggggcaagacagcgggctctgagcgctgtgagcgtgctcaccagcgcactggaggagttagaagaaagtcggcacaaatgtcctccttgttggaatagattagctcagagatacctgatatgggaatgctgtcctctgtggatgtctatcaagcaaggagtaaagctcgttgtgatggacccattcacagatttgacaataacaatgtgcattgtgctgaatacactatttatggccctggaacattacaatatgacttccgaatttgaagagatgctgcaggtcgggaatctggtttttaccggaatcttcacagccgaaatgacctttaagattattgcccttgacccgtattactatttccagcaggggtggaatatttttgatagcattattgtaattttatccctgatggagctcggcctttcccggatgtctaatctctccgtgctgcggtcctttcggctacttcgcgtctttaagctcgccaaatcatggccaacgctgaacaccctgattaaaatcatcggaaacagtgtgggagccctgggaaatctgacactggtgctggccattattgtcttcatctttgcggttgttggcatgcaactgttcgggaaaaactacagcgaacttcgcgactccgacagcggcctgttgccacgctggcatatgatggattttttccacgccttcctgattatttttagaattctgtgcggggaatggatcgaaacgatgtgggattgcatggaggttagcggccagagcttatgccttctggttttcttgctggtgatggttatcggtaacctggtggtgcttaatttgtttctcgccttgttgctgtccagcttttccgcagacaatctgaccgcacctgacgaggatagggaaatgaataatctccagttagcactggctcgtatacagcggggacttaggttcgtgaagcggacgacatgggatttctgctgcgggctgctgaggcagcggccgcagaaacctgcggccctggctgctcagggacagcttccaagctgtattgccactccttattcccccccacctccagaaacggaaaaggtgccccctacgcgcaaggaaactcggttcgaagaaggcgagcagccgggacaagggaccccaggagaccccgagccagtatgcgttcctatcgcagtcgctgagtccgataccgatgaccaggaggaggatgaggaaaattccctgggtactgaggaggagagcagcaagcaagagtcccagcctgtgagcggaggccctgaggccccacctgattctaggacgtggtcacaggtcagcgctacagccagctctgaggcagaagccagcgcaagccaagcagattggcggcaacagtggaaagctgagccccaggcccccgggtgcggcgagacccccgaagattcttgtagtgagggatcaacagccgatatgaccaataccgctgagctgctcgaacagattccggacctggggcaggacgtgaaggatccagaagattgcttcaccgagggatgcgtgcgaaggtgcccgtgctgtgcggtagatacaacccaggcaccaggcaaggtctggtggagactacgtaaaacatgctatcatatagtggaacactcttggtttgagacttttattatttttatgattctccttagcagcggcgccctggccttcgaggatatctacctagaggagagaaagactatcaaagtgttgctggaatacgccgacaagatgttcacctacgtgtttgttctggaaatgctgcttaagtgggtggcttatggatttaagaagtatttcaccaatgcatggtgttggcttgactttctgatcgttgatgtcagtctcgtgtctttggtggcaaatacattgggctttgcagagatgggacccattaagtcccttcgcacgctacgcgcattgcggcctcttcgtgcactgtcacgttttgaaggtatgcgggtggtggtgaacgccctggttggagccattccaagcatcatgaacgtgctgctggtctgcttaattttctggctgatcttttccattatgggagttaacttatttgccggcaaatttggtcgctgcataaatcaaactgagggcgaccttcctcttaattatacaatcgttaataacaaatctcaatgtgaatctctcaatctgactggtgaactgtattggacaaaggtcaaagtgaattttgacaacgtgggagccgggtatctcgccctgttgcaggtcgccaccttcaaaggatggatggatattatgtatgcggccgtggattcacgagggtacgaggagcagccgcagtgggaatacaacttgtatatgtacatttactttgtgattttcatcattttcggatctttcttcactctgaacctgtttatcggcgtgataatcgacaacttcaaccagcaaaagaagaagctggggggccaggacatttttatgaccgaagagcaaaaaaagtattacaacgccatgaagaagttgggaagcaaaaagccacagaaaccaatcccaagacccctgaataagtatcaaggctttatctttgacattgtgaccaagcaagcctttgacgtgaccattatgtttttgatctgtttgaatatggtgaccatgatggtggagactgacgaccagtcacctgagaagatcaacattctggcaaaaataaatcttctgttcgttgccattttcacaggaaccgtgttatctgacattatccagaaatacttctttagcccaactttatttcgagtcattcggctggctagaattgggcgaatcctccgcctcattcgaggggcaaagggtatcaggacccttttgttcgccctaatgatgtcactacccgcactttttaacattggacttctgctgttcctcgttatgttcatttatagtatattcggtatggctaactttgcctacgtaaaatgggaggctggaatcgacgatatgttcaactttcagaccttcgcaaattctatgctatgcttattccagattaccacctccgcgggctgggacgggctcctgtcccccatcctcaacacaggtccgccctactgtgatcctacactcccgaattcaaatgggagccgtggcgactgtggctcaccagctgttgggatcctgttcttcaccacctacatcatcatctcatttctaatcgtggtgaacatgtatattgccattatactcgaaaacttctcagtggccaccgaggaaagcacagagcctctgagtgaggacgattttgatatgttctatgagatttgggagaaattcgatcctgaggcaactcaatttatcgagtacagtgtgctctcagacttcgccgacgctctcagcgagcctcttaggattgccaaaccaaaccagatttccctcattaacatggatctccctatggttagtggggatcgcatacattgcatggacattctgtttgcctttactaagcgggttctaggcgagtcaggggagatggatgctctgaagatccagatggaggagaaattcatggctgctaatccaagcaaaatctcatatgagcccattactaccaccctccggagaaagcatgaggaggtttcagctatggtcatccaacgcgcattccggcggcacttgctgcagcggtctttgaagcacgcaagcttcctgttccggcagcaagccgggtctggcctgagcgaggaggacgcgccagaacgagagggccttattgcgtatgtgatgagtgaaaacttttctcgaccattgggaccgccatcaagcagttccatcagctctaccagcttccctcccagttacgacagcgtgacacgggccacaagcgacaatctacaggtgagggggagcgactattctcattccgaggacctggccgatttccccccgtcaccggatagagaccgagaatcgatcgtatag

SEQ ID NO: 60795 - DNA, 5952 bp, Artificial Sequence
  derived and/or modified sequence
atggccaacttcctgctgccccggggcaccagcagcttccgccgcttcacccgggagagcctggccgccatcgagaagaggatggccgagaagcaggcccggggcagcaccaccctgcaggagagccgggagggcctgcctgaggaggaggccccccggccccagctggacctgcaggccagcaagaagctgcctgacctgtatggcaaccccccccaggagctgattggagagcccctggaggacctggaccccttctacagcacccagaagaccttcatcgtgctgaacaagggcaagaccatcttccgcttcagcgccaccaatgccctgtatgtgctgagccccttccaccccatcagaagagctgctgtgaagatcctggtgcacagcctcttcaacatgctgatcatgtgcaccatcctgaccaactgtgtgttcatggcccagcacgaccccccaccctggaccaagtatgtggagtacaccttcaccgccatctacacctttgagagcctggtgaagatcctggcccggggcttctgcctgcacgccttcaccttcctgcgggacccctggaactggctggacttcagcgtcatcatcatggcctacgtgtctgagaacatcaagctgggcaacctgagcgccctgcggaccttccgggtgctgcgggccctgaagaccatcagcgtcatccctggcctgaagaccatcgtgggcgccctgatccagagcgtgaagaagctggctgatgtgatggtgctgactgtgttctgcctgtctgtgtttgccctgattggcctgcagctgttcatgggcaacctgcggcacaagtgtgtgaggaacttcaccgccctgaatggcaccaatggatctgtggaggctgatggcctggtgtgggagagcctggacctgtacctgagtgaccctgagaactacctgctgaagaatggcaccagtgatgtgctgctgtgtggcaacagcagtgatgctggcacctgcccagagggctaccgctgcctgaaggccggggagaacccagaccacggctacaccagctttgacagctttgcctgggccttcctggccctcttccggctgatgacccaggactgctgggagcggctgtaccagcagaccctgcggtctgctgggaagatctacatgatcttcttcatgctggtgatcttcctgggcagcttctacctggtgaacctgatcctggccgtggtggccatggcctatgaggagcagaaccaggccaccatcgccgagacagaggagaaggagaagcgcttccaggaggccatggagatgctgaagaaggagcacgaggccctgaccatccggggcgtggacacagtgagccgcagcagcctggagatgagccccctggcccctgtgaacagccatgagcggcgcagcaagaggaggaagaggatgagcagcggcacagaggagtgtggagaagatcggctgcccaagagtgacagtgaagatggcccccgggccatgaaccacctgagcctgacccggggcctgagcaggacctccatgaagcccaggagcagccggggcagcatcttcaccttcagaagaagagacctgggcagcgaggccgactttgctgatgatgagaacagcacagctggggagagcgagagccaccacaccagcctgctggtgccctggcccctgcggaggaccagcgcccagggccagcccagccctggcaccagcgcccctggccacgccctgcacggcaagaagaacagcacagtggactgcaatggagtggtgtccctgctgggcgctggggaccctgaggccaccagccctggcagccacctgctgcggcctgtgatgctggagcaccccccagacaccaccacccccagcgaggagcccggcggcccccagatgctgaccagccaggccccctgtgtggatggctttgaggagcccggggcccggcagagggccctgtctgctgtgtctgtgctgaccagcgccctggaggagctggaggagagccgccacaagtgccccccctgctggaaccggctggcccagcgctacctgatctgggagtgctgccccctgtggatgagcatcaagcagggcgtgaagctggtggtgatggaccccttcacagacctgaccatcaccatgtgcatcgtgctgaacaccctcttcatggccctggagcactacaacatgaccagcgagtttgaggagatgctgcaggtgggcaacctggtgttcaccggcatcttcaccgctgagatgaccttcaagatcatcgccctggacccctactactacttccagcagggctggaacatctttgacagcatcatcgtcatcctgagcctgatggagctgggcctgagcaggatgagcaacctgtctgtgctgcgctccttccggctgctgcgggtcttcaagctggccaagtcctggcccaccctgaacaccctcatcaagatcatcggcaacagcgtgggcgccctgggcaacctgaccctggtgctggccatcatcgtgttcatctttgctgtggtgggcatgcagctgtttgggaagaactacagcgagctgcgggacagcgacagcggcctgctgccccgctggcacatgatggacttcttccacgccttcctgatcatcttccgcatcctgtgtggggagtggattgagaccatgtgggactgcatggaggtgtctggccagagcctgtgcctgctggtgttcctgctggtgatggtgattggcaacctggtggtgctgaacctcttcctggccctgctgctgagcagcttctctgctgacaacctgacagccccagatgaggaccgggagatgaacaacctgcagctggccctggcccgcatccagaggggcctgcgctttgtgaagaggaccacctgggacttctgctgcggcctgctgcggcagaggccccagaagccagctgccctggccgcccagggccagctgcccagctgcatcgccaccccctacagccccccacctcctgagacagagaaggtgccccccaccaggaaggagaccaggtttgaggagggggagcagcccggccagggcacccctggggaccctgagcctgtgtgtgtgcccatcgctgtggccgagagtgacacagatgaccaggaggaggatgaggagaacagcctgggcacagaggaggagagcagcaagcaggagagccagcctgtgtctgggggccctgaggcccccccagacagcaggacctggagccaggtgtctgccacagccagcagcgaggccgaggccagcgccagccaggccgactggaggcagcagtggaaggccgagccccaggcccctggctgtggggagaccccagaggacagctgcagcgagggcagcacagctgacatgaccaacacagctgagctgctggagcagatcccagacctgggccaggatgtgaaggaccctgaggactgcttcacagagggctgtgtgcggcgctgcccctgctgtgctgtggacaccacccaggcccctgggaaggtgtggtggaggctgaggaagacctgctaccacatcgtggagcacagctggtttgagaccttcatcatcttcatgatcctgctgagcagcggggccctggcctttgaggacatctacctggaggagaggaagaccatcaaggtgctgctggagtatgctgacaagatgttcacctacgtgtttgtgctggagatgctgctgaagtgggtggcctacggcttcaagaagtacttcaccaatgcctggtgctggctggacttcctgattgtggatgtgtccctggtgtccctggtggccaacaccctgggctttgctgagatgggccccatcaagagcctgcggaccctgcgggccctgcggcccctgcgggccctgagcagatttgagggcatgagggtggtggtgaatgccctggtgggcgccatccccagcatcatgaatgtgctgctggtgtgcctgatcttctggctgatcttcagcatcatgggcgtgaacctgtttgctgggaagtttggccgctgcatcaaccagacagaaggagacctgcccctgaactacaccatcgtgaacaacaagagccagtgtgagagcctgaacctgactggagagctgtactggaccaaggtgaaggtgaactttgacaacgtgggcgccggctacctggccctgctgcaggtggccaccttcaagggctggatggacatcatgtatgctgctgtggacagccggggctatgaggagcagccccagtgggagtacaacctgtacatgtacatctactttgtgatcttcatcatcttcggcagcttcttcaccctgaacctcttcatcggggtcatcatcgacaacttcaaccagcagaagaagaagctgggcggccaggacatcttcatgacagaggagcagaagaagtactacaatgccatgaagaagctgggcagcaagaagccccagaagcccatcccccggcccctgaacaagtaccagggcttcatctttgatattgtgaccaagcaggcctttgatgtgaccatcatgttcctgatctgcctgaacatggtgaccatgatggtggagacagatgaccagagccctgagaagatcaacatcctggccaagatcaacctgctgtttgtggccatcttcaccggcaccgtgctgagtgacatcatccagaagtacttcttcagccccaccctcttccgggtcatccggctggccagaattggccgcatcctgcggctcatccggggggccaagggcatccgcaccctgctgtttgccctgatgatgagcctgcctgccctcttcaacatcggcctgctgctcttcctggtgatgttcatctacagcatcttcggcatggccaactttgcctacgtgaagtgggaggccggcattgatgacatgttcaacttccagacctttgccaacagcatgctgtgcctcttccagatcaccaccagcgctggctgggatggcctgctgagccccatcctgaacacaggccccccctactgtgaccccaccctgcccaacagcaatggcagcagaggagactgtggcagccctgctgtgggcatcctcttcttcaccacctacatcatcatctccttcctgattgtggtgaacatgtacatcgccatcatcctggagaacttctctgtggccacagaggagagcacagagcccctgtctgaagatgactttgacatgttttatgagatctgggagaagtttgatcctgaggccacccagttcatcgagtacagcgtgctgagtgactttgctgatgccctgtctgagcccctgcgcatcgccaagcccaaccagatcagcctcatcaacatggacctgcccatggtgtctggggaccgcatccactgcatggacatcctgtttgccttcaccaagagggtgctgggggagagcggggagatggatgccctgaagatccagatggaggagaagttcatggccgccaaccccagcaagatctcctatgagcccatcaccaccaccctgcggaggaagcatgaggaggtgtctgccatggtgatccagagggccttccgccgccacctgctgcagaggagcctgaagcacgccagcttcctgttccggcagcaggccggcagcggcctgtctgaggaggatgcccctgagcgggagggcctgattgcctacgtgatgtctgagaacttcagccggcccctgggcccccccagcagcagcagcatcagcagcaccagcttccccccatcctatgacagcgtgacccgggccaccagtgacaacctgcaggtgcggggcagtgactacagccacagcgaggacctggccgacttcccccccagcccagaccgggaccgggagagcatcgtgtag

SEQ ID NO: 60796 - DNA, 5952 bp, Artificial Sequence
  derived and/or modified sequence
atggccaacttcctgctgccccggggcaccagcagcttccggcggttcactcgagagagcctggccgccatagaaaagcggatggcagaaaagcaggctcggggcagcaccacactacaggagtcccgcgaaggcctgcctgaagaagaggcccctcgccctcagttagatctgcaggcttctaagaagctgccagatctgtacggtaaccccccacaggagctcatcggagaaccgctggaggatctggatccattctattcgacacaaaagacattcatcgtcctgaataaaggaaaaactatcttcagatttagtgctactaacgcattgtacgtacttagtccctttcatcctattcgaagggcagcagtcaaaatcctggttcattcccttttcaacatgcttatcatgtgtacaattcttacaaattgcgtctttatggcgcagcatgatccgcccccatggacaaagtatgtggaatataccttcactgctatttacacatttgaatccctcgtgaagattctagctcgggggttctgtttgcatgcgttcacctttctccgcgatccatggaactggctcgacttctccgtgataattatggcctacgtttcagagaacataaaactcggaaacctgagcgctctccggaccttccgagtgctgagggccctcaagacgatctctgtcataccaggactgaaaacgattgtcggggcacttatacagagcgtgaagaagcttgccgatgtgatggtcctcacggtgttttgcctttctgtgttcgccctcattggacttcagctgttcatgggcaatctgcgccacaaatgtgtgcgcaatttcacagcacttaatggtacaaacgggtctgttgaggccgacgggctcgtgtgggagtcccttgacctatatctcagtgacccggaaaactatctcttgaaaaacggcacctccgatgtcctgctctgcggaaattctagtgatgctgggacttgccccgagggttatcgatgccttaaggcgggagaaaaccctgaccacggctatacgagtttcgatagtttcgcctgggcctttttggcactctttcggctaatgacacaggactgctgggagaggctataccagcagaccctgcgcagcgccggaaagatctacatgatatttttcatgcttgtgatttttctgggtagtttctatttagtgaacctcattctcgctgtggttgcgatggcctacgaggaacagaaccaggcaaccatagctgaaactgaagaaaaggaaaaacgcttccaggaggcaatggaaatgctcaaaaaggagcacgaggccctgaccatcaggggggtggacacagtgtctagatcttctctggaaatgtcgcctctagcacccgtgaattcgcacgagcggcgcagcaagaggagaaagcgcatgtcctccgggactgaagaatgtggtgaggacagactgccaaaatccgacagcgaggacggacctcgtgctatgaaccacttgtctttaactaggggcctgagcaggacctccatgaagcccaggagctctaggggctcaatcttcacctttagaaggcgcgacctggggtccgaagcagacttcgccgacgatgaaaattcaaccgctggcgagagcgagagccaccacaccagtctgctggttccttggcctcttagacgcaccagcgctcagggccagccttcaccaggcactagcgcacccgggcacgcattgcatggtaagaaaaacagcacggtggattgtaatggggtcgtatctctcctgggcgcaggcgaccccgaggccactagtcccggaagccacctgctcagaccagttatgctggagcatcctccagatactacaacgccctccgaagaacctgggggcccgcagatgctcacgagccaagcaccgtgtgtggacggatttgaggaacccggtgctaggcaacgcgctctgagcgccgtatccgtgctgacgtccgctctcgaggagctcgaggagagtcggcacaaatgcccgccctgctggaaccggttggcacagcggtatctgatttgggaatgctgtcccttgtggatgagcattaagcagggtgtcaaattagtcgtgatggacccgttcactgaccttacgatcacaatgtgcatcgtcctgaatacactgtttatggccctcgagcattacaatatgacatccgagtttgaggagatgttacaggtcgggaacttagtttttacggggattttcaccgcagagatgacgtttaagatcatagcccttgacccgtattactactttcaacaaggatggaatatcttcgattcgatcatcgtgatattgtctttgatggagctgggactgagtcggatgtccaatctcagcgtgctgcgctcatttcggctgttgcgggtgttcaaactggccaaatcctggcccaccctgaataccttgataaaaattatcggcaacagtgtgggcgctctgggaaacctgacactcgtcctagccattatagtatttatctttgccgtggtgggcatgcagctgtttggaaaaaattattctgagttgagggattctgattctggcctgctgccccgctggcacatgatggactttttccacgcctttctaatcatcttcaggattctctgtggagagtggatcgagaccatgtgggactgcatggaagtgtccggccagagtctctgtcttctggtgttcttgcttgttatggttataggtaatttagtggtgctaaacctgtttcttgccttactgctctctagtttcagcgcggacaatttaacagcaccagacgaggatagggagatgaacaacctgcaactcgcgttagcacgtattcagaggggtctacggtttgtcaaaaggaccacttgggacttttgctgtggcctgctgcgacagcggccgcagaaaccggccgcactcgcagctcagggtcagttgcctagctgtatcgctaccccctattctcctcctccccccgagactgagaaggtaccccccaccagaaaggagacgcgctttgaagaaggggaacagccaggccagggaactcccggcgatccagagccagtttgcgtcccgatcgctgtggcggaatccgatacagacgatcaggaggaagatgaggaaaactcattgggaacggaggaagagtcctcaaagcaggaaagccagcctgtcagcggaggtcctgaagccccccctgattccagaacctggagccaggtgtctgcaacagctagctcagaagctgaagcctcagcttcccaggcagattggaggcagcagtggaaggccgagcctcaagctcccggatgcggcgagactccggaggacagctgtagcgaaggatccactgccgatatgactaacactgccgaattgttagagcagatacccgatctaggccaggatgtgaaagacccggaagactgctttacagaggggtgcgtaagaagatgtccgtgttgcgcggtggatacaacccaggcgccaggcaaagtgtggtggcgcctccgtaaaacttgctaccatatcgttgaacactcttggttcgagaccttcattatctttatgattctgctcagcagtggcgcactcgcctttgaagatatttacctggaggaaaggaaaaccatcaaggtcctgcttgaatatgccgacaagatgtttacttatgtgtttgtgttagagatgctgctgaaatgggtggcctatggttttaagaagtacttcaccaacgcctggtgctggctcgattttctgatagttgacgtaagtctggtgtcactagtggccaataccttgggcttcgccgaaatgggccccattaaaagcttgcggacactccgcgccctgcgacccctgcgtgcgttatctaggtttgaggggatgagggtcgtcgttaatgccctcgtaggcgccattccaagcatcatgaacgtgttgttggtctgtctaattttctggcttatcttttctatcatgggtgtcaatctcttcgccggtaagtttggaaggtgcattaaccaaacagagggcgatctgccgttgaactacaccatagttaacaacaagtctcagtgtgagtctctgaatttaacaggtgagctgtattggactaaagtcaaggttaacttcgacaatgttggagccggttatcttgctctgctccaggtggccaccttcaagggatggatggatatcatgtatgcggccgtcgactcccgaggctatgaggagcagcctcagtgggaatacaatctttatatgtatatatactttgtcatcttcattatttttggatcctttttcactctaaacttgttcatcggcgtaattatagataatttcaaccagcagaaaaaaaaattgggagggcaggacatttttatgactgaagagcagaagaagtactataatgctatgaaaaaattggggtctaagaaacctcagaaaccgatcccacgtcccttgaataagtaccaggggtttatcttcgatatagttaccaagcaggcgtttgacgtcacgattatgtttctcatctgtttgaacatggtcaccatgatggtcgagacggacgaccagtcaccggagaagatcaacattctggctaagattaatctcttgttcgtcgctatcttcactggaactgtcctgagtgacataattcagaaatacttcttctcgcctacactcttccgtgtcattcggctggccaggattggtcgaatcctcagactaatcagaggggcgaaaggaatcaggacactgctgtttgccttgatgatgtcactcccagcgcttttcaatatcggcttgctgttattcctggtgatgttcatttattcgatttttgggatggcaaactttgcctacgtgaaatgggaagccggaatagacgacatgtttaatttccagacttttgcgaattccatgctatgtctgtttcaaatcaccactagcgctgggtgggatggcctgttaagccctattctgaataccggacctccgtactgtgacccaactctcccaaatagcaacgggagcagaggcgactgtggctcgcctgcagtgggcattctgttcttcacaacttatatcatcattagtttcctgatagtggtcaacatgtatatcgccattattctggagaacttttctgtggcgaccgaagaatctaccgagccactgtctgaagacgactttgatatgttttacgagatttgggaaaagtttgaccctgaagctacccagttcatcgagtacagcgtgctgtcggattttgcagatgccctatctgagccactgcggatcgcgaaacccaatcagatttctctcattaacatggatctccctatggtctctggtgatcgcatccattgcatggacatcttgtttgcttttactaagagggtgctgggagagagtggtgagatggatgccctgaagatccaaatggaggaaaaattcatggcagccaaccctagtaagatcagttacgaacctataacgacaacactaagaaggaagcacgaggaggtttctgccatggtaattcagcgtgcattcagaaggcatctcctgcagaggagcctgaaacacgctagcttcttgttccggcagcaggcaggatcaggactgtcagaggaggacgcccccgagagagaaggacttattgcttacgtgatgagcgaaaacttcagtcggcctttgggcccaccttcttcgtcatcaatctcttcaacgtcctttcctcctagttacgatagcgtgacaagagcaactagcgacaatctgcaagtccgagggagcgattattctcactccgaggacttggcagactttcccccttctcctgacagagatagagaaagcatcgtgtag

SEQ ID NO: 60797 - DNA, 5951 bp, Artificial Sequence
  derived and/or modified sequence
atggccaactttctgctccctcgagggacttcttctttcaggcggtttacccgggaatctttggcagccatcgagaaacggatggccgaaaagcaagcacgcggatcaacaacactacaggaatcaagagagggccttcctgaagaagaggcccctcggcctcagctggatcttcaggcttccaaaaaactccctgatctctacggcaacccccctcaggagctcatcggcgaacccttggaagatctcgatccattttatagcacccagaagacttttatcgttctgaacaaagggaaaactatcttccgcttctcagcaacaaatgctttgtacgtgctctccccttttcaccctatcagacgggctgctgtcaagatccttgtccatagtctgttcaatatgctcatcatgtgcactattctgactaattgtgtgttcatggctcagcacgacccgccaccctggactaagtacgtcgagtatactttcaccgctatatataccttcgaaagcctcgtgaagatcctggcccgaggcttctgtctgcacgcgtttacttttctcagggatccctggaactggttggatttctctgttatcataatggcttacgtgagcgaaaacataaagctgggcaatttgtctgccctgagaaccttcagagttctgcgggctctgaagaccatctctgtaatcccagggctgaaaaccatagtgggcgctttgatccagtcagtgaagaaattggctgacgtcatggtgctcacggtgttctgcctttctgtgttcgctcttatcggcctgcagctctttatgggcaatctgaggcacaaatgtgtgcggaattttaccgcgttgaatgggacaaatggctctgtagaggccgacggccttgtctgggagtccttggatctgtacctgagcgacccagagaactatctcctgaaaaatggcacttccgatgtgctgctgtgtgggaactcaagcgatgcaggtacctgtcccgagggatatagatgtttaaaagcaggcgaaaatcccgatcacggatacacatcctttgactctttcgcatgggccttcctagccttgttccgtttaatgacacaggattgctgggaacggctgtaccagcaaacgttgaggtccgcaggaaagatctacatgatctttttcatgctggtcatcttcctgggctctttctacctggtgaatttgatcctagctgtagttgctatggcatacgaggagcagaaccaggccaccattgctgagacagaagagaaggagaaacggtttcaagaagctatggagatgctgaaaaaggagcacgaagctttgactatccgcggagtagacactgtgtccaggtcctcactagaaatgtctccgctagctcctgtcaacagtcatgaacgcaggagcaaaaggaggaaacgcatgtccagcggcacggaggagtgtggcgaagataggctccctaaatccgatagtgaagacgggcctagggccatgaaccacttgtctctgacccgcggactgtcccgaacatctatgaagcctcgatcctctcgcggttctatttttacattcaggcgcagggacctaggcagcgaagcggactttgcggacgatgagaattctaccgccggagaatcagaatctcaccatacatcgctgctggtcccatggcccctgcgcaggaccagtgctcaaggccagccctctcccggaacaagcgctcccggacatgccctgcatggaaaaaagaacagcacagtggactgcaacggagtggtgtccctcttgggggctggggaccccgaggccacctctccaggttcacacctcctaaggccggtgatgcttgagcatccccctgacactaccacgccctcagaagaacctggaggtccacagatgctaactagtcaagcgccatgcgtggacggattcgaagaacctggtgccagacagcgggctctgtctgcggtgtcagttctaacaagcgctcttgaagaattagaagagtctcgccacaaatgtccaccatgttggaataggttagcacagcgctacctaatatgggaatgctgccccttgtggatgagcattaaacagggggtgaagctggtcgtgatggatccatttactgacttaacgataactatgtgcatagtgctcaacacccttttcatggccctggagcactacaatatgacaagtgaatttgaggagatgctgcaggtgggcaacttagtgtttactgggatcttcaccgccgagatgacatttaaaatcatcgcgctggacccttattactattttcagcaaggctggaacatcttcgattcaataattgtgatactttccctcatggagctcgggttatcacggatgtcaaatttgtccgtgctacggagcttcagactcctcagggtgttcaaattggccaagtcatggcccactctgaatactctcataaagatcattggaaattcagtgggggcactagggaacctcacccttgtgctggctatcattgtttttatcttcgctgtagtggggatgcagctcttcggtaaaaattattctgaactgcgtgactctgacagcgggctactgccacgctggcacatgatggatttcttccatgcattcctgataattttcagaatcttatgtggggagtggattgagactatgtgggattgtatggaggtttctggccagagcctatgcctgctggtgttccttctggtgatggtgattggcaatttagtagtgttgaacttgttcctcgcactactcctgtcctccttcagcgccgacaatctgacagctccagatgaggacagagagatgaataatcttcagcttgccttagccagaatccaacggggactgcggttcgtgaaacgcaccacctgggacttctgttgcggcctgctccggcaacgaccacaaaagcccgctgccttggccgctcaaggccagctccctagctgcattgcaaccccatattctccgcctccaccagagacagagaaggtgcccccaactcggaaagagactagattcgaggagggagaacaacccggtcagggcaccccaggagatccggaacctgtttgtgtgcctattgccgtggccgagtctgacaccgacgaccaggaagaggacgaggaaaattctctcggaactgaagaggaatcgagcaaacaagagagccagcctgtctccggtggaccagaagcaccccctgattcccgcacatggtcacaggtgtctgcgaccgccagctcagaggccgaagcatcggcaagccaagctgattggcgccagcagtggaaagcagagcctcaggccccaggctgcggtgaaactcccgaggatagctgctctgaagggagcactgccgacatgaccaataccgccgagctcttggaacaaataccagatttgggacaggatgttaaggacccagaggactgttttacagagggctgcgtgaggagatgcccttgctgtgctgtagatacaacccaggcaccaggcaaagtctggtggcgcttgcgcaagacttgctatcacatagtggagcacagctggttcgagacctttatcatttttatgatcttgctgagtagtggtgcccttgcgttcgaggacatatatctcgaagagagaaaaacaatcaaagtattactggaatatgctgacaaaatgttcacatatgtattcgtgctcgaaatgctgctaaagtgggtagcctacggctttaaaaaatacttcactaatgcctggtgttggctggacttccttatcgtggatgtgtcccttgtctcgttagtagctaacacactgggatttgccgagatgggaccaataaagagtctgagaacactgcgtgccctccgaccactgagggccctctcaaggttcgaaggcatgcgagtggtagtaaacgcgttagtcggcgctattccatccattatgaatgtgctcctagtctgccttatcttttggctgattttcagtataatgggtgtgaacctctttgcgggaaagttcgggagatgtatcaaccagaccgagggtgacctaccactcaactatacaatcgttaataataagtctcagtgtgaatctcttaatctgacaggcgagttatactggactaaggtcaaggtcaatttcgacaatgtgggagcaggatacctggccctcctccaagtggcgacttttaaggggtggatggacattatgtacgcagccgttgatagtagaggatatgaggagcagccacagtgggagtacaacctgtatatgtatatctacttcgttatattcataatctttggcagcttcttcaccttgaatctgtttattggagtcatcatagacaactttaatcagcagaaaaaaaagcttggaggccaggacatcttcatgaccgaggaacaaaagaagtattataatgcgatgaagaagctcgggtcaaagaagccacagaaacccatccctcgacccttgaacaaatatcagggctttattttcgacatcgtgacaaaacaggcattcgacgtgaccattatgttccttatttgcttgaatatggtaaccatgatggtggagactgatgaccagagcccagaaaaaatcaacatcctcgctaaaattaacctactcttcgtcgccattttcacaggtacagtgctctctgacataattcagaagtatttcttctctcctactctcttcagagtgattcggctcgccagaattgggagaatcctccggcttatacggggtgcaaaagggattcgtactctgctgtttgctttgatgatgtcactgcccgcactgttcaacattggactgctgttatttttggtgatgttcatatatagcatctttggcatggcaaacttcgcctatgtgaaatgggaggcaggcatcgatgatatgtttaatttccagacctttgccaattctatgctgtgcctgtttcagattactacatctgcgggttgggacgggctcttgtctcccatcctaaacacaggcccaccctattgcgaccccacattacccaacagtaatgggagccgaggcgactgtgggagtcctgcggtgggaattctgttcttcactacgtacataatcatttcttttctgattgtggtgaatatgtacatagcaatcattctcgagaacttctcagtagcaacagaggagagtaccgagccactgtcagaagatgattttgatatgttttatgagatctgggagaaatttgatccagaagctactcaatttatagagtatagtgttctgtccgactttgcagacgccctgtctgaaccactgcggatcgcaaagcctaaccaaatcagcctgattaatatggatctgcccatggtcagtggcgatcgcattcactgtatggatattctctttgcctttacgaagagagtgctgggtgagagcggcgagatggacgcactgaagattcaaatggaagaaaagtttatggcggcaaatccaagtaagatctcttacgagcccattactaccaccttgcggagaaaacatgaagaggtatccgctatggtaatccagagggctttccgacggcacttgctgcaacggagtctgaagcatgcatccttcctgtttaggcagcaggctgggtccgggctcagcgaagaagatgctccagaacgggaaggcctcattgcctacgtcatgtcagaaaatttctccaggcctcttggaccaccgagttctagcagtatatcaagcacatctttccccccttcctatgactcagtcacacgggcaaccagtgacaatctccaagtgcggggttccgattattcacatagtgaggacctggcagactttccccctagccccgacagagatcgagagagcatcgtgta

SEQ ID NO: 60798 - DNA, 7170 bp, Artificial Sequence
  derived and/or modified sequence
ctgtgcccagaagcaggatgagaagatggcaaacttcctattacctcggggcaccagcagcttccgcaggttcacacgggagtccctggcagccatcgagaagcgcatggcagagaagcaagcccgcggctcaaccaccttgcaggagagccgagaggggctgcccgaggaggaggctccccggccccagctggacctgcaggcctccaaaaagctgccagatctctatggcaatccaccccaagagctcatcggagagcccctggaggacctggaccccttctatagcacccaaaagactttcatcgtactgaataaaggcaagaccatcttccggttcagtgccaccaacgccttgtatgtcctcagtcccttccaccccatccggagagcggctgtgaagattctggttcactcgctcttcaacatgctcatcatgtgcaccatcctcaccaactgcgtgttcatggcccagcacgaccctccaccctggaccaagtatgtcgagtacaccttcaccgccatttacacctttgagtctctggtcaagattctggctcgaggcttctgcctgcacgcgttcactttccttcgggacccatggaactggctggactttagtgtgattatcatggcgtatgtatcagaaaatataaaactaggcaatttgtcggctcttcgaactttcagagtcctgagagctctaaaaactatttcagttatcccagggctgaagaccatcgtgggggccctgatccagtctgtgaagaagctggctgatgtgatggtcctcacagtcttctgcctcagcgtctttgccctcatcggcctgcagctcttcatgggcaacctaaggcacaagtgcgtgcgcaacttcacagcgctcaacggcaccaacggctccgtggaggccgacggcttggtctgggaatccctggacctttacctcagtgatccagaaaattacctgctcaagaacggcacctctgatgtgttactgtgtgggaacagctctgacgctgggacatgtccggagggctaccggtgcctaaaggcaggcgagaaccccgaccacggctacaccagcttcgattcctttgcctgggcctttcttgcactcttccgcctgatgacgcaggactgctgggagcgcctctatcagcagaccctcaggtccgcagggaagatctacatgatcttcttcatgcttgtcatcttcctggggtccttctacctggtgaacctgatcctggccgtggtcgcaatggcctatgaggagcaaaaccaagccaccatcgctgagaccgaggagaaggaaaagcgcttccaggaggccatggaaatgctcaagaaagaacacgaggccctcaccatcaggggtgtggataccgtgtcccgtagctccttggagatgtcccctttggccccagtaaacagccatgagagaagaagcaagaggagaaaacggatgtcttcaggaactgaggagtgtggggaggacaggctccccaagtctgactcagaagatggtcccagagcaatgaatcatctcagcctcacccgtggcctcagcaggacttctatgaagccacgttccagccgcgggagcattttcacctttcgcaggcgagacctgggttctgaagcagattttgcagatgatgaaaacagcacagcgggggagagcgagagccaccacacatcactgctggtgccctggcccctgcgccggaccagtgcccagggacagcccagtcccggaacctcggctcctggccacgccctccatggcaaaaagaacagcactgtggactgcaatggggtggtctcattactgggggcaggcgacccagaggccacatccccaggaagccacctcctccgccctgtgatgctagagcacccgccagacacgaccacgccatcggaggagccaggcgggccccagatgctgacctcccaggctccgtgtgtagatggcttcgaggagccaggagcacggcagcgggccctcagcgcagtcagcgtcctcaccagcgcactggaagagttagaggagtctcgccacaagtgtccaccatgctggaaccgtctcgcccagcgctacctgatctgggagtgctgcccgctgtggatgtccatcaagcagggagtgaagttggtggtcatggacccgtttactgacctcaccatcactatgtgcatcgtactcaacacactcttcatggcgctggagcactacaacatgacaagtgaattcgaggagatgctgcaggtcggaaacctggtcttcacagggattttcacagcagagatgaccttcaagatcattgccctcgacccctactactacttccaacagggctggaacatcttcgacagcatcatcgtcatccttagcctcatggagctgggcctgtcccgcatgagcaacttgtcggtgctgcgctccttccgcctgctgcgggtcttcaagctggccaaatcatggcccaccctgaacacactcatcaagatcatcgggaactcagtgggggcactggggaacctgacactggtgctagccatcatcgtgttcatctttgctgtggtgggcatgcagctctttggcaagaactactcggagctgagggacagcgactcaggcctgctgcctcgctggcacatgatggacttctttcatgccttcctcatcatcttccgcatcctctgtggagagtggatcgagaccatgtgggactgcatggaggtgtcggggcagtcattatgcctgctggtcttcttgcttgttatggtcattggcaaccttgtggtcctgaatctcttcctggccttgctgctcagctccttcagtgcagacaacctcacagcccctgatgaggacagagagatgaacaacctccagctggccctggcccgcatccagaggggcctgcgctttgtcaagcggaccacctgggatttctgctgtggtctcctgcggcagcggcctcagaagcccgcagcccttgccgcccagggccagctgcccagctgcattgccaccccctactccccgccacccccagagacggagaaggtgcctcccacccgcaaggaaacacggtttgaggaaggcgagcaaccaggccagggcacccccggggatccagagcccgtgtgtgtgcccatcgctgtggccgagtcagacacagatgaccaagaagaagatgaggagaacagcctgggcacggaggaggagtccagcaagcaggaatcccagcctgtgtccggtggcccagaggcccctccggattccaggacctggagccaggtgtcagcgactgcctcctctgaggccgaggccagtgcatctcaggccgactggcggcagcagtggaaagcggaaccccaggccccagggtgcggtgagaccccagaggacagttgctccgagggcagcacagcagacatgaccaacaccgctgagctcctggagcagatccctgacctcggccaggatgtcaaggacccagaggactgcttcactgaaggctgtgtccggcgctgtccctgctgtgcggtggacaccacacaggccccagggaaggtctggtggcggttgcgcaagacctgctaccacatcgtggagcacagctggttcgagacattcatcatcttcatgatcctactcagcagtggagcgctggccttcgaggacatctacctagaggagcggaagaccatcaaggttctgcttgagtatgccgacaagatgttcacatatgtcttcgtgctggagatgctgctcaagtgggtggcctacggcttcaagaagtacttcaccaatgcctggtgctggctcgacttcctcatcgtagacgtctctctggtcagcctggtggccaacaccctgggctttgccgagatgggccccatcaagtcactgcggacgctgcgtgcactccgtcctctgagagctctgtcacgatttgagggcatgagggtggtggtcaatgccctggtgggcgccatcccgtccatcatgaacgtcctcctcgtctgcctcatcttctggctcatcttcagcatcatgggcgtgaacctctttgcggggaagtttgggaggtgcatcaaccagacagagggagacttgcctttgaactacaccatcgtgaacaacaagagccagtgtgagtccttgaacttgaccggagaattgtactggaccaaggtgaaagtcaactttgacaacgtgggggccgggtacctggcccttctgcaggtggcaacatttaaaggctggatggacattatgtatgcagctgtggactccagggggtatgaagagcagcctcagtgggaatacaacctctacatgtacatctattttgtcattttcatcatctttgggtctttcttcaccctgaacctctttattggtgtcatcattgacaacttcaaccaacagaagaaaaagttagggggccaggacatcttcatgacagaggagcagaagaagtactacaatgccatgaagaagctgggctccaagaagccccagaagcccatcccacggcccctgaacaagtaccagggcttcatattcgacattgtgaccaagcaggcctttgacgtcaccatcatgtttctgatctgcttgaatatggtgaccatgatggtggagacagatgaccaaagtcctgagaaaatcaacatcttggccaagatcaacctgctctttgtggccatcttcacaggcactgtgctctcggacatcatccagaagtacttcttctccccgacgctcttccgagtcatccgcctggcccgaataggccgcatcctcagactgatccgaggggccaaggggatccgcacgctgctctttgccctcatgatgtccctgcctgccctcttcaacatcgggctgctgctcttcctcgtcatgttcatctactccatctttggcatggccaacttcgcttatgtcaagtgggaggctggcatcgacgacatgttcaacttccagaccttcgccaacagcatgctgtgcctcttccagatcaccacgtcggccggctgggatggcctcctcagccccatcctcaacactgggccgccctactgcgaccccactctgcccaacagcaatggctctcggggggactgcgggagcccagccgtgggcatcctcttcttcaccacctacatcatcatctccttcctcatcgtggtcaacatgtacattgccatcatcctggagaacttcagcgtggccacggaggagagcaccgagcccctgagtgaggacgacttcgatatgttctatgagatctgggagaaatttgacccagaggccactcagtttattgagtattcggtcctgtctgactttgccgatgccctgtctgagccactccgtatcgccaagcccaaccagataagcctcatcaacatggacctgcccatggtgagtggggaccgcatccattgcatggacattctctttgccttcaccaaaagggtcctgggggagtctggggagatggacgccctgaagatccagatggaggagaagttcatggcagccaacccatccaagatctcctacgagcccatcaccaccacactccggcgcaagcacgaagaggtgtcggccatggttatccagagagccttccgcaggcacctgctgcaacgctctttgaagcatgcctccttcctcttccgtcagcaggcgggcagcggcctctccgaagaggatgcccctgagcgagagggcctcatcgcctacgtgatgagtgagaacttctcccgaccccttggcccaccctccagctcctccatctcctccacttccttcccaccctcctatgacagtgtcactagagccaccagcgataacctccaggtgcgggggtctgactacagccacagtgaagatctcgccgacttccccccttctccggacagggaccgtgagtccatcgtgtgagcctcggcctggctggccaggacacactgaaaagcagcctttttcaccatggcaaacctaaatgcagtcagtcacaaaccagcctggggccttcctggctttgggagtaagaaatgggcctcagccccgcggatcaaccaggcagagttctgtggcgccgcgtggacagccggagcagttggcctgtgcttggaggcctcagatagacctgtgacctggtctggtcaggcaatgccctgcggctctggaaagcaacttcatcccagctgctgaggcgaaatataaaactgagactgtatatgttgtgaatgggctttcataaatttattatatttgatatttttttacttgagcaaagaactaaggatttttccatggacatgggcagcaattcacgctgtctcttcttaaccctgaacaagagtgtctatggagcagccggaagtctgttctcaaagcagaagtggaatccagtgtggctcccacaggtcttcactgcccaggggtcgaatggggtccccctcccacttgacctgagatgctgggagggctgaacccccactcacacaagcacacacacacagtcctcacacacggaggccagacacaggccgtgggacccaggctcccagcctaagggagacaggcctttccctgccggccccccaaggatggggttcttgtccacggggctcactctggccccctattgtctccaaggtcccattttccccctgtgttttcacgcaggtcatattgtcagtcctacaaaaataaaaggcttccagaggagagtggcctgggtcccagggctggccctaggcactgatagttgccttttcttcccctcctgtaagagtattaacaaaaccaaaggacacaagggtgcaagccccattcacggcctggcatgcagcttgtccttgctcctggaacctggcaggccctgcccagccagccatcggaagagagggctgagccatgggggtttggggctaagaagttcaccagccctgagccatggcggcccctcagcctgcctgaagagaggaaactggcgatctcccagggctctctggaccatacgcggaggagttttctgtgtggtctccagctcctctccagacacagagacatgggagtggggagcggagcttggccctgcgccctgtgcagggaaagggatggtcagg

SEQ ID NO: 60799 - DNA, 5952 bp, Artificial Sequence
  derived and/or modified sequence
atggccaacttcctgctgcccagaggcaccagcagcttcagaagattcaccagagagagcctggccgccatcgagaagagaatggccgagaagcaggccagaggcagcaccaccctgcaggagagcagagagggcctgcccgaggaggaggcccccagaccccagctggacctgcaggccagcaagaagctgcccgacctgtacggcaaccccccccaggagctgatcggcgagcccctggaggacctggaccccttctacagcacccagaagaccttcatcgtgctgaacaagggcaagaccatcttcagattcagcgccaccaacgccctgtacgtgctgagccccttccaccccatcagaagagccgccgtgaagatcctggtgcacagcctgttcaacatgctgatcatgtgcaccatcctgaccaactgcgtgttcatggcccagcacgacccccccccctggaccaagtacgtggagtacaccttcaccgccatctacaccttcgagagcctggtgaagatcctggccagaggcttctgcctgcacgccttcaccttcctgagagacccctggaactggctggacttcagcgtgatcatcatggcctacgtgagcgagaacatcaagctgggcaacctgagcgccctgagaaccttcagagtgctgagagccctgaagaccatcagcgtgatccccggcctgaagaccatcgtgggcgccctgatccagagcgtgaagaagctggccgacgtgatggtgctgaccgtgttctgcctgagcgtgttcgccctgatcggcctgcagctgttcatgggcaacctgagacacaagtgcgtgagaaacttcaccgccctgaacggcaccaacggcagcgtggaggccgacggcctggtgtgggagagcctggacctgtacctgagcgaccccgagaactacctgctgaagaacggcaccagcgacgtgctgctgtgcggcaacagcagcgacgccggcacctgccccgagggctacagatgcctgaaggccggcgagaaccccgaccacggctacaccagcttcgacagcttcgcctgggccttcctggccctgttcagactgatgacccaggactgctgggagagactgtaccagcagaccctgagaagcgccggcaagatctacatgatcttcttcatgctggtgatcttcctgggcagcttctacctggtgaacctgatcctggccgtggtggccatggcctacgaggagcagaaccaggccaccatcgccgagaccgaggagaaggagaagagattccaggaggccatggagatgctgaagaaggagcacgaggccctgaccatcagaggcgtggacaccgtgagcagaagcagcctggagatgagccccctggcccccgtgaacagccacgagagaagaagcaagagaagaaagagaatgagcagcggcaccgaggagtgcggcgaggacagactgcccaagagcgacagcgaggacggccccagagccatgaaccacctgagcctgaccagaggcctgagcagaaccagcatgaagcccagaagcagcagaggcagcatcttcaccttcagaagaagagacctgggcagcgaggccgacttcgccgacgacgagaacagcaccgccggcgagagcgagagccaccacaccagcctgctggtgccctggcccctgagaagaaccagcgcccagggccagcccagccccggcaccagcgcccccggccacgccctgcacggcaagaagaacagcaccgtggactgcaacggcgtggtgagcctgctgggcgccggcgaccccgaggccaccagccccggcagccacctgctgagacccgtgatgctggagcacccccccgacaccaccacccccagcgaggagcccggcggcccccagatgctgaccagccaggccccctgcgtggacggcttcgaggagcccggcgccagacagagagccctgagcgccgtgagcgtgctgaccagcgccctggaggagctggaggagagcagacacaagtgccccccctgctggaacagactggcccagagatacctgatctgggagtgctgccccctgtggatgagcatcaagcagggcgtgaagctggtggtgatggaccccttcaccgacctgaccatcaccatgtgcatcgtgctgaacaccctgttcatggccctggagcactacaacatgaccagcgagttcgaggagatgctgcaggtgggcaacctggtgttcaccggcatcttcaccgccgagatgaccttcaagatcatcgccctggacccctactactacttccagcagggctggaacatcttcgacagcatcatcgtgatcctgagcctgatggagctgggcctgagcagaatgagcaacctgagcgtgctgagaagcttcagactgctgagagtgttcaagctggccaagagctggcccaccctgaacaccctgatcaagatcatcggcaacagcgtgggcgccctgggcaacctgaccctggtgctggccatcatcgtgttcatcttcgccgtggtgggcatgcagctgttcggcaagaactacagcgagctgagagacagcgacagcggcctgctgcccagatggcacatgatggacttcttccacgccttcctgatcatcttcagaatcctgtgcggcgagtggatcgagaccatgtgggactgcatggaggtgagcggccagagcctgtgcctgctggtgttcctgctggtgatggtgatcggcaacctggtggtgctgaacctgttcctggccctgctgctgagcagcttcagcgccgacaacctgaccgcccccgacgaggacagagagatgaacaacctgcagctggccctggccagaatccagagaggcctgagattcgtgaagagaaccacctgggacttctgctgcggcctgctgagacagagaccccagaagcccgccgccctggccgcccagggccagctgcccagctgcatcgccaccccctacagcccccccccccccgagaccgagaaggtgccccccaccagaaaggagaccagattcgaggagggcgagcagcccggccagggcacccccggcgaccccgagcccgtgtgcgtgcccatcgccgtggccgagagcgacaccgacgaccaggaggaggacgaggagaacagcctgggcaccgaggaggagagcagcaagcaggagagccagcccgtgagcggcggccccgaggccccccccgacagcagaacctggagccaggtgagcgccaccgccagcagcgaggccgaggccagcgccagccaggccgactggagacagcagtggaaggccgagccccaggcccccggctgcggcgagacccccgaggacagctgcagcgagggcagcaccgccgacatgaccaacaccgccgagctgctggagcagatccccgacctgggccaggacgtgaaggaccccgaggactgcttcaccgagggctgcgtgagaagatgcccctgctgcgccgtggacaccacccaggcccccggcaaggtgtggtggagactgagaaagacctgctaccacatcgtggagcacagctggttcgagaccttcatcatcttcatgatcctgctgagcagcggcgccctggccttcgaggacatctacctggaggagagaaagaccatcaaggtgctgctggagtacgccgacaagatgttcacctacgtgttcgtgctggagatgctgctgaagtgggtggcctacggcttcaagaagtacttcaccaacgcctggtgctggctggacttcctgatcgtggacgtgagcctggtgagcctggtggccaacaccctgggcttcgccgagatgggccccatcaagagcctgagaaccctgagagccctgagacccctgagagccctgagcagattcgagggcatgagagtggtggtgaacgccctggtgggcgccatccccagcatcatgaacgtgctgctggtgtgcctgatcttctggctgatcttcagcatcatgggcgtgaacctgttcgccggcaagttcggcagatgcatcaaccagaccgagggcgacctgcccctgaactacaccatcgtgaacaacaagagccagtgcgagagcctgaacctgaccggcgagctgtactggaccaaggtgaaggtgaacttcgacaacgtgggcgccggctacctggccctgctgcaggtggccaccttcaagggctggatggacatcatgtacgccgccgtggacagcagaggctacgaggagcagccccagtgggagtacaacctgtacatgtacatctacttcgtgatcttcatcatcttcggcagcttcttcaccctgaacctgttcatcggcgtgatcatcgacaacttcaaccagcagaagaagaagctgggcggccaggacatcttcatgaccgaggagcagaagaagtactacaacgccatgaagaagctgggcagcaagaagccccagaagcccatccccagacccctgaacaagtaccagggcttcatcttcgacatcgtgaccaagcaggccttcgacgtgaccatcatgttcctgatctgcctgaacatggtgaccatgatggtggagaccgacgaccagagccccgagaagatcaacatcctggccaagatcaacctgctgttcgtggccatcttcaccggcaccgtgctgagcgacatcatccagaagtacttcttcagccccaccctgttcagagtgatcagactggccagaatcggcagaatcctgagactgatcagaggcgccaagggcatcagaaccctgctgttcgccctgatgatgagcctgcccgccctgttcaacatcggcctgctgctgttcctggtgatgttcatctacagcatcttcggcatggccaacttcgcctacgtgaagtgggaggccggcatcgacgacatgttcaacttccagaccttcgccaacagcatgctgtgcctgttccagatcaccaccagcgccggctgggacggcctgctgagccccatcctgaacaccggccccccctactgcgaccccaccctgcccaacagcaacggcagcagaggcgactgcggcagccccgccgtgggcatcctgttcttcaccacctacatcatcatcagcttcctgatcgtggtgaacatgtacatcgccatcatcctggagaacttcagcgtggccaccgaggagagcaccgagcccctgagcgaggacgacttcgacatgttctacgagatctgggagaagttcgaccccgaggccacccagttcatcgagtacagcgtgctgagcgacttcgccgacgccctgagcgagcccctgagaatcgccaagcccaaccagatcagcctgatcaacatggacctgcccatggtgagcggcgacagaatccactgcatggacatcctgttcgccttcaccaagagagtgctgggcgagagcggcgagatggacgccctgaagatccagatggaggagaagttcatggccgccaaccccagcaagatcagctacgagcccatcaccaccaccctgagaagaaagcacgaggaggtgagcgccatggtgatccagagagccttcagaagacacctgctgcagagaagcctgaagcacgccagcttcctgttcagacagcaggccggcagcggcctgagcgaggaggacgcccccgagagagagggcctgatcgcctacgtgatgagcgagaacttcagcagacccctgggcccccccagcagcagcagcatcagcagcaccagcttcccccccagctacgacagcgtgaccagagccaccagcgacaacctgcaggtgagaggcagcgactacagccacagcgaggacctggccgacttcccccccagccccgacagagacagagagagcatcgtgtag

SEQ ID NO: 60800 - protein, 65 aa, Artificial Sequence
  derived and/or modified sequence
MANFLLPRGTSSFRRFTRESLAAIEKRMAEKQARGSTTLQESREGLPEEEAPRPQLDLQASKKLP

SEQ ID NO: 60801 - protein, 1962 aa, Artificial Sequence
  derived and/or modified sequence
MANFLLPRGTSSFRRFTRESLAAIEKRMAEKQARGSTTLQESREGLPEEEAPRPQLDLQASKKLPDLYGNPPQELIGEPLEDLDPFYSTQKTFIVLNKGKTIFRFSATNALYVLSPFHPIRRAAVKILVHSLFNMLIMCTILTNCVFMAQHDPPPWTKYVEYTFTAIYTFESLVKILARGFCLHAFTFLRDPWNWLDFSVIIMAYTTEFVDLGNVSALRTFRVLRALKTISVISGLKTIVGALIQSVKKLADVMVLTVFCLSVFALIGLQLFMGNLRHKCVRNFTALNGTNGSVEADGLVWESLDLYLSDPENYLLKNGTSDVLLCGNSSDAGTCPEGYRCLKAGENPDHGYTSFDSFAWAFLALFRLMTQDCWERLYQQTLRSAGKIYMIFFMLVIFLGSFYLVNLILAVVAMAYEEQNQATIAETEEKEKRFQEAMEMLKKEHEALTIRGVDTVSRSSLEMSPLAPVNSHERRSKRRKRMSSGTEECGEDRLPKSDSEDGPRAMNHLSLTRGLSRTSMKPRSSRGSIFTFRRRDLGSEADFADDENSTAGESESHHTSLLVPWPLRRTSAQGQPSPGTSAPGHALHGKKNSTVDCNGVVSLLGAGDPEATSPGSHLLRPVMLEHPPDTTTPSEEPGGPQMLTSQAPCVDGFEEPGARQRALSAVSVLTSALEELEESRHKCPPCWNRLAQRYLIWECCPLWMSIKQGVKLVVMDPFTDLTITMCIVLNTLFMALEHYNMTSEFEEMLQVGNLVFTGIFTAEMTFKIIALDPYYYFQQGWNIFDSIIVILSLMELGLSRMSNLSVLRSFRLLRVFKLAKSWPTLNTLIKIIGNSVGALGNLTLVLAIIVFIFAVVGMQLFGKNYSELRDSDSGLLPRWHMMDFFHAFLIIFRILCGEWIETMWDCMEVSGQSLCLLVFLLVMVIGNLVVLNLFLALLLSSFSADNLTAPDEDREMNNLQLALARIQRGLRFVKRTTWDFCCGLLRQRPQKPAALAAQGQLPSCIATPYSPPPPETEKVPPTRKETRFEEGEQPGQGTPGDPEPVCVPIAVAESDTDDQEEDEENSLGTEEESSKQTPEDSCSEGSTADMTNTAELLEQIPDLGQDVKDPEDCFTEGCVRRCPCCAVDTTQAPGKVWWRLRKTCYHIVEHSWFETFIIFMILLSSGALAFEDIYLEERKTIKVLLEYADKMFTYVFVLEMLLKWVAYGFKKYFTNAWCWLDFLIVDVSLVSLVANTLGFAEMGPIKSLRTLRALRPLRALSRFEGMRVVVNALVGAIPSIMNVLLVCLIFWLIFSIMGVNLFAGKFGRCINQTEGDLPLNYTIVNNKSQCESLNLTGELYWTKVKVNFDNVGAGYLALLQVATFKGWMDIMYAAVDSRGYEEQPQWEYNLYMYIYFVIFIIFGSFFTLNLFIGVIIDNFNQQKKKLGGQDIFMTEEQKKYYNAMKKLGSKKPQKPIPRPLNKYQGFIFDIVTKQAFDVTIMFLICLNMVTMMVETDDQSPEKINILAKINLLFVAIFTGECIVKLAALRHYYFTNSWNIFDFVVVILSIVGTVLSDIIQKYFFSPTLFRVIRLARIGRILRLIRGAKGIRTLLFALMMSLPALFNIGLLLFLVMFIYSIFGMANFAYVKWEAGIDDMFNFQTFANSMLCLFQITTSAGWDGLLSPILNTGPPYCDPTLPNSNGSRGDCGSPAVGILFFTTYIIISFLIVVNMYIAIILENFSVATEESTEPLSEDDFDMFYEIWEKFDPEATQFIEYSVLSDFADALSEPLRIAKPNQISLINMDLPMVSGDRIHCMDILFAFTKRVLGESGEMDALKIQMEEKFMAANPSKISYEPITTTLRRKHEEVSAMVIQRAFRRHLLQRSLKHASFLFRQQAGSGLSEEDAPEREGLIAYVMSENFSRPLGPPSSSSISSTSFPPSYDSVTRATSDNLQVRGSDYSHSEDLADFPPSPDRDRESIV

SEQ ID NO: 60802 - protein, 1962 aa, Artificial Sequence
  derived and/or modified sequence
MANFLLPRGTSSFRRFTRESLAAIEKRMAEKQARGSTTLQESREGLPEEEAPRPQLDLQASKKLPDLYGNPPQELIGEPLEDLDPFYSTQKTFIVLNKGKTIFRFSATNALYVLSPFHPIRRAAVKILVHSLFNMLIMCTILTNCVFMAQHDPPPWTKYVEYTFTAIYTFESLVKILARGFCLHAFTFLRDPWNWLDFSVIIMAYVSENIKLGNLSALRTFRVLRALKTISVIPGLKTIVGALIQSVKKLADVMVLTVFCLSVFALIGLQLFMGNLRHKCVRNFTALNGTNGSVEADGLVWESLDLYLSDPENYLLKNGTSDVLLCGNSSDAGTCPEGYRCLKAGENPDHGYTSFDSFAWAFLALFRLMTQDCWERLYQQTLRSAGKIYMIFFMLVIFLGSFYLVNLILAVVAMAYEEQNQATIAETEEKEKRFQEAMEMLKKEHEALTIRGVDTVSRSSLEMSPLAPVNSHERRSKRRKRMSSGTEECGEDRLPKSDSEDGPRAMNHLSLTRGLSRTSMKPRSSRGSIFTFRRRDLGSEADFADDENSTAGESESHHTSLLVPWPLRRTSAQGQPSPGTSAPGHALHGKKNSTVDCNGVVSLLGAGDPEATSPGSHLLRPVMLEHPPDTTTPSEEPGGPQMLTSQAPCVDGFEEPGARQRALSAVSVLTSALEELEESRHKCPPCWNRLAQRYLIWECCPLWMSIKQGVKLVVMDPFTDLTITMCIVLNTLFMALEHYNMTSEFEEMLQVGNLVFTGIFTAEMTFKIIALDPYYYFQQGWNIFDSIIVILSLMELGLSRMSNLSVLRSFRLLRVFKLAKSWPTLNTLIKIIGNSVGALGNLTLVLAIIVFIFAVVGMQLFGKNYSELRDSDSGLLPRWHMMDFFHAFLIIFRILCGEWIETMWDCMEVSGQSLCLLVFLLVMVIGNLVVLNLFLALLLSSFSADNLTAPDEDREMNNLQLALARIQRGLRFVKRTTWDFCCGLLRQRPQKPAALAAQGQLPSCIATPYSPPPPETEKVPPTRKETRFEEGEQPGQGTPGDPEPVCVPIAVAESDTDDQEEDEENSLGTEEESSKQTPEDSCSEGSTADMTNTAELLEQIPDLGQDVKDPEDCFTEGCVRRCPCCAVDTTQAPGKVWWRLRKTCYHIVEHSWFETFIIFMILLSSGALAFEDIYLEERKTIKVLLEYADKMFTYVFVLEMLLKWVAYGFKKYFTNAWCWLDFLIVDVSLVSLVANTLGFAEMGPIKSLRTLRALRPLRALSRFEGMRVVVNALVGAIPSIMNVLLVCLIFWLIFSIMGVNLFAGKFGRCINQTEGDLPLNYTIVNNKSQCESLNLTGELYWTKVKVNFDNVGAGYLALLQVATFKGWMDIMYAAVDSRGYEEQPQWEYNLYMYIYFVIFIIFGSFFTLNLFIGVIIDNFNQQKKKLGGQDIFMTEEQKKYYNAMKKLGSKKPQKPIPRPLNKYQGFIFDIVTKQAFDVTIMFLICLNMVTMMVETDDQSPEKINILAKINLLFVAIFTGECIVKLAALRHYYFTNSWNIFDFVVVILSIVGTVLSDIIQKYFFSPTLFRVIRLARIGRILRLIRGAKGIRTLLFALMMSLPALFNIGLLLFLVMFIYSIFGMANFAYVKWEAGIDDMFNFQTFANSMLCLFQITTSAGWDGLLSPILNTGPPYCDPTLPNSNGSRGDCGSPAVGILFFTTYIIISFLIVVNMYIAIILENFSVATEESTEPLSEDDFDMFYEIWEKFDPEATQFIEYSVLSDFADALSEPLRIAKPNQISLINMDLPMVSGDRIHCMDILFAFTKRVLGESGEMDALKIQMEEKFMAANPSKISYEPITTTLRRKHEEVSAMVIQRAFRRHLLQRSLKHASFLFRQQAGSGLSEEDAPEREGLIAYVMSENFSRPLGPPSSSSISSTSFPPSYDSVTRATSDNLQVRGSDYSHSEDLADFPPSPDRDRESIV

SEQ ID NO: 60803 - DNA, 8343 bp, Artificial Sequence
  derived and/or modified sequence
gagacggcggcggcgcccgtaggatgcagggatcgctcccccggggccgctgagcctgcgcccagtgccccgagccccgcgccgagccgagtccgcgccaagcagcagccgcccaccccggggcccggccgggggaccagcagcttccccacaggcaacgtgaggagagcctgtgcccagaagcaggatgagaagatggcaaacttcctattacctcggggcaccagcagcttccgcaggttcacacgggagtccctggcagccatcgagaagcgcatggcagagaagcaagcccgcggctcaaccaccttgcaggagagccgagaggggctgcccgaggaggaggctccccggccccagctggacctgcaggcctccaaaaagctgccagatctctatggcaatccaccccaagagctcatcggagagcccctggaggacctggaccccttctatagcacccaaaagactttcatcgtactgaataaaggcaagaccatcttccggttcagtgccaccaacgccttgtatgtcctcagtcccttccaccccatccggagagcggctgtgaagattctggttcactcgctcttcaacatgctcatcatgtgcaccatcctcaccaactgcgtgttcatggcccagcacgaccctccaccctggaccaagtatgtcgagtacaccttcaccgccatttacacctttgagtctctggtcaagattctggctcgaggcttctgcctgcacgcgttcactttccttcgggacccatggaactggctggactttagtgtgattatcatggcgtatgtatcagaaaatataaaactaggcaatttgtcggctcttcgaactttcagagtcctgagagctctaaaaactatttcagttatcccagggctgaagaccatcgtgggggccctgatccagtctgtgaagaagctggctgatgtgatggtcctcacagtcttctgcctcagcgtctttgccctcatcggcctgcagctcttcatgggcaacctaaggcacaagtgcgtgcgcaacttcacagcgctcaacggcaccaacggctccgtggaggccgacggcttggtctgggaatccctggacctttacctcagtgatccagaaaattacctgctcaagaacggcacctctgatgtgttactgtgtgggaacagctctgacgctgggacatgtccggagggctaccggtgcctaaaggcaggcgagaaccccgaccacggctacaccagcttcgattcctttgcctgggcctttcttgcactcttccgcctgatgacgcaggactgctgggagcgcctctatcagcagaccctcaggtccgcagggaagatctacatgatcttcttcatgcttgtcatcttcctggggtccttctacctggtgaacctgatcctggccgtggtcgcaatggcctatgaggagcaaaaccaagccaccatcgctgagaccgaggagaaggaaaagcgcttccaggaggccatggaaatgctcaagaaagaacacgaggccctcaccatcaggggtgtggataccgtgtcccgtagctccttggagatgtcccctttggccccagtaaacagccatgagagaagaagcaagaggagaaaacggatgtcttcaggaactgaggagtgtggggaggacaggctccccaagtctgactcagaagatggtcccagagcaatgaatcatctcagcctcacccgtggcctcagcaggacttctatgaagccacgttccagccgcgggagcattttcacctttcgcaggcgagacctgggttctgaagcagattttgcagatgatgaaaacagcacagcgggggagagcgagagccaccacacatcactgctggtgccctggcccctgcgccggaccagtgcccagggacagcccagtcccggaacctcggctcctggccacgccctccatggcaaaaagaacagcactgtggactgcaatggggtggtctcattactgggggcaggcgacccagaggccacatccccaggaagccacctcctccgccctgtgatgctagagcacccgccagacacgaccacgccatcggaggagccaggcgggccccagatgctgacctcccaggctccgtgtgtagatggcttcgaggagccaggagcacggcagcgggccctcagcgcagtcagcgtcctcaccagcgcactggaagagttagaggagtctcgccacaagtgtccaccatgctggaaccgtctcgcccagcgctacctgatctgggagtgctgcccgctgtggatgtccatcaagcagggagtgaagttggtggtcatggacccgtttactgacctcaccatcactatgtgcatcgtactcaacacactcttcatggcgctggagcactacaacatgacaagtgaattcgaggagatgctgcaggtcggaaacctggtcttcacagggattttcacagcagagatgaccttcaagatcattgccctcgacccctactactacttccaacagggctggaacatcttcgacagcatcatcgtcatccttagcctcatggagctgggcctgtcccgcatgagcaacttgtcggtgctgcgctccttccgcctgctgcgggtcttcaagctggccaaatcatggcccaccctgaacacactcatcaagatcatcgggaactcagtgggggcactggggaacctgacactggtgctagccatcatcgtgttcatctttgctgtggtgggcatgcagctctttggcaagaactactcggagctgagggacagcgactcaggcctgctgcctcgctggcacatgatggacttctttcatgccttcctcatcatcttccgcatcctctgtggagagtggatcgagaccatgtgggactgcatggaggtgtcggggcagtcattatgcctgctggtcttcttgcttgttatggtcattggcaaccttgtggtcctgaatctcttcctggccttgctgctcagctccttcagtgcagacaacctcacagcccctgatgaggacagagagatgaacaacctccagctggccctggcccgcatccagaggggcctgcgctttgtcaagcggaccacctgggatttctgctgtggtctcctgcggcagcggcctcagaagcccgcagcccttgccgcccagggccagctgcccagctgcattgccaccccctactccccgccacccccagagacggagaaggtgcctcccacccgcaaggaaacacggtttgaggaaggcgagcaaccaggccagggcacccccggggatccagagcccgtgtgtgtgcccatcgctgtggccgagtcagacacagatgaccaagaagaagatgaggagaacagcctgggcacggaggaggagtccagcaagcagaccccagaggacagttgctccgagggcagcacagcagacatgaccaacaccgctgagctcctggagcagatccctgacctcggccaggatgtcaaggacccagaggactgcttcactgaaggctgtgtccggcgctgtccctgctgtgcggtggacaccacacaggccccagggaaggtctggtggcggttgcgcaagacctgctaccacatcgtggagcacagctggttcgagacattcatcatcttcatgatcctactcagcagtggagcgctggccttcgaggacatctacctagaggagcggaagaccatcaaggttctgcttgagtatgccgacaagatgttcacatatgtcttcgtgctggagatgctgctcaagtgggtggcctacggcttcaagaagtacttcaccaatgcctggtgctggctcgacttcctcatcgtagacgtctctctggtcagcctggtggccaacaccctgggctttgccgagatgggccccatcaagtcactgcggacgctgcgtgcactccgtcctctgagagctctgtcacgatttgagggcatgagggtggtggtcaatgccctggtgggcgccatcccgtccatcatgaacgtcctcctcgtctgcctcatcttctggctcatcttcagcatcatgggcgtgaacctctttgcggggaagtttgggaggtgcatcaaccagacagagggagacttgcctttgaactacaccatcgtgaacaacaagagccagtgtgagtccttgaacttgaccggagaattgtactggaccaaggtgaaagtcaactttgacaacgtgggggccgggtacctggcccttctgcaggtggcaacatttaaaggctggatggacattatgtatgcagctgtggactccagggggtatgaagagcagcctcagtgggaatacaacctctacatgtacatctattttgtcattttcatcatctttgggtctttcttcaccctgaacctctttattggtgtcatcattgacaacttcaaccaacagaagaaaaagttagggggccaggacatcttcatgacagaggagcagaagaagtactacaatgccatgaagaagctgggctccaagaagccccagaagcccatcccacggcccctgaacaagtaccagggcttcatattcgacattgtgaccaagcaggcctttgacgtcaccatcatgtttctgatctgcttgaatatggtgaccatgatggtggagacagatgaccaaagtcctgagaaaatcaacatcttggccaagatcaacctgctctttgtggccatcttcacaggcgagtgtattgtcaagctggctgccctgcgccactactacttcaccaacagctggaatatcttcgacttcgtggttgtcatcctctccatcgtgggcactgtgctctcggacatcatccagaagtacttcttctccccgacgctcttccgagtcatccgcctggcccgaataggccgcatcctcagactgatccgaggggccaaggggatccgcacgctgctctttgccctcatgatgtccctgcctgccctcttcaacatcgggctgctgctcttcctcgtcatgttcatctactccatctttggcatggccaacttcgcttatgtcaagtgggaggctggcatcgacgacatgttcaacttccagaccttcgccaacagcatgctgtgcctcttccagatcaccacgtcggccggctgggatggcctcctcagccccatcctcaacactgggccgccctactgcgaccccactctgcccaacagcaatggctctcggggggactgcgggagcccagccgtgggcatcctcttcttcaccacctacatcatcatctccttcctcatcgtggtcaacatgtacattgccatcatcctggagaacttcagcgtggccacggaggagagcaccgagcccctgagtgaggacgacttcgatatgttctatgagatctgggagaaatttgacccagaggccactcagtttattgagtattcggtcctgtctgactttgccgatgccctgtctgagccactccgtatcgccaagcccaaccagataagcctcatcaacatggacctgcccatggtgagtggggaccgcatccattgcatggacattctctttgccttcaccaaaagggtcctgggggagtctggggagatggacgccctgaagatccagatggaggagaagttcatggcagccaacccatccaagatctcctacgagcccatcaccaccacactccggcgcaagcacgaagaggtgtcggccatggttatccagagagccttccgcaggcacctgctgcaacgctctttgaagcatgcctccttcctcttccgtcagcaggcgggcagcggcctctccgaagaggatgcccctgagcgagagggcctcatcgcctacgtgatgagtgagaacttctcccgaccccttggcccaccctccagctcctccatctcctccacttccttcccaccctcctatgacagtgtcactagagccaccagcgataacctccaggtgcgggggtctgactacagccacagtgaagatctcgccgacttccccccttctccggacagggaccgtgagtccatcgtgtgagcctcggcctggctggccaggacacactgaaaagcagcctttttcaccatggcaaacctaaatgcagtcagtcacaaaccagcctggggccttcctggctttgggagtaagaaatgggcctcagccccgcggatcaaccaggcagagttctgtggcgccgcgtggacagccggagcagttggcctgtgcttggaggcctcagatagacctgtgacctggtctggtcaggcaatgccctgcggctctggaaagcaacttcatcccagctgctgaggcgaaatataaaactgagactgtatatgttgtgaatgggctttcataaatttattatatttgatatttttttacttgagcaaagaactaaggatttttccatggacatgggcagcaattcacgctgtctcttcttaaccctgaacaagagtgtctatggagcagccggaagtctgttctcaaagcagaagtggaatccagtgtggctcccacaggtcttcactgcccaggggtcgaatggggtccccctcccacttgacctgagatgctgggagggctgaacccccactcacacaagcacacacacacagtcctcacacacggaggccagacacaggccgtgggacccaggctcccagcctaagggagacaggcctttccctgccggccccccaaggatggggttcttgtccacggggctcactctggccccctattgtctccaaggtcccattttccccctgtgttttcacgcaggtcatattgtcagtcctacaaaaataaaaggcttccagaggagagtggcctgggtcccagggctggccctaggcactgatagttgccttttcttcccctcctgtaagagtattaacaaaaccaaaggacacaagggtgcaagccccattcacggcctggcatgcagcttgtccttgctcctggaacctggcaggccctgcccagccagccatcggaagagagggctgagccatgggggtttggggctaagaagttcaccagccctgagccatggcggcccctcagcctgcctgaagagaggaaactggcgatctcccagggctctctggaccatacgcggaggagttttctgtgtggtctccagctcctctccagacacagagacatgggagtggggagcggagcttggccctgcgccctgtgcagggaaagggatggtcaggcccagttctcgtgcccttagaggggaatgaaccatggcacctttgagagagggggcactgtggtcaggcccagcctctctggctcagcccgggatcctgatggcacccacacagaggacctctttggggcaagatccaggtggtcccataggtcttgtgaaaaggctttttcagggaaaaatattttactagtccaatcacccccaggacctcttcagctgctgacaatcctatttagcatatgcaaatcttttaacatagagaactgtcaccctgaggtaacagggtcaactggcgaagcctgagcaggcaggggcttggctgccccattccagctctcccatggagcccctccaccgggcgcatgcctcccaggccacctcagtctcacctgccggctctgggctggctgctcctaacctacctcgccgagctgtcggagggctggacatttgtggcagtgctgaagggggcattgccggcgagtaaagtattatgtttcttcttgtcaccccagttcccttggtggcaaccccagacccaacccatgcccctgacagatctagttctcttctcctgtgttccctttgagtccagtgtgggacacggtttaactgtcccagcgacatttctccaagtggaaatcctatttttgtagatctccatgctttgctctcaaggcttggagaggtatgtgcccctcctgggtgctcaccgcctgctacacaggcaggaatgcggttgggaggcaggtcgggctgccagcccagctggccggaaggagactgtggtttttgtgtgtgtggacagcccgggagctttgagacaggtgcctggggctggctgcagacggtgtggttgggggtgggaggtgagctagacccaacccttagcttttagcctggctgtcacctttttaatttccagaactgcacaatgaccagcaggagggaaggacagacatcaagtgccagatgttgtctgaactaatcgagcacttctcaccaaacttcatgtataaataaaatacatatttttaaaacaaaccaataaatggcttacatga

SEQ ID NO: 60804 - DNA, 198 bp, Artificial Sequence
  derived and/or modified sequence
atggcaaatttcctgctgcctcgaggaacatcaagttttcgccggtttacgcgtgaatccctggccgcgatcgagaagaggatggcagaaaagcaagcccgtggcagcacaaccctgcaggagtctcgggaaggcctgcccgaggaagaagctcctcggcctcagttggatttgcaggcgtcaaaaaagctgccctag

SEQ ID NO: 60805 - DNA, 5889 bp, Artificial Sequence
  derived and/or modified sequence
atggctaactttttattgccacgcggcacatcttcctttagaagatttacccgggagtctctagcagcaattgagaagagaatggcggagaagcaggctcggggatccaccaccttgcaagaatcccgggaggggctgcctgaggaagaagccccgcgtccacagttagacttacaggcgagcaagaagttgccagacctgtatggaaatccccctcaagagctgattggggagcctctcgaagatcttgatcccttttatagtacgcagaagaccttcattgtgttgaataaaggaaagacaatcttccggttctcagccaccaacgccctgtacgtgctgtctccgttccaccccattcgcagagcagctgtcaagatcctagtccacagtctctttaacatgctgattatgtgtacgatactcacaaactgcgtcttcatggcccagcatgacccacccccttggaccaaatatgtggagtatacctttactgccatttataccttcgaatccctagttaaaatcttggctcggggcttctgtttacacgccttcacctttcttagagatccatggaattggctggatttttcggtgattatcatggcctacacaactgagtttgtggatttgggaaatgtttcagccctgcgcactttccgggtacttcgggctctcaagacaatatctgtgatcagcggattgaaaacaattgtgggagctctgatccaatcagtcaagaagctggccgacgtgatggtgctgaccgttttctgtttgtccgtgttcgctctcataggactacagctgtttatggggaatcttagacacaaatgcgttaggaatttcacggctttgaacggcacgaacgggagcgtggaagcggatgggcttgtctgggagagcctggacttatacctgtccgatccggagaactatctgctgaagaatggaacgagcgatgtactgttatgcggcaacagttcggatgctggaacctgcccagaggggtataggtgcctcaaagccggagaaaaccccgatcatggatacacttcattcgactcctttgcatgggccttcctggccctatttcggctgatgacacaagattgctgggagcggctgtatcagcagaccctgcggtctgccggcaagatctatatgatcttctttatgttggtgattttcttgggaagcttctacctcgtaaatcttatcctggctgtggtggccatggcatatgaagaacagaatcaggcgactattgccgagaccgaggagaaggagaagcgatttcaggaggccatggaaatgctcaagaaagagcatgaggctctaacaattagaggcgtcgacactgtgtcacggtcctccctcgagatgagccctttggcacccgttaactcacacgaaagacgctctaaaaggcggaagcgaatgtcatcgggaaccgaggaatgcggcgaggatcgcctgccgaagtcagacagcgaagatgggccacgggccatgaaccacttgagcttaacaagagggctgtcgcgcacatccatgaagccgcggtcctctcgtgggagtatttttacgttcaggcggcgcgatctcgggagcgaggctgacttcgcagacgatgaaaactccacggccggagaatccgaaagtcatcacacttcccttctcgtcccgtggcctcttcgtcggacttcagcccagggtcaaccctcccccgggaccagcgctcctggacacgcccttcacggaaagaagaattctacagtcgactgtaatggagtcgtgagtctcctgggcgctggtgatcccgaggccacatccccaggatctcatctgctcaggccagttatgctggagcatccacccgacacgacaacaccttccgaggaacccgggggccctcagatgctgacctcacaggccccatgtgtggacggcttcgaggaacctggtgcccggcagagggccctctccgctgtgtctgtcctgacaagcgcccttgaagagctggaggagtcgagacataaatgcccaccctgctggaaccggttggctcagaggtatctcatatgggagtgttgtccactgtggatgtcaataaagcagggcgttaagctggtagtgatggacccattcaccgaccttaccataacaatgtgcatcgtgcttaatactctgtttatggcgttagagcactataacatgacgagcgaattcgaggagatgttgcaggtcggtaacctggtttttacagggatttttactgcagaaatgacctttaaaattatagccctggatccctattattatttccagcagggatggaatatcttcgattcaatcatagtgatcctgagtttaatggagctgggattgtcccgtatgtccaacctgtccgtgctcagatcttttagattgctgcgagtgttcaagctcgccaagagttggcccactttgaacacactgattaagatcattggaaacagcgttggcgcgttggggaacctgactttggtgctggcaattatcgtgttcatctttgctgtggtggggatgcagctctttggcaaaaattatagtgagttaagagattcagatagcgggctgctaccaaggtggcatatgatggacttctttcatgcatttttaatcatatttaggattctgtgtggtgaatggattgaaacaatgtgggattgtatggaagtgtctggtcaatccctgtgccttttagtcttcctgctggttatggtgattgggaatctggtggtgctcaatctattcttagccctgcttctatcaagctttagcgccgataacctaactgcacccgatgaggatagggaaatgaacaatctgcagctggccctggccaggatacagcgaggcttgagattcgtgaagagaactacttgggacttttgctgtggactgttgaggcaacgcccgcagaagcccgccgctctggctgctcagggccaactcccttcctgcatcgccacgccttactccccacctccacctgagacagagaaagtgccaccaacccgaaaagagacgcggttcgaggaaggcgagcagcctggtcaagggaccccaggggatcctgaaccagtatgcgtgcctattgccgtcgcggaatccgataccgacgaccaggaggaggacgaggaaaatagcttgggcactgaagaggaatcaagtaagcagaccccagaagattcctgttctgaggggtccaccgcagatatgactaataccgccgagttgctcgagcaaattcctgatctcggacaggatgtgaaggatcctgaggattgctttacggaagggtgtgtgcgacgctgcccatgctgtgctgtagatacgactcaggcccctggtaaagtatggtggagattacgcaagacatgttaccatattgtggaacactcctggttcgaaacgtttatcatctttatgattttgctctcatctggagcacttgccttcgaagacatctacctggaagagcgtaaaacgattaaggttcttcttgagtatgccgataaaatgtttacttatgtcttcgtgctcgaaatgcttctgaagtgggtggcttacggattcaagaagtacttcactaacgcttggtgctggttggactttctgatcgtcgacgtcagcctggtgtcactggtggctaatacgctagggtttgccgaaatgggacctattaaatctctgcgaactctgagggcactgaggcccctccgcgcactctcccggttcgaggggatgagagtggtcgtgaatgctctggtaggagcaataccctcgatcatgaacgtcttgcttgtttgcttgatcttctggttgatctttagcatcatgggggttaacctgttcgcaggtaagttcgggcgttgtatcaaccagactgaaggagacctccctttgaactacaccattgttaacaataaatcacagtgcgagtccttgaacctgactggggagctgtactggaccaaagtgaaagtaaattttgacaatgtgggagcaggatacctcgccctgctccaggtcgcgactttcaagggatggatggacattatgtacgccgccgtggactcaagaggatatgaagaacagcctcagtgggagtataatctgtacatgtatatctacttcgtaatttttatcatttttggctctttttttacccttaacctttttatcggggtgatcattgataacttcaatcaacaaaagaaaaagttgggaggacaggacatctttatgactgaagaacagaagaagtactacaacgcaatgaaaaaactgggtagcaaaaagcctcagaagcccattcctagaccattgaataaataccagggattcatttttgatatagtcacaaaacaagcatttgacgtcaccatcatgttcctcatttgtctgaacatggtgacaatgatggtcgagacagacgatcagtctccggagaagatcaacattcttgccaaaatcaaccttctatttgtagccattttcaccggagagtgcattgtgaagctggccgctctgcgacattactacttcacaaacagttggaatatatttgactttgtcgttgtcatcctatctattgttggaactgttctatccgatattattcagaagtactttttttccccaactttgtttcgcgtaatccgcctggctcgtatcggtagaattcttcggctgattagaggggcgaaggggatacggacgctactctttgcgctcatgatgtccttacctgccctctttaacatcggactcctcctgtttctcgtgatgttcatttacagtatcttcggaatggccaattttgcctatgtcaagtgggaggcagggattgacgatatgtttaattttcaaacgtttgccaattcaatgctatgtcttttccagattactacatctgcaggctgggacggccttctatcccctatacttaacactggccctccgtattgcgatccaaccctgcccaacagcaacgggagccggggtgactgtggctcccccgccgtggggatattgtttttcaccacatacatcataatttccttcctgatcgtagtcaatatgtatatcgctataatactcgaaaacttctcagtggccaccgaagagagtaccgagccgctgtccgaggacgacttcgatatgttttacgagatctgggagaaattcgatccggaggcaacgcagtttatcgaatattccgtgctctcagattttgccgatgctctctccgagcccctgaggatcgctaagcccaaccagatcagtttgattaacatggatctcccaatggtgagtggggaccggatccattgcatggacatcctgttcgccttcactaaacgggtgttaggggaatctggggagatggatgcactgaagatacagatggaggagaagtttatggctgccaacccgagcaagatatcctatgaacctattacgaccacattacgccgcaagcacgaagaagtttccgccatggtgatccaaagggctttccgtcggcaccttcttcagagaagtctgaagcacgcttcttttctctttagacagcaggcaggatctggcctcagcgaggaggatgcgccagaaagggagggactgattgcctacgtcatgagtgagaatttctcgcgcccattagggcctcctagctcgagcagcatctcctctacgagctttcctccctcctacgacagtgtcacaagggcgacatctgacaacttgcaggtgcgcggctctgattactctcatagcgaggatctggcagacttcccccctagtcctgatcgcgacagagagtcaatcgtgtag

SEQ ID NO: 60806 - DNA, 5889 bp, Artificial Sequence
  derived and/or modified sequence
atggctaacttcctgctaccccggggaacttcaagcttccgccgtttcactcgggaatccctggccgcgatcgagaaacggatggctgaaaagcaagcgcgggggtctactaccctgcaggagtcacgtgaaggtctgccagaggaggaggcccctcgcccccagttggaccttcaagcttctaagaaactgccagacctgtatggcaaccctccccaggaactaatcggcgagcctctggaggatctggaccctttctattcaacacagaagacctttatcgtcttgaacaaaggtaaaaccatttttcgcttcagcgctactaatgccctttatgtcttatccccattccatcctattcgtagagccgccgtgaagattcttgtccactccttgtttaacatgctcatcatgtgcaccattctcacaaactgtgttttcatggcacaacacgaccccccaccttggacgaaatacgtggagtacaccttcactgcgatctatacttttgaatctttggtgaagatactggcccgcgggttttgtctacatgccttcaccttcctaagggacccatggaattggcttgatttttctgtaattataatggcttatgtgtcagagaatatcaagctgggtaatttatctgcacttcggacctttagggtgcttagggcccttaagacgatttcagtaatcccagggttgaaaacaatcgtcggtgctctgattcaatctgttaaaaagctagccgacgttatggtgttgacagtgttttgcctgtcagttttcgccctgatcggcttgcaattgtttatgggaaatttacggcataaatgtgtgaggaattttactgctctgaacggaactaatgggagcgtcgaggcggatgggctcgtgtgggaatctttggacttgtacttgtccgatcctgaaaactacctgctgaaaaacggcacgtctgacgtcttgttatgcggaaattcctctgacgccggaacatgccctgaaggctacagatgtctgaaggccggcgagaatcccgatcacggctatacaagctttgattctttcgcatgggcatttttggcactgttccgtctgatgacacaggactgctgggagcgtttatatcagcagactttacggagcgcagggaaaatttatatgatattctttatgctggtgatcttcctgggcagtttctatttagtaaatctgatccttgctgtggtcgccatggcttacgaggaacaaaaccaggctacaattgcagagactgaggagaaggagaaacgctttcaggaggccatggagatgcttaagaaagagcatgaggcattgactattcgcggagtggacaccgtcagccggtccagtcttgaaatgtctccactggcaccagttaatagccatgagcggcgtagcaagagacgcaagaggatgtcatccggtactgaagagtgcggcgaggaccggctgcccaagtcggattcagaggatggcccccgagctatgaatcatctgtccctgactcgcggcctttcacgcacctctatgaaaccccggtcttcccggggatctatctttacattcagaagaagggacctcgggtccgaagccgatttcgcggatgacgagaactccacggctggcgagagtgagagccaccacacaagcctgctggtaccatggccactgcggcgcacctccgcccaaggccaaccgagcccaggaactagcgctcctggccacgccctgcacggcaagaagaattcaaccgtggattgcaatggcgtcgttagtctcctgggggccggggacccggaggcaaccagtcccggaagccatctcctgagaccagtgatgctggaacaccctccagataccacaactccctcagaagagccaggcggtccgcaaatgttgacctcccaggccccctgtgtggacggatttgaagagccaggcgctagacaacgcgcattgtccgctgtgtccgttctgacctctgccctggaggaattagaggagtccaggcacaagtgtccaccctgctggaaccggctggcacagcgctacctgatatgggaatgctgtcccctgtggatgtcaattaagcagggggttaaactggtcgtgatggacccctttactgacctcactatcacaatgtgtattgtcctaaacacactcttcatggctctggaacactataacatgacctccgagtttgaggaaatgctgcaggtggggaacctggtttttacaggaattttcacggccgaaatgacatttaagattatcgcactcgacccctactattattttcagcagggctggaacatcttcgacagcatcattgtgattctcagcctaatggagttaggccttagcagaatgagcaacctaagcgtgttgcggtcatttcgtttgctacgcgtgtttaagctagccaagagctggcccaccctcaatacacttattaaaatcattggcaatagcgttggcgcgcttggcaacctcactctggtcttagcaatcatcgtctttatctttgcagtggttggcatgcaattgtttgggaaaaattactccgaattacgcgactctgattcaggactgttacccagatggcatatgatggacttctttcatgcattcttgattatcttcagaatcctgtgcggcgagtggatcgagactatgtgggattgcatggaggtgtccgggcagtccctgtgtctgttggtgtttcttttggtgatggtgatcgggaaccttgtagtcttgaaccttttcctcgccctgctgctttccagcttcagcgctgataacttgacagcccctgatgaggacagagaaatgaataacctgcagcttgccctcgcacgcatacagcgcggattaaggttcgttaaacgtacaacttgggacttctgctgtggcctgcttcgccagcggccccagaaacccgcggcactggcagcgcaggggcaactgccttcatgtatcgccaccccatactccccaccgccaccagaaaccgagaaggtcccccctacgaggaaggagactcgattcgaggaaggggaacaacccggtcagggcaccccgggtgatcctgagccagtgtgcgttccgatagctgttgccgagagtgatactgacgaccaagaggaagatgaggaaaattcactaggcaccgaggaggaaagctcaaaacagacccctgaagattcatgctcagagggcagcactgccgatatgaccaacactgcagaactgttggaacaaataccagacctgggacaggatgtcaaggatccagaggactgtttcaccgagggctgcgtcagacgctgtccatgttgtgcagtggatactactcaagctcccgggaaggtgtggtggcgcttgcgcaagacgtgctaccacattgttgagcacagttggtttgagacgttcattatctttatgattctcctgtcttctggggcgctggcttttgaggacatctaccttgaggagcggaaaactattaaggtgttactggagtacgctgataagatgtttacttacgtgttcgtattggaaatgttactgaaatgggtcgcctacgggtttaagaagtattttacaaatgcctggtgttggctcgacttcctaattgtagacgtgtccctcgtctcactggtggcgaacacactgggatttgcggagatgggtccaatcaaatctctcaggacactccgggccctgagacctctgagggctctgagccggttcgagggcatgagggtcgtggtgaatgccctggtcggggccattccctccatcatgaatgttcttctggtgtgcttgattttctggctcatcttctctatcatgggagtgaatctttttgctggcaaattcggcaggtgcattaaccagactgaaggggatttaccattgaactacaccatcgtaaataacaagagccaatgtgagagtttaaacctgacaggggaactatattggactaaggtgaaagtgaactttgataacgttggtgctggctatctggcgctgctccaagttgcaacattcaaggggtggatggacattatgtacgcagctgtcgactcccgcggctacgaggagcaaccccaatgggagtacaacctgtacatgtacatctactttgttatcttcattattttcggtagcttctttacattgaatttatttataggagtgatcatcgataactttaaccagcagaagaagaaattaggtgggcaggatattttcatgaccgaagaacagaagaaatactacaatgcgatgaagaagctgggatctaaaaagccgcagaaacccatcccccgacctctgaacaagtatcagggattcattttcgatatcgtgacaaagcaggccttcgacgtgacaatcatgttccttatctgtcttaacatggttaccatgatggtggaaacagatgatcagtcaccagaaaagattaatatcctggctaagattaatctgttgttcgtggcgatcttcacaggcgagtgcattgttaaactcgccgcactcagacattattacttcactaattcatggaatatctttgactttgtagtggtcattcttagcatcgtgggcacggtgttgtccgatatcatccaaaagtactttttttcacctaccctgttcagagtgatcagattggctagaattgggcgcatcctgagattaatccgcggagcaaagggtatcagaaccttactcttcgcccttatgatgtctctgcctgcactattcaacatcggactgctgctgtttctggtaatgtttatttactcgatatttggcatggccaattttgcatacgtgaagtgggaggcaggcattgatgacatgttcaatttccagacctttgccaatagcatgctgtgtctattccagatcacgacttccgccgggtgggacgggcttctctcgcctatcttgaatactgggcctccgtactgcgaccctaccctgcctaattctaatggttcaaggggcgactgtggatcgcctgctgtggggatactgtttttcaccacgtatatcatcatttcttttctgatcgtggttaatatgtacatcgctatcatcttggaaaactttagcgtggcaaccgaggagtcgaccgaaccattatctgaggatgactttgatatgttctacgaaatctgggagaaatttgacccggaagcaacacagttcatcgagtactccgtgttgagtgatttcgctgatgccctgtctgaacccttaaggattgcaaaacctaatcaaatctccctgatcaacatggacttgcctatggtgtctggagatcgaatacattgcatggatatcttgttcgcgttcaccaagcgagtgctgggtgaaagcggagaaatggacgcactgaagatccaaatggaagaaaaatttatggcagccaacccttcaaagatatcttatgaacccattacaactactttacgccggaaacacgaggaagtgtcagctatggtgattcagcgcgcttttcggcggcatttgttacagcggtcgctgaagcacgcaagcttcctatttcggcagcaggcgggcagtgggctgtctgaagaagatgcgcccgagagagagggactcatcgcctatgttatgagtgagaatttcagcaggcctctgggcccaccctcgtcaagttccataagtagtacgagctttccccctagctacgatagcgttacaagggccacgagcgataacttgcaggtgaggggcagcgattacagccattccgaggacctggccgacttcccacctagtccggacagagatcgagaatctattgtgtag

SEQ ID NO: 60807 - DNA, 5889 bp, Artificial Sequence
  derived and/or modified sequence
atggccaatttccttctcccccgtggtactagttccttccgacgcttcacccgggagagtctagccgccatcgaaaaaagaatggcggaaaagcaggctcgcgggtccaccactctgcaggaatcaagggaaggacttcctgaggaagaagccccacgcccacagctggaccttcaggcctctaagaaactgcctgatctatatggcaatccaccccaggagttaattggggaacctctcgaggacctagaccccttctactctacacagaaaaccttcatcgtcctaaataaaggaaaaaccatatttaggttctccgctacgaatgctttatacgttctgtcaccctttcatcccattaggagagctgccgtgaaaatcttggtgcacagcctgtttaatatgttaattatgtgcactatacttacaaattgcgtgttcatggcgcaacacgaccctcccccatggactaaatacgttgagtatactttcaccgccatctataccttcgaaagcttggttaaaatcctcgcaagaggattctgcctccatgcctttaccttcttacgtgacccttggaattggttagactttagtgttatcataatggcgtacgtcagcgaaaatatcaagctgggaaacctttccgcccttcggacctttcgcgtgctgcgcgcgcttaagaccattagcgtgattcctgggttgaagaccatcgtcggagctcttattcagtccgtcaaaaaactggctgacgtgatggtcttaactgtgttctgtcttagtgtgttcgctttgattggactccagttgttcatgggtaacctacgacacaaatgtgtgaggaactttacagctctgaacggtaccaatggaagcgtggaagccgatgggcttgtgtgggaaagcttagatttgtatctgtccgatccagaaaactatctcctgaagaatggtacgtccgacgtccttttatgcggcaactcaagcgatgctggcacctgtccagaaggctaccgctgcctcaaggctggagaaaaccctgaccatggctacactagttttgacagcttcgcctgggcatttctggcactgttccgtttgatgactcaggattgttgggaacgcttgtaccagcagactctgagatccgctgggaagatatacatgatcttcttcatgctcgtgatctttctgggttctttctatctggtgaatttgatcttagcagtggtggctatggcatacgaggagcagaaccaggccaccatcgcggagaccgaggagaaggaaaagcggttccaggaggccatggagatgctgaagaaggagcacgaggcgctgaccataagaggagtggatactgtttcaaggagcagtctagagatgtctccgcttgctcctgtaaattcccatgagagacgaagcaagcggaggaagcggatgtctagcggcactgaggagtgcggcgaggaccggctgccaaaatctgattccgaggatggcccacgtgccatgaaccatctgtccctgacgcggggacttagtcgcacatctatgaagccacggagctctcgcggtagcattttcacattcagaagacgcgaccttggcagtgaggccgacttcgctgacgacgagaattcaacggccggtgaatctgaatctcatcacacttcgttactggtgccatggccacttcgcaggacctctgcacaaggacagccctccccaggcacctcagcgcctggccacgcccttcacggaaagaagaactccaccgtagactgcaatggagtcgtaagccttttgggcgctggagatccggaggcaacgtcaccaggctcgcatttgctccggccagtcatgctcgaacatcctcctgatacaaccacaccttccgaggaacctgggggaccgcaaatgcttacgagtcaggccccctgtgtagatgggttcgaagaaccgggtgcgcgacaaagagccttatcggccgtatctgttctcacctccgcacttgaggaactggaagaatcacggcacaaatgtcctccatgttggaatcgactggcccagagatacttgatctgggagtgctgtcctctgtggatgagtattaaacaaggggttaagttagtggtgatggatccatttaccgatttgactatcacaatgtgtatcgtcctgaatactcttttcatggccctggagcactacaacatgacatctgaattcgaagaaatgttgcaggtaggaaacctggtgtttacaggaatatttactgccgaaatgacctttaaaataattgccttggacccatattattacttccaacagggctggaacatttttgactccatcattgtaattttgagcctgatggagttgggactgtctcggatgtcgaacctgagcgtcctgcggagtttccgcctcctccgggtgttcaaactagcaaaatcctggcctacgctcaatacactgataaaaattatcggcaacagtgttggtgcactggggaatctcaccctggtcctcgccatcatcgtgttcattttcgcagtggtcggcatgcagttattcggaaagaactacagcgaattaagagattctgactcggggcttctcccacggtggcacatgatggatttctttcatgcttttctgatcatctttcgaattctgtgtggcgagtggattgaaacaatgtgggattgcatggaggtgtcaggtcagagtctgtgtctgctggtctttctgttggtgatggttattggcaatttggtagtattgaatttgttccttgctctgctactgtctagttttagcgccgacaatctgacggctcctgacgaggatagggaaatgaataatctgcagttggccctggctcgaatccagcggggcctccgctttgtaaagaggaccacatgggatttttgttgtggactcctgagacaacgacctcaaaaacctgccgcactcgcagctcagggccagctccccagctgcatcgcgaccccttatagcccgcccccgccagagacagagaaagtgcccccaacgcgcaaggaaacccggttcgaagagggcgaacagccgggacaaggcacaccgggcgatccagagcccgtatgtgtgcccatcgccgtggcagagagtgataccgatgatcaggaagaggacgaggagaattccctgggtaccgaagaagagtcctcaaaacaaacgcccgaggactcctgcagtgagggctcaactgcggacatgactaacactgccgagctattggaacagatccccgacctggggcaggacgtgaaggatcctgaagactgcttcaccgagggctgcgtcaggaggtgcccctgttgtgccgtggacacaacgcaggccccaggaaaggtgtggtggcggctgaggaagacctgttatcatatagttgaacattcctggtttgagacatttattatctttatgatcttgctaagctccggagctttagcttttgaggacatttacttagaagagaggaaaacaattaaggtgcttttagagtatgcagacaaaatgtttacgtatgtgtttgtgctggaaatgctgctcaagtgggttgcttacggcttcaaaaagtactttactaacgcttggtgttggttggattttctgatagtggacgtctcccttgtttccttagtcgccaatacactggggtttgccgagatgggccccattaagtctttgaggactcttcgcgctctgcgccctctccgcgcactctctcggttcgaagggatgcgggtagttgtcaatgccctagtgggggccattccctctatcatgaatgtgctgctggtttgtcttatcttctggctgattttctctattatgggcgtgaatctgttcgccggaaagttcggtagatgcattaatcagacagagggagatctgcctttgaactacaccatcgtaaacaataaatcgcaatgtgagtctctgaacctgacaggcgagctctactggacaaaggtcaaagtgaacttcgataatgtgggtgcagggtatcttgcactcctccaggtagccaccttcaaaggatggatggatattatgtatgcggccgtcgattcaagaggttacgaggagcagccccagtgggaatacaacctgtacatgtacatatacttcgttatttttatcattttcggaagcttttttactctaaacctgtttattggtgtgattattgacaattttaatcagcagaagaaaaaactgggcggccaagacatattcatgactgaggagcaaaaaaaatactacaacgccatgaaaaaactaggtagcaagaagccacagaaacccattccaaggcccttgaataagtatcaggggttcatctttgacattgtgaccaagcaagcctttgacgtgaccatcatgtttctcatatgcctcaacatggtcacaatgatggtggagactgatgatcagtcaccagagaagattaacatcctggccaagattaacctccttttcgtggccattttcactggcgagtgcatcgtcaaactggctgcgctcaggcactattactttaccaactcatggaacatcttcgatttcgtagtcgttattctgtctattgtcggcactgttctttctgacataatacagaagtattttttctctcccaccctttttcgggtgatccgcttggcgagaatcgggcgcatcctcaggcttattaggggggccaagggaatcagaacactgctgttcgcgctcatgatgagtcttcccgcattgtttaacatcgggttactactgttcttggttatgttcatttattctatctttggtatggccaatttcgcgtatgtgaaatgggaggccggcatagacgacatgttcaactttcagacctttgccaatagtatgctgtgtctatttcagataaccacaagtgcggggtgggatgggttactgtcaccaatattgaataccggcccaccctactgcgaccctactctacctaattctaacggatccagaggagattgcggttccccagcagtgggcattctgtttttcacaacctatatcattatatcattcttaatagtggtcaacatgtacatcgctatcatcctggaaaacttctctgtggcaacggaggagagtactgagcctctgagcgaagacgatttcgacatgttctatgagatctgggaaaagttcgaccccgaagccacccagtttatcgaatattccgtgctttcagatttcgctgacgccctgtctgaaccactgcgaatcgccaagccaaatcaaatttcccttattaacatggacctgcccatggtttcgggggataggattcattgtatggatattttattcgcctttaccaaacgagttctgggagaatccggtgagatggacgccctgaagattcagatggaggaaaagttcatggctgctaacccttcgaaaatttcttatgaacccataaccacgaccttgcgccggaaacatgaagaagtgagtgctatggtgatccaacgcgccttcagaaggcatctgctccagagaagtctgaaacacgcaagcttcctgttcagacagcaagccggttccggcttgagcgaggaggatgcaccagagcgcgagggtctgatcgcttatgtgatgtccgagaatttttcaagaccgcttggaccaccttcaagcagttccatcagctccaccagcttccccccatcttatgatagtgtgacacgcgccacctccgacaacctgcaagtgagaggaagtgactactctcactctgaagacctggcggacttcccacctagtcctgaccgcgacagggagagcatagtgtag

SEQ ID NO: 60808 - DNA, 198 bp, Artificial Sequence
  derived and/or modified sequence
atggccaacttcctgctgccccggggcaccagcagcttccgccgcttcacccgggagagcctggccgccatcgagaagaggatggccgagaagcaggcccggggcagcaccaccctgcaggagagccgggagggcctgcctgaggaggaggccccccggccccagctggacctgcaggccagcaagaagctgccctag

SEQ ID NO: 60809 - DNA, 5889 bp, Artificial Sequence
  derived and/or modified sequence
atggccaacttcctgctgccccggggcaccagcagcttccgccgcttcacccgggagagcctggccgccatcgagaagaggatggccgagaagcaggcccggggcagcaccaccctgcaggagagccgggagggcctgcctgaggaggaggccccccggccccagctggacctgcaggccagcaagaagctgcctgacctgtatggcaaccccccccaggagctgattggagagcccctggaggacctggaccccttctacagcacccagaagaccttcatcgtgctgaacaagggcaagaccatcttccgcttcagcgccaccaatgccctgtatgtgctgagccccttccaccccatcagaagagctgctgtgaagatcctggtgcacagcctcttcaacatgctgatcatgtgcaccatcctgaccaactgtgtgttcatggcccagcacgaccccccaccctggaccaagtatgtggagtacaccttcaccgccatctacacctttgagagcctggtgaagatcctggcccggggcttctgcctgcacgccttcaccttcctgcgggacccctggaactggctggacttcagcgtcatcatcatggcctacaccacagaatttgtggacctgggcaatgtgtctgccctgcggaccttccgggtgctgcgggccctgaagaccatcagcgtcatcagcggcctgaagaccatcgtgggcgccctgatccagagcgtgaagaagctggctgatgtgatggtgctgactgtgttctgcctgtctgtgtttgccctgattggcctgcagctgttcatgggcaacctgcggcacaagtgtgtgaggaacttcaccgccctgaatggcaccaatggatctgtggaggctgatggcctggtgtgggagagcctggacctgtacctgagtgaccctgagaactacctgctgaagaatggcaccagtgatgtgctgctgtgtggcaacagcagtgatgctggcacctgcccagagggctaccgctgcctgaaggccggggagaacccagaccacggctacaccagctttgacagctttgcctgggccttcctggccctcttccggctgatgacccaggactgctgggagcggctgtaccagcagaccctgcggtctgctgggaagatctacatgatcttcttcatgctggtgatcttcctgggcagcttctacctggtgaacctgatcctggccgtggtggccatggcctatgaggagcagaaccaggccaccatcgccgagacagaggagaaggagaagcgcttccaggaggccatggagatgctgaagaaggagcacgaggccctgaccatccggggcgtggacacagtgagccgcagcagcctggagatgagccccctggcccctgtgaacagccatgagcggcgcagcaagaggaggaagaggatgagcagcggcacagaggagtgtggagaagatcggctgcccaagagtgacagtgaagatggcccccgggccatgaaccacctgagcctgacccggggcctgagcaggacctccatgaagcccaggagcagccggggcagcatcttcaccttcagaagaagagacctgggcagcgaggccgactttgctgatgatgagaacagcacagctggggagagcgagagccaccacaccagcctgctggtgccctggcccctgcggaggaccagcgcccagggccagcccagccctggcaccagcgcccctggccacgccctgcacggcaagaagaacagcacagtggactgcaatggagtggtgtccctgctgggcgctggggaccctgaggccaccagccctggcagccacctgctgcggcctgtgatgctggagcaccccccagacaccaccacccccagcgaggagcccggcggcccccagatgctgaccagccaggccccctgtgtggatggctttgaggagcccggggcccggcagagggccctgtctgctgtgtctgtgctgaccagcgccctggaggagctggaggagagccgccacaagtgccccccctgctggaaccggctggcccagcgctacctgatctgggagtgctgccccctgtggatgagcatcaagcagggcgtgaagctggtggtgatggaccccttcacagacctgaccatcaccatgtgcatcgtgctgaacaccctcttcatggccctggagcactacaacatgaccagcgagtttgaggagatgctgcaggtgggcaacctggtgttcaccggcatcttcaccgctgagatgaccttcaagatcatcgccctggacccctactactacttccagcagggctggaacatctttgacagcatcatcgtcatcctgagcctgatggagctgggcctgagcaggatgagcaacctgtctgtgctgcgctccttccggctgctgcgggtcttcaagctggccaagtcctggcccaccctgaacaccctcatcaagatcatcggcaacagcgtgggcgccctgggcaacctgaccctggtgctggccatcatcgtgttcatctttgctgtggtgggcatgcagctgtttgggaagaactacagcgagctgcgggacagcgacagcggcctgctgccccgctggcacatgatggacttcttccacgccttcctgatcatcttccgcatcctgtgtggggagtggattgagaccatgtgggactgcatggaggtgtctggccagagcctgtgcctgctggtgttcctgctggtgatggtgattggcaacctggtggtgctgaacctcttcctggccctgctgctgagcagcttctctgctgacaacctgacagccccagatgaggaccgggagatgaacaacctgcagctggccctggcccgcatccagaggggcctgcgctttgtgaagaggaccacctgggacttctgctgcggcctgctgcggcagaggccccagaagccagctgccctggccgcccagggccagctgcccagctgcatcgccaccccctacagccccccacctcctgagacagagaaggtgccccccaccaggaaggagaccaggtttgaggagggggagcagcccggccagggcacccctggggaccctgagcctgtgtgtgtgcccatcgctgtggccgagagtgacacagatgaccaggaggaggatgaggagaacagcctgggcacagaggaggagagcagcaagcagaccccagaggacagctgcagcgagggcagcacagctgacatgaccaacacagctgagctgctggagcagatcccagacctgggccaggatgtgaaggaccctgaggactgcttcacagagggctgtgtgcggcgctgcccctgctgtgctgtggacaccacccaggcccctgggaaggtgtggtggaggctgaggaagacctgctaccacatcgtggagcacagctggtttgagaccttcatcatcttcatgatcctgctgagcagcggggccctggcctttgaggacatctacctggaggagaggaagaccatcaaggtgctgctggagtatgctgacaagatgttcacctacgtgtttgtgctggagatgctgctgaagtgggtggcctacggcttcaagaagtacttcaccaatgcctggtgctggctggacttcctgattgtggatgtgtccctggtgtccctggtggccaacaccctgggctttgctgagatgggccccatcaagagcctgcggaccctgcgggccctgcggcccctgcgggccctgagcagatttgagggcatgagggtggtggtgaatgccctggtgggcgccatccccagcatcatgaatgtgctgctggtgtgcctgatcttctggctgatcttcagcatcatgggcgtgaacctgtttgctgggaagtttggccgctgcatcaaccagacagaaggagacctgcccctgaactacaccatcgtgaacaacaagagccagtgtgagagcctgaacctgaccggggagctgtactggaccaaggtgaaggtgaactttgacaacgtgggcgccggctacctggccctgctgcaggtggccaccttcaagggctggatggacatcatgtatgctgctgtggacagccggggctatgaggagcagccccagtgggagtacaacctgtacatgtacatctacttcgtcatcttcatcatcttcggcagcttcttcaccctgaacctcttcatcggggtcatcatcgacaacttcaaccagcagaagaagaagctgggcggccaggacatcttcatgacagaggagcagaagaagtactacaatgccatgaagaagctgggcagcaagaagccccagaagcccatcccccggcccctgaacaagtaccagggcttcatctttgacatcgtgaccaagcaggcctttgatgtgaccatcatgttcctgatctgcctgaacatggtgaccatgatggtggagacagatgaccagagccctgagaagatcaacatcctggccaagatcaacctgctgtttgtggccatcttcaccggggagtgcatcgtgaagctggccgccctgcggcactactacttcaccaacagctggaacatctttgattttgtggtggtgatcctgagcatcgtgggcaccgtgctgagtgacatcatccagaagtacttcttcagccccaccctcttccgggtcatccggctggcccgcatcggccgcatcctgcggctcatccggggggccaagggcatccgcaccctgctgtttgccctgatgatgagcctgcctgccctcttcaacatcggcctgctgctcttcctggtgatgttcatctacagcatcttcggcatggccaactttgcctacgtgaagtgggaggccggcattgatgacatgttcaacttccagacctttgccaacagcatgctgtgcctcttccagatcaccaccagcgctggctgggatggcctgctgagccccatcctgaacacaggccccccctactgtgaccccaccctgcccaacagcaatggcagcagaggagactgtggcagccctgctgtgggcatcctcttcttcaccacctacatcatcatctccttcctgattgtggtgaacatgtacatcgccatcatcctggagaacttctctgtggccacagaggagagcacagagcccctgtctgaagatgactttgacatgttttatgagatctgggagaagtttgatcctgaggccacccagttcatcgagtacagcgtgctgagtgactttgctgatgccctgtctgagcccctgagaattgccaagcccaaccagatcagcctcatcaacatggacctgcccatggtgtctggggaccgcatccactgcatggacatcctgtttgccttcaccaagagggtgctgggggagagcggggagatggatgccctgaagatccagatggaggagaagttcatggccgccaaccccagcaagatctcctatgagcccatcaccaccaccctgcggaggaagcatgaggaggtgtctgccatggtgatccagagggccttcagaagacacctgctgcagaggagcctgaagcacgccagcttcctgttccggcagcaggccggcagcggcctgtctgaagaagatgcccctgagcgggagggcctcatcgcctacgtgatgtctgagaacttcagccggcccctgggcccccccagcagcagcagcatcagcagcaccagcttcccccccagctatgattctgtgacccgggccaccagtgacaacctgcaggtgcggggcagtgactacagccacagcgaggacctggccgacttcccccccagcccagaccgggaccgggagagcatcgtgtag

SEQ ID NO: 60810 - DNA, 5889 bp, Artificial Sequence
  derived and/or modified sequence
atggccaacttcctgctgccccggggcaccagcagcttccgccgcttcacccgggagagcctggccgccatcgagaagaggatggccgagaagcaggcccggggcagcaccaccctgcaggagagccgggagggcctgcctgaggaggaggccccccggccccagctggacctgcaggccagcaagaagctgcctgacctgtatggcaaccccccccaggagctgattggagagcccctggaggacctggaccccttctacagcacccagaagaccttcatcgtgctgaacaagggcaagaccatcttccgcttcagcgccaccaatgccctgtatgtgctgagccccttccaccccatcagaagagctgctgtgaagatcctggtgcacagcctcttcaacatgctgatcatgtgcaccatcctgaccaactgtgtgttcatggcccagcacgaccccccaccctggaccaagtatgtggagtacaccttcaccgccatctacacctttgagagcctggtgaagatcctggcccggggcttctgcctgcacgccttcaccttcctgcgggacccctggaactggctggacttcagcgtcatcatcatggcctacgtgtctgagaacatcaagctgggcaacctgagcgccctgcggaccttccgggtgctgcgggccctgaagaccatcagcgtcatccctggcctgaagaccatcgtgggcgccctgatccagagcgtgaagaagctggctgatgtgatggtgctgactgtgttctgcctgtctgtgtttgccctgattggcctgcagctgttcatgggcaacctgcggcacaagtgtgtgaggaacttcaccgccctgaatggcaccaatggatctgtggaggctgatggcctggtgtgggagagcctggacctgtacctgagtgaccctgagaactacctgctgaagaatggcaccagtgatgtgctgctgtgtggcaacagcagtgatgctggcacctgcccagagggctaccgctgcctgaaggccggggagaacccagaccacggctacaccagctttgacagctttgcctgggccttcctggccctcttccggctgatgacccaggactgctgggagcggctgtaccagcagaccctgcggtctgctgggaagatctacatgatcttcttcatgctggtgatcttcctgggcagcttctacctggtgaacctgatcctggccgtggtggccatggcctatgaggagcagaaccaggccaccatcgccgagacagaggagaaggagaagcgcttccaggaggccatggagatgctgaagaaggagcacgaggccctgaccatccggggcgtggacacagtgagccgcagcagcctggagatgagccccctggcccctgtgaacagccatgagcggcgcagcaagaggaggaagaggatgagcagcggcacagaggagtgtggagaagatcggctgcccaagagtgacagtgaagatggcccccgggccatgaaccacctgagcctgacccggggcctgagcaggacctccatgaagcccaggagcagccggggcagcatcttcaccttcagaagaagagacctgggcagcgaggccgactttgctgatgatgagaacagcacagctggggagagcgagagccaccacaccagcctgctggtgccctggcccctgcggaggaccagcgcccagggccagcccagccctggcaccagcgcccctggccacgccctgcacggcaagaagaacagcacagtggactgcaatggagtggtgtccctgctgggcgctggggaccctgaggccaccagccctggcagccacctgctgcggcctgtgatgctggagcaccccccagacaccaccacccccagcgaggagcccggcggcccccagatgctgaccagccaggccccctgtgtggatggctttgaggagcccggggcccggcagagggccctgtctgctgtgtctgtgctgaccagcgccctggaggagctggaggagagccgccacaagtgccccccctgctggaaccggctggcccagcgctacctgatctgggagtgctgccccctgtggatgagcatcaagcagggcgtgaagctggtggtgatggaccccttcacagacctgaccatcaccatgtgcatcgtgctgaacaccctcttcatggccctggagcactacaacatgaccagcgagtttgaggagatgctgcaggtgggcaacctggtgttcaccggcatcttcaccgctgagatgaccttcaagatcatcgccctggacccctactactacttccagcagggctggaacatctttgacagcatcatcgtcatcctgagcctgatggagctgggcctgagcaggatgagcaacctgtctgtgctgcgctccttccggctgctgcgggtcttcaagctggccaagtcctggcccaccctgaacaccctcatcaagatcatcggcaacagcgtgggcgccctgggcaacctgaccctggtgctggccatcatcgtgttcatctttgctgtggtgggcatgcagctgtttgggaagaactacagcgagctgcgggacagcgacagcggcctgctgccccgctggcacatgatggacttcttccacgccttcctgatcatcttccgcatcctgtgtggggagtggattgagaccatgtgggactgcatggaggtgtctggccagagcctgtgcctgctggtgttcctgctggtgatggtgattggcaacctggtggtgctgaacctcttcctggccctgctgctgagcagcttctctgctgacaacctgacagccccagatgaggaccgggagatgaacaacctgcagctggccctggcccgcatccagaggggcctgcgctttgtgaagaggaccacctgggacttctgctgcggcctgctgcggcagaggccccagaagccagctgccctggccgcccagggccagctgcccagctgcatcgccaccccctacagccccccacctcctgagacagagaaggtgccccccaccaggaaggagaccaggtttgaggagggggagcagcccggccagggcacccctggggaccctgagcctgtgtgtgtgcccatcgctgtggccgagagtgacacagatgaccaggaggaggatgaggagaacagcctgggcacagaggaggagagcagcaagcagaccccagaggacagctgcagcgagggcagcacagctgacatgaccaacacagctgagctgctggagcagatcccagacctgggccaggatgtgaaggaccctgaggactgcttcacagagggctgtgtgcggcgctgcccctgctgtgctgtggacaccacccaggcccctgggaaggtgtggtggaggctgaggaagacctgctaccacatcgtggagcacagctggtttgagaccttcatcatcttcatgatcctgctgagcagcggggccctggcctttgaggacatctacctggaggagaggaagaccatcaaggtgctgctggagtatgctgacaagatgttcacctacgtgtttgtgctggagatgctgctgaagtgggtggcctacggcttcaagaagtacttcaccaatgcctggtgctggctggacttcctgattgtggatgtgtccctggtgtccctggtggccaacaccctgggctttgctgagatgggccccatcaagagcctgcggaccctgcgggccctgcggcccctgcgggccctgagcagatttgagggcatgagggtggtggtgaatgccctggtgggcgccatccccagcatcatgaatgtgctgctggtgtgcctgatcttctggctgatcttcagcatcatgggcgtgaacctgtttgctgggaagtttggccgctgcatcaaccagacagaaggagacctgcccctgaactacaccatcgtgaacaacaagagccagtgtgagagcctgaacctgaccggggagctgtactggaccaaggtgaaggtgaactttgacaacgtgggcgccggctacctggccctgctgcaggtggccaccttcaagggctggatggacatcatgtatgctgctgtggacagccggggctatgaggagcagccccagtgggagtacaacctgtacatgtacatctacttcgtcatcttcatcatcttcggcagcttcttcaccctgaacctcttcatcggggtcatcatcgacaacttcaaccagcagaagaagaagctgggcggccaggacatcttcatgacagaggagcagaagaagtactacaatgccatgaagaagctgggcagcaagaagccccagaagcccatcccccggcccctgaacaagtaccagggcttcatctttgacatcgtgaccaagcaggcctttgatgtgaccatcatgttcctgatctgcctgaacatggtgaccatgatggtggagacagatgaccagagccctgagaagatcaacatcctggccaagatcaacctgctgtttgtggccatcttcaccggggagtgcatcgtgaagctggccgccctgcggcactactacttcaccaacagctggaacatctttgattttgtggtggtgatcctgagcatcgtgggcaccgtgctgagtgacatcatccagaagtacttcttcagccccaccctcttccgggtcatccggctggcccgcatcggccgcatcctgcggctcatccggggggccaagggcatccgcaccctgctgtttgccctgatgatgagcctgcctgccctcttcaacatcggcctgctgctcttcctggtgatgttcatctacagcatcttcggcatggccaactttgcctacgtgaagtgggaggccggcattgatgacatgttcaacttccagacctttgccaacagcatgctgtgcctcttccagatcaccaccagcgctggctgggatggcctgctgagccccatcctgaacacaggccccccctactgtgaccccaccctgcccaacagcaatggcagcagaggagactgtggcagccctgctgtgggcatcctcttcttcaccacctacatcatcatctccttcctgattgtggtgaacatgtacatcgccatcatcctggagaacttctctgtggccacagaggagagcacagagcccctgtctgaagatgactttgacatgttttatgagatctgggagaagtttgatcctgaggccacccagttcatcgagtacagcgtgctgagtgactttgctgatgccctgtctgagcccctgagaattgccaagcccaaccagatcagcctcatcaacatggacctgcccatggtgtctggggaccgcatccactgcatggacatcctgtttgccttcaccaagagggtgctgggggagagcggggagatggatgccctgaagatccagatggaggagaagttcatggccgccaaccccagcaagatctcctatgagcccatcaccaccaccctgcggaggaagcatgaggaggtgtctgccatggtgatccagagggccttcagaagacacctgctgcagaggagcctgaagcacgccagcttcctgttccggcagcaggccggcagcggcctgtctgaagaagatgcccctgagcgggagggcctcatcgcctacgtgatgtctgagaacttcagccggcccctgggcccccccagcagcagcagcatcagcagcaccagcttcccccccagctatgattctgtgacccgggccaccagtgacaacctgcaggtgcggggcagtgactacagccacagcgaggacctggccgacttcccccccagcccagaccgggaccgggagagcatcgtgtag

SEQ ID NO: 60811 - DNA, 198 bp, Artificial Sequence
  derived and/or modified sequence
atggccaacttcctgctgccccggggcaccagcagcttccggcggtttactcgtgagtctctggccgcaattgagaaaagaatggccgagaagcaggcaagaggcagcacgaccctgcaggagtcaagggaaggtcttcccgaggaagaagcccctcggcctcaactggaccttcaggcttctaaaaagctgccttag

SEQ ID NO: 60812 - DNA, 5889 bp, Artificial Sequence
  derived and/or modified sequence
atggccaacttcctgctgccccggggcaccagcagcttccggcggtttacaagagagtcactggccgcaatagaaaagagaatggccgaaaaacaggccagaggctcgacgacactgcaggagtcccgcgaaggtctgcctgaggaagaagctcctcgaccccagctggatctgcaggcaagcaaaaaactcccggatctgtacgggaacccaccgcaggaactgatcggcgaaccactggaggatctagatcccttttacagcacacagaaaacttttattgtgctgaacaagggtaagacaatatttagattcagcgctaccaacgcgctgtacgttctgagtccttttcatccaatcagacgggctgccgtaaagatactcgtacactccttgtttaacatgttgatcatgtgcactattctcaccaattgtgtattcatggcacaacacgatcccccaccctggaccaagtatgtggagtataccttcaccgccatttacactttcgaaagtctggtgaagatacttgctcgcggcttctgtttgcatgcctttaccttcctgcgagatccctggaactggttggactttagtgttatcattatggcctatacaacagagttcgttgacctggggaatgtcagcgcactgagaacctttcgcgtgcttcgcgccctgaaaactatttcagtgataagcgggttaaagactattgtaggcgctttaatacaatccgtgaagaagctggctgatgtgatggtcttaactgtattttgcctctccgtctttgctctcatcggtttacagctgttcatgggcaatctcagacacaaatgtgtgaggaacttcacagcgttgaacggtactaacggcagtgttgaagccgacggtctggtgtgggagagcctggacctatacctcagcgatcccgagaactacctgctaaagaacggaaccagcgatgttctgctgtgtggcaactcaagtgacgccggaacttgccctgagggatacagatgtcttaaggctggagagaatccagaccacggttacaccagctttgactcttttgcctgggcctttcttgcactttttcggcttatgacccaggactgctgggagcggctgtaccaacagaccctgagatcagccggcaaaatctatatgatttttttcatgctggtcatcttcctgggcagcttttatctggtgaatctcatccttgccgtggtcgccatggcttacgaggagcagaaccaggctacaattgctgaaacagaggagaaggagaagaggttccaggaagctatggagatgctcaagaaggagcatgaggccctgacgattcgcggggtcgacaccgtttcacggagctcgctcgaaatgtccccacttgcccctgttaattcccacgaaaggcgcagtaagcgtcggaagagaatgagcagcggtactgaggagtgcggggaggaccgactgccaaaaagcgacagcgaagatggaccaagagcaatgaaccacctttctttgactcggggcctatcccgtacttctatgaaacccagaagctccagaggcagtattttcacattcaggcggcgtgatctgggcagtgaggcagactttgcagatgacgagaacagcaccgccggggagtcagagagtcatcatactagcctactggtgccttggccactcaggaggacaagtgcacaaggacaacccagtccgggtacatccgctcccggccacgctttacacggcaaaaaaaacagcaccgtagactgcaatggagtggtgtccttgcttggcgccggcgatcccgaagctacaagccctggatcccaccttttaaggccagtgatgttggagcacccccctgatacaaccactccatctgaagagcccgggggcccccagatgctaacgtctcaggctccatgtgtagacggcttcgaggagccgggcgctaggcagagagcgctttctgctgtctccgttctcacctctgccctcgaggagctcgaggaatcgcgtcataagtgtcctccttgttggaaccgtctcgcccagcgctatctcatctgggagtgttgtccgctgtggatgtctatcaagcagggggtgaaactggtggtcatggacccttttacagacctgaccattacaatgtgcatcgttcttaatactttatttatggctcttgaacactataacatgactagcgagttcgaggagatgctgcaggtaggaaacctggtgtttacaggcatcttcaccgccgaaatgacttttaagattattgccctggatccatattactactttcagcagggctggaatatcttcgattcaataattgtgatcctctccttgatggagttgggcctgagtaggatgagcaacctttctgttctaagatcctttcgcctgttgagggtgtttaagctggctaaaagctggccaacgctgaacactcttataaagattatcgggaatagcgtgggcgccctgggcaaccttacactggttcttgccattatagtgtttatcttcgccgtcgttgggatgcaactttttggaaagaactactcggaacttagggattcagactcgggactcctgcctcgctggcatatgatggacttcttccacgcatttctcattatctttcgaatcctctgtggcgagtggattgagacaatgtgggattgcatggaagtctctggacagagcctgtgcctgttagtttttctcctcgtgatggtgattggtaatttggtggtgctgaatctctttctggcactgctactctcaagcttctctgctgataacctcaccgcgcccgacgaggatagggaaatgaacaacctgcaactggcactcgcccgaatccagcgcggccttaggtttgttaagaggacaacttgggatttctgctgtggcctgctcagacagcggccccagaagcctgccgcacttgccgcccagggccagttgccaagctgcatcgcgacgccatacagcccaccaccaccagagacagagaaggtgcctcctacccgtaaggagaccaggttcgaagagggcgagcaacctggacaaggcacgcccggggaccctgagcctgtctgcgtgccaatcgccgttgccgaatcagataccgacgatcaggaggaagacgaggagaactcgctcgggaccgaggaggagtcttctaagcagacccccgaagacagctgttcagaaggcagtacagccgacatgactaatactgcagaacttcttgagcagatacccgacctaggccaagacgtcaaggaccccgaagattgttttacagagggatgcgtgcggcggtgtccctgctgcgctgtcgatactactcaagctccagggaaagtgtggtggagactgaggaagacttgctaccacattgtagaacactcttggtttgagactttcattatttttatgattctcctcagttccggcgccctcgcattcgaagacatttacctggaagaaaggaagaccatcaaagtgctgcttgaatatgccgataaaatgtttacttatgtattcgtgctggaaatgttgctgaaatgggtcgcttacggattcaaaaaatacttcaccaatgcttggtgctggcttgattttcttatcgtagacgtgagtctggtaagcctggtggccaacactctgggatttgccgagatgggccctatcaagtcactccggactctgcgtgccctgcgtcccctgcgagctctcagtaggttcgagggcatgagagtggttgtgaatgcgctagttggcgcgattcccagcatcatgaacgttctcctcgtttgcctgatcttttggcttatcttttccattatgggagttaacctttttgctgggaagttcgggagatgtatcaatcagactgaaggcgacttacccttaaactatactatagtgaacaacaaaagtcagtgcgagtctctaaatttaaccggtgagttgtactggaccaaggtcaaggttaatttcgacaatgtgggcgcaggctacctagctctccttcaggttgctacctttaaggggtggatggatatcatgtatgcagcagtggatagccgggggtacgaagagcaaccgcagtgggaatacaatctgtacatgtacatttacttcgtaatatttataatttttgggtcatttttcaccctaaacctgtttatcggcgttattatagataacttcaatcagcaaaaaaaaaaacttggtgggcaggatatcttcatgacagaagaacagaaaaaatattataacgcgatgaaaaaactgggatccaaaaagccccagaagcctatcccacgaccactcaacaagtaccaaggattcattttcgacatcgtgactaaacaagcttttgatgttaccatcatgttcctgatttgcctgaatatggtcaccatgatggtggagactgacgaccagagtccggagaaaatcaatatcctggcaaagataaacttgttgtttgttgccatctttaccggtgagtgcatagtcaagctagccgccctgagacactattactttacaaactcctggaacatatttgatttcgtggtggtgatcctgagcattgttggcacggttctgtccgatattatccagaaatacttctttagccccaccctgtttcgggtgatccgactcgcaaggattggtaggattcttcggttgatccggggtgccaaggggattcgtactctactcttcgcactaatgatgtctctccctgcattgtttaacatcggacttctactcttcctcgtgatgtttatctactccatctttggtatggccaactttgcgtacgtgaagtgggaggctggaattgacgacatgttcaatttccagacctttgcaaatagcatgctctgtctttttcagattacaacttctgccgggtgggacggactcttgtcacctatcctaaatacaggacctccgtactgcgatcccacattaccgaatagcaatgggagtcggggagattgtggaagtccggcggtcgggatcctgttctttaccacctatattatcattagttttcttattgtggtcaatatgtacattgccatcatccttgagaacttttctgtggctaccgaagagtcaactgagcccctctctgaggacgactttgacatgttttacgaaatctgggaaaagtttgatcccgaggcaacccagtttatcgagtacagtgtgttaagtgactttgctgatgccctgtctgagcccttacggatcgctaagcccaatcaaattagcctgatcaacatggatttgccaatggtgtcaggcgacagaatccactgcatggacatactcttcgccttcaccaagcgggtgctgggtgaatcgggggaaatggacgcgttaaaaattcagatggaggagaaatttatggcagctaacccttccaaaatctcctacgaacccataactacaacactaaggaggaagcatgaagaggttagtgctatggtgatccagagggctttccgcagacatttacttcagaggagcttaaagcatgcctccttccttttcagacagcaggcgggttctggtctgtccgaggaggacgcaccagaaagggagggcctgatcgcctatgtcatgagcgaaaacttctcccggccactcgggccaccatccagctcttctatcagttccacctcattcccacctagctacgactccgtgactcgagcaacctctgacaatctccaggtccgagggtccgattattcacactctgaggatctagcagattttccgcccagcccggaccgagacagggagtccatagtgtag

SEQ ID NO: 60813 - DNA, 5889 bp, Artificial Sequence
  derived and/or modified sequence
atggccaacttcctgctgccccggggcaccagcagcttccggcggtttactagggagtcgctggcagcgatcgaaaagaggatggccgagaagcaagcccgtggctctaccacattacaggaatcaagagagggattaccagaggaggaggctcctagaccgcaattggacctccaggctagcaaaaaactccctgatctgtacggaaatccccctcaggagttgattggtgaaccactggaggacttggatcctttctattcaactcagaaaaccttcatcgtgttgaataaagggaaaaccatctttcgcttctcagcgaccaatgctctatatgtactgtcaccatttcatcccatccgccgagccgcggtcaagatcttagtgcattctctctttaatatgctgatcatgtgcacaatccttaccaactgtgtgtttatggcgcaacacgacccccctccatggacaaagtacgtggaatacacatttacggcaatctacacctttgaatcactagtgaaaatcttagccagaggattttgcctgcatgccttcacattcctccgtgatccatggaattggttggacttcagcgtgattataatggcctatgtttcagaaaatataaaactgggcaacctttctgccctcagaacttttagggtactccgtgccttgaagactatttccgtgattcctggtttgaagaccatcgtaggcgccctcatacaatcagtgaaaaagctagcagacgtcatggtcttgacggtgttttgcctgagcgtgtttgctctcataggattacagcttttcatgggaaacctacgacacaaatgcgtacgcaatttcactgctctgaatgggacgaacggaagcgtggaagctgacgggctcgtgtgggagagcctcgatctgtatctgtccgaccctgagaactacttacttaaaaatgggacatcagacgtgcttttgtgcgggaattccagcgatgccggcacatgccctgaaggatatcggtgcctgaaagctggtgaaaaccccgatcatggatacacatcctttgacagctttgcatgggctttccttgccctgttccggctgatgacgcaagactgttgggaaagactgtaccagcagactctgagaagcgctggtaagatttacatgatttttttcatgctcgtcattttcctgggatccttttatctcgtgaatttgatcttggctgtggtagcaatggcgtacgaagaacagaaccaggctaccatcgctgaaaccgaggaaaaggagaagcgatttcaggaggccatggaaatgctgaaaaaagagcatgaggcactaacaatacgcggagtcgacactgtctcacgatcatctctcgaaatgtccccactggccccagtgaactctcacgaacgccgctccaagaggagaaagcgtatgtcatcagggacagaggagtgcggcgaggaccgcctgccaaagtcagactcagaggatggcccaagagccatgaatcacctgagcttgactagaggactatctagaacctccatgaaacctcggagttccagaggcagcattttcacatttcgccgccgcgacctcgggtcagaggcagatttcgctgacgatgaaaattcaaccgctggcgagagtgaatctcaccacaccagtttgttagtgccttggccactcaggcgcacgtctgcacagggccaaccttcgcctggcacctctgccccggggcacgctctccatggcaagaaaaacagcacggtcgattgcaatggagtggtgtccctgttaggggctggtgatccagaagcgaccagccctggctctcaccttctgcgcccagtgatgctcgagcatcctccagatacgacaactcccagcgaggaacccggagggccacagatgctgacctctcaggcaccttgtgtcgatggcttcgaagaaccgggcgcgcggcagcgagccttgtccgcggtcagcgtgctcacatcggctctcgaggagctcgaagagtcaaggcacaagtgtcctccgtgctggaatagactggctcagcgctacctgatttgggaatgctgccctctgtggatgtccataaaacagggggtgaagctggtggttatggatcctttcactgatctgaccatcacaatgtgtatagttcttaatacattgttcatggcactagagcactacaacatgactagcgagttcgaggaaatgttgcaagtcggcaacctcgtgtttaccggtatctttaccgccgagatgaccttcaaaattatagccctggacccatactactatttccagcaggggtggaacatctttgactcaattatcgtgatcctgagtctgatggagctgggcctcagtagaatgtctaatctgtctgtgttacgctccttcaggttattgcgggtgttcaagttggctaaaagttggccaaccctgaacaccctcatcaaaattattggcaattcagttggagcacttggaaacctgactctcgtgttagctatcattgtattcatctttgccgttgtggggatgcagctctttggaaagaattattccgaattgcgagacagcgatagcgggctactgcccagatggcacatgatggatttcttccacgcattccttattatctttagaattctgtgcggagagtggattgagactatgtgggactgcatggaggttagcggccaaagtctgtgccttctggtgtttctgttggtgatggttattggcaacctagttgtactgaatttgtttctggcccttctgttatcgagcttttccgcggataacttaacagctccagatgaagaccgggaaatgaacaacctgcagctggcactggctcggattcaaagaggactgagattcgtaaagcggactacctgggatttttgttgtggtctgctcaggcagcgaccccagaaacccgcagccctggcagcccagggacagctacctagttgtatagctactccttactcccctcctccccccgagacagagaaagtgccccccacgcggaaagagacaagattcgaggagggcgaacagccaggccaaggaacccccggcgacccagaacctgtatgtgtccctatagccgtggcagaatctgataccgatgaccaagaggaggatgaagaaaactctctagggactgaagaggagagttccaagcagacccctgaggattcgtgctccgaaggatccacggccgatatgaccaataccgcagaacttctagagcagattccggacttgggccaagatgtgaaggatcccgaggactgcttcactgaaggctgcgtgaggagatgtccctgctgtgctgtggatactacccaggctcctggtaaggtttggtggagacttcggaagacctgttaccacatcgtagaacattcctggtttgagacattcataatttttatgattctgttatcatccggagctctggccttcgaagatatctatcttgaggaaagaaaaaccattaaggtcttgctagaatacgctgacaagatgttcacttacgtcttcgtgctggagatgctccttaaatgggtcgcctacggctttaagaagtacttcacgaacgcttggtgttggttagacttcttaatcgtcgacgtaagcttggtcagcctggtggccaacacactaggttttgccgagatgggccccatcaaaagcttgaggacgctgcgagccctcaggcccctgcgagccctgtcacgattcgagggaatgcgggttgtggtcaacgccttggtcggagccataccaagtatcatgaacgttttacttgtctgtttgatcttctggctcatcttcagtattatgggcgtgaacttgtttgccggcaaatttgggcgatgcattaaccagactgaaggcgatcttcctttaaactacacaatagtgaataacaagtcccagtgtgagtcactcaacttgactggcgagctgtactggactaaagtgaaggtgaactttgacaatgttggtgcaggttaccttgctctgctgcaagtggcaacatttaagggttggatggacataatgtatgctgctgtggacagcagaggttacgaagagcaaccacaatgggaatataatctatatatgtatatatactttgtgatctttataatctttggcagtttcttcactctgaatcttttcattggtgttatcattgataatttcaatcagcagaagaagaaattgggcggacaggatatcttcatgacggaagagcagaaaaagtattataatgccatgaaaaagctgggatctaaaaagccccaaaagccaattccacggccacttaacaagtatcagggttttatctttgatattgtcactaagcaggcctttgatgttaccattatgtttctcatatgtctgaatatggttacaatgatggtggagacagacgaccaatccccggaaaaaatcaacatcctggcgaagataaacttgctcttcgtggccatatttaccggagaatgtatagtaaagttagcagcactcaggcattattacttcaccaacagctggaatatcttcgacttcgtggtagtgatcctgtctattgtgggaaccgtcctgtctgatataatccagaaatattttttcagcccaacgctgttccgggtgattcggttagcccgaattggtaggatactgcgtctaataagaggagctaaaggcattcgaacgctgttgtttgcactgatgatgagcttgccggctctgtttaacatcggactcctcctgtttctggtcatgtttatctatagcattttcgggatggcaaattttgcttacgttaagtgggaggctgggattgatgacatgttcaacttccaaacttttgccaatagtatgctgtgtttgttccaaataacaaccagtgcagggtgggacgggctgctatcccccatactcaataccggacccccctattgtgaccccactctgccaaattcgaatgggtctcgtggagattgtggcagccccgccgtcgggatcctcttctttaccacctatattattatctcatttctgattgtggttaatatgtacatcgcaatcattctggagaatttctctgtagcaacagaagagtcaaccgaacccctttcagaggacgattttgacatgttctatgagatttgggaaaaattcgaccccgaagcaacgcagttcatagaatactccgtcctgtcagatttcgcggatgctctgtccgaaccactgcgaatagccaaacccaaccaaataagtctgattaatatggacttaccaatggtgtccggagaccggattcactgcatggatattctgtttgccttcacaaaaagagtactgggtgagagtggggaaatggacgctctcaagattcagatggaggaaaaatttatggcagcaaatccttccaagatcagttacgagccgatcaccaccaccctgcggaggaagcacgaggaggtcagcgccatggttatacagcgcgcttttcgccggcaccttcttcaaagatcactgaagcatgctagttttttgttcagacagcaagctggctccggactcagcgaggaagacgctccagaaagggaaggacttatcgcgtacgttatgtcggagaatttcagcaggcccctgggccccccgtccagctcgtcaatctcgagtacgagctttccgccgagctacgactcagtgacccgcgccacttcggacaatttgcaggtgcgtgggagcgactattcacattcagaggacctggcagatttccccccttcacccgatagggatcgagaaagtattgtgtag

SEQ ID NO: 60814 - DNA, 5889 bp, Artificial Sequence
  derived and/or modified sequence
atggccaacttcctgctgccccggggcaccagcagcttccggcggttcacacgagagagcctcgccgctatagagaagcgtatggcagagaaacaggcccgcggttcaacaacgctgcaagaatctcgagaaggattgccagaagaagaggcgccacggcctcagctggatctgcaagcgtcaaagaaactgcccgacttgtatggcaaccctccccaggagctgatcggagagccactggaggatttagatcctttttacagtacacaaaaaaccttcatcgtgttaaacaaaggcaagactatctttcgattcagcgccaccaatgcgctgtatgtgctgtctcctttccacccaatccggagagcagctgttaagatcttggtgcactccttgtttaatatgcttataatgtgcacaattctcaccaattgtgtgttcatggctcaacacgacccccctccgtggacgaagtacgtggagtacaccttcaccgcaatctacaccttcgagtcactggttaagatcctggcaagagggttctgtctgcacgcctttactttccttagggatccttggaattggctggacttcagcgtcattataatggcctacgtgagcgaaaacattaaactggggaacctgtcagccctcaggaccttcagggtcctgcgagctctgaaaaccatttccgtaattcctggactaaagacaatcgttggcgccctgatccaaagcgtcaagaagctggccgatgtgatggtacttacagttttttgcctctctgtatttgcactgataggcctgcagctgtttatgggcaatctgcgccacaagtgcgtgcgaaatttcactgcactaaacggtaccaacggtagcgtggaagcagacgggctggtgtgggaatccctggacctgtatctgagtgacccagagaactacctcttaaagaatggaacgagtgatgtactgctctgtggcaattcaagtgacgcaggcacatgtccagaaggttaccgatgtctgaaagccggtgaaaatcctgaccacgggtacacatcttttgattcatttgcctgggccttcctcgctctgttcaggttgatgacccaggattgctgggaaaggctgtatcagcaaacactccggtccgcaggaaaaatctacatgattttctttatgcttgtgatcttcctcgggagcttttacttggtgaatctgatccttgcagtggtggctatggcgtatgaggaacagaatcaagctacgatcgctgagacggaggagaaagaaaagcgcttccaagaagccatggaaatgttgaagaaggaacacgaggcactcacaattaggggcgtggatacggtcagccgatcctcgctggagatgtctcctctggccccagtcaattctcatgaacgacgtagcaagaggcggaagcgcatgagcagtggcacagaagagtgcggcgaagatagattgccaaaaagtgattctgaagacggtccaagagctatgaatcacctgtcattgaccagagggttatcgcgaacctccatgaaacctcgcagtagccggggcagcatattcacttttcgccggcgggacctagggtcagaggcggactttgcggacgacgagaattccacggccggcgagtcagagtcgcatcacaccagtctgttagttccttggcccctccgacggacctctgcccaggggcagccatccccaggtacttccgcacccggccacgccctgcacggcaaaaaaaattctacggtggattgcaatggtgtcgtaagcctgttgggcgcgggcgaccctgaagcaacaagcccaggctcgcatttgcttcggccagtgatgctggagcatccccctgacacgaccactccgagtgaggagccaggtggtccacagatgctaacctcacaggcaccatgtgttgacggcttcgaagagccgggagcccgccagcgggcactgtcggccgtgtctgtgctaacttctgcacttgaggaactagaagagtccaggcacaagtgtccaccctgttggaatagattggctcagagatatctaatatgggagtgttgtccactttggatgtcaataaagcaaggtgtgaagcttgttgtcatggacccatttaccgacctaaccatcactatgtgcattgtgctcaacacgctgttcatggccctggaacactataacatgacctcagagttcgaagaaatgcttcaagtaggcaacctagtgttcacagggatcttcacagccgaaatgacattcaagatcattgccttggatccatactactactttcaacagggctggaatatcttcgacagcattatcgtgattctcagtctcatggagctcggactcagccgtatgagtaacttgagtgtcctgcggagcttccgtctgctgcgcgtgtttaaactcgccaaatcctggcctaccttgaatactttaataaagatcattgggaatagcgtgggcgccctcggtaacctaacactcgtgctggccatcattgtctttattttcgccgtggtgggcatgcaactgttcggcaaaaactatagtgagctgcgcgattcagactcagggttacttcctagatggcacatgatggatttcttccatgcgttcttaattattttcagaatcttgtgtggtgaatggatagagaccatgtgggactgtatggaagtgtcgggtcagtcgctctgcctgctggtctttctgctagtgatggttattggcaatctcgtggtgctgaacctgtttttagcactgcttctgtcatcattctctgctgacaatctgaccgcccccgacgaagaccgagaaatgaacaatcttcagctggccctcgccagaatacagcgggggctcagattcgtgaagcggaccacctgggatttctgttgtgggctactgcggcaacgccctcaaaagccagcggccctggctgcacagggtcagttgccctcttgtatcgcaactccatactcaccaccgccgcccgaaaccgagaaagtaccaccaactcgcaaggaaacccgcttcgaagaaggagagcagcccgggcagggcacacctggtgatcctgagcctgtatgtgtgcccattgctgtggcagagtcagatactgatgatcaagaggaagatgaggagaattccttgggcactgaggaggaaagctcaaaacagaccccggaggactcctgtagcgagggctccaccgctgacatgactaatactgccgagttgttagagcagatccccgacttgggacaggacgtaaaggaccccgaagactgtttcacagaaggctgcgtgcggaggtgcccttgctgtgccgttgatacgacgcaggcgcctggcaaggtgtggtggcggctaagaaagacctgctatcatatcgtggagcatagttggtttgagacatttattatcttcatgatcctgttaagttcaggggcactggcctttgaagacatttacctcgaggagagaaaaacaataaaagtgctcttagagtatgctgataaaatgtttacctatgtgttcgttctagaaatgctgctcaaatgggtcgcctatgggttcaaaaagtactttacaaacgcttggtgctggttggattttctgatcgtggatgtgtcattggtctctttagtggccaatacgcttgggtttgctgagatgggccctattaaatctctcaggacccttcgagcactgagaccccttagagcattgagtcggttcgagggtatgcgagttgtcgtgaacgctctagtgggagccatcccttccatcatgaatgttttgcttgtgtgcctcatattctggcttatctttagcataatgggtgtaaacctgttcgcggggaaattcggtcggtgcatcaatcagacagagggtgacctcccattaaactacaccatcgtgaacaacaaatcgcagtgcgaatctctgaatctcacaggggaattgtattggacaaaggtgaaggtgaatttcgataatgttggggcaggatatctcgcattgttacaggtggccactttcaagggttggatggacattatgtatgcagcggtcgactcaaggggctacgaagagcagcctcagtgggaatataacttgtatatgtacatctatttcgtgatcttcattatctttggatcattttttactctaaacctgttcatcggagtcattatcgacaatttcaaccaacagaaaaaaaaactcggaggccaggatatttttatgacagaagaacaaaagaaatattacaatgctatgaagaagcttggcagcaaaaaaccgcaaaagccgataccacggcctcttaacaagtatcaggggttcattttcgatattgtgacaaagcaggcgttcgacgttaccatcatgtttctaatctgtctgaacatggtcacgatgatggtggaaaccgacgaccaatcgccagagaaaataaacatccttgctaaaatcaatctgcttttcgtggccatattcaccggagagtgcatcgttaaacttgctgctctgcggcattattattttactaattcctggaacatttttgatttcgtagtggttattctttccattgtcggcaccgtgctgagcgacataatccagaagtatttctttagcccaacactgttccgggtgatccgactcgcgagaatcgggagaatccttcgacttattagaggtgcaaaggggattaggacactgcttttcgccctcatgatgtcactgcctgccctgttcaatataggcctcctcctatttctggtgatgttcatttattccatttttgggatggcaaacttcgcttacgttaagtgggaggccgggattgacgacatgtttaatttccagaccttcgccaattcaatgctttgcttatttcaaatcactacttccgcaggctgggatggattgttaagtcccattctaaatactggaccaccctactgtgacccaaccttacccaattcaaacggttcaagaggcgactgcggatctcccgccgtggggattttatttttcaccacttacattattatctcattccttattgtagtgaatatgtatattgcaattattctggagaattttagtgttgcaactgaggagtcgactgagcccctttccgaagatgacttcgatatgttttacgaaatatgggagaaattcgacccagaagccacccagttcattgagtattctgtgcttagcgacttcgctgacgcactcagcgaaccccttcggatagcaaaaccaaaccaaataagtctcataaacatggacctgccgatggtgtccggagacaggatccattgcatggatatcctgtttgccttcacaaaaagggttctgggcgagagtggtgagatggacgcgctcaagattcagatggaagagaaattcatggccgcgaaccctagcaaaatttcatacgaacccatcacaacaactctccgccgcaagcatgaggaagttagtgccatggtgatccagagggctttccgccgacacttactccagcgtagtctcaaacatgctagtttcctctttcgccaacaagcaggatccggtctctccgaagaggatgcaccagagagagaggggctcatagcctatgtcatgtctgagaatttctctaggcccctcggacccccgtcttcctcaagcattagctccacctcattcccaccatcctacgactctgttactagagcgacttcagacaacctacaagttagaggatcagattacagccatagcgaggatctggccgactttcccccctcccccgacagggaccgagaaagcattgtctag

SEQ ID NO: 60815 - DNA, 198 bp, Artificial Sequence
  derived and/or modified sequence
atggccaattttttgctgccgagagggaccagctcgtttcggcgatttaccagggaatctctggccgcaatcgaaaaacggatggctgagaagcaggctcgcggaagcaccacgcttcaggaaagtcgggaaggtcttccggaggaggaagcccctcgtccccaattggacctgcaggcatcgaaaaagttaccatag

SEQ ID NO: 60816 - DNA, 5888 bp, Artificial Sequence
  derived and/or modified sequence
atggctaatttcctgctgccaagaggcacaagctccttccgtcgcttcaccagggaatcgctcgcagccatagagaagagaatggctgaaaaacaggccagaggttctaccactctgcaggaatctcgtgagggtcttcccgaagaagaagctcctcgcccacagcttgacctccaagcctccaagaagttaccagatttgtacgggaacccaccccaggagcttattggggagccattggaagacttagatccattctacagcactcagaagaccttcattgtcctgaacaaagggaaaactattttccgatttagcgccaccaatgccctgtacgtgctctcgccttttcatcctatcaggagggctgccgtcaagatcctggtccattcgctttttaacatgctaattatgtgcaccattcttacaaattgcgtctttatggcacagcacgatccccctccctggactaagtacgtggagtataccttcaccgctatttacacattcgaatccctggttaaaatcttggcccgaggcttctgcctccacgcctttacgttcctgagagatccttggaactggttagatttcagcgtgatcataatggcctataccaccgagttcgtggatcttgggaacgtgagcgcccttcgtacctttagggtgctcagagcattgaagactatcagcgttatcagcggacttaaaaccattgtgggtgcattgattcaaagtgtgaaaaaactggctgatgtaatggtgctgaccgttttctgtctcagcgtctttgctcttattggcctccagctctttatgggaaacctgcgccataagtgtgtaaggaatttcaccgcattgaacggaaccaatggttccgttgaggccgacggcctagtgtgggaatctctcgacctttatttgtcagacccagagaattacttgcttaagaacgggacaagcgacgtgttgctatgcgggaactcgtctgatgccggaacatgcccagagggctatcggtgccttaaggcaggcgaaaatcccgatcatggatacacaagctttgattcttttgcctgggcattcctggctttgtttaggctgatgacccaggactgctgggagagactgtaccagcagacgctgcgtagtgcaggaaagatttacatgatcttctttatgctggtgatttttctgggatctttttacctggtgaacctgatccttgcggtggtcgcaatggcttatgaggaacagaatcaggcaacaatcgcagaaacagaggagaaggagaagcggttccaagaggccatggaaatgctaaaaaaagagcacgaggcactgactatcaggggggtcgataccgtttctcggtccagcctggaaatgtccccactagcgccagtgaattcccatgaaagacggagtaagcgtaggaagaggatgtctagcggcaccgaagagtgcggcgaggacaggctcccaaagagtgatagcgaggacgggcctagggcgatgaaccatttaagtttgaccagaggactgtcacggacaagcatgaaacccaggtcttcgagagggagtatattcacctttcgcaggagggatctcggatcggaagctgactttgctgatgacgagaacagtaccgcaggagaaagcgaaagccaccatacgagtctcctcgttccctggccccttcgacggaccagcgctcagggccaacccagtccgggaacttctgcacctggacacgccctgcacgggaaaaaaaattctacggtcgattgtaacggcgtagtgtctctgctgggcgctggcgatcccgaagcaacttctccaggatcccatttgctgcgcccagtcatgctagagcacccgcctgacactaccaccccaagtgaggaacccggtggacctcagatgcttacaagtcaggcaccatgtgttgatggcttcgaggagccaggggcacgccagcgagccttgtcagcagtgagcgtgctcactagtgccctcgaagaactggaggagtcccgccacaaatgccctccttgttggaatcgcctggcccagagatatctcatatgggaatgttgccccctctggatgtcgatcaagcagggcgtaaagctggtggttatggacccgttcactgacctcactattacgatgtgcatcgtgctgaacaccctttttatggcattagaacactacaatatgacttctgaattcgaggaaatgttgcaggtcggtaatctggtgtttacggggatatttaccgccgagatgaccttcaagattatcgctctcgacccatattactacttccaacaggggtggaatatcttcgacagcatcattgttatactgtctctaatggagttgggacttagcaggatgagcaatctgagtgtgctgaggagttttcggttgctacgggtgtttaagctggccaagtcttggcccactctgaatacactgattaagattattggcaactccgtgggtgccctgggcaatctgaccctcgtactggccatcatcgtcttcatctttgccgtggtaggcatgcagctcttcggcaaaaactacagtgagctgagagattctgattctggtctgcttccacgttggcacatgatggatttttttcatgcattcctgattatctttaggatactgtgtggggaatggatcgagacaatgtgggattgtatggaggtgagcgggcagagcctttgtttgctcgtttttctgctcgtgatggttatagggaatctcgtggtcctgaatcttttcctggcattgctgctgtcaagcttctcagccgataacctgactgcacctgacgaagacagggaaatgaacaacctgcaattagctctggcaaggattcagagagggcttagattcgtcaaacgaaccacttgggacttctgttgtggactcttgaggcaaagacctcagaaacccgcagcgttggctgctcagggacaattaccttcctgcatcgccactccttatagccccccaccgcctgagactgaaaaggttcccccaacacgaaaagaaacgaggttcgaagagggcgagcagcccggacaaggaacgcctggagaccctgagcccgtttgtgtcccaattgcagttgcagagtcagacaccgacgaccaggaggaggacgaagaaaatagtctaggcaccgaagaagaatcaagtaagcaaacaccagaggattcgtgtagcgaaggatctaccgctgacatgacaaacacggctgagttattggagcagatccccgatctgggacaggacgttaaagatcctgaggattgtttcaccgaaggatgcgtgagacggtgtccctgttgcgctgttgataccacacaggcacctggtaaagtctggtggcgcctcaggaaaacgtgctaccacatcgtggagcactcgtggttcgagacctttatcatattcatgatcctattatcaagcggtgcccttgcgtttgaggacatttatctagaggaaaggaagacgatcaaagtactgttggaatacgccgataagatgtttacctacgtgttcgtgctcgagatgcttcttaagtgggttgcatatgggttcaagaagtatttcacaaatgcctggtgctggcttgatttcctgatcgtcgacgtgagtctggtttctctcgtcgctaacaccctggggtttgctgagatggggcctatcaaatccctccggaccctgcgggcattgaggcccctgagagcactgagcaggtttgagggcatgcgtgtagtggtcaacgccttagtaggggctatacctagcatcatgaacgttttgttagtttgtcttattttttggcttattttttctataatgggcgtgaatttgttcgcgggaaaatttggacgctgcatcaatcagacagagggcgatctgccgcttaattatactattgtcaataataagagccagtgcgagagcctcaaccttaccggggaactctactggaccaaagtgaaagttaatttcgacaacgttggagctggctatctcgctcttttgcaagtggccacattcaaaggctggatggatattatgtacgcggcagtggactcaagggggtacgaagaacagccacagtgggagtataatctgtatatgtatatctatttcgtgattttcataatatttggttcctttttcaccctaaacctgttcatcggcgtgataatcgataactttaatcagcagaaaaagaagctcggcggacaggatatatttatgaccgaggagcagaagaaatattacaacgcaatgaagaagctcggatcaaaaaaacctcagaagcccatcccaaggccacttaacaagtaccagggtttcatttttgacatcgttacgaagcaggccttcgacgtaacaattatgttcctgatatgcctaaatatggtgaccatgatggtcgagactgacgaccagagtcccgagaaaattaacatacttgccaagatcaacttgctcttcgtggctattttcacaggtgaatgcatcgtgaagctagccgctctccgacattattattttacaaattcttggaatattttcgacttcgttgtcgtgatcctctctattgtgggtaccgtgttatcagatataatccaaaaatatttcttttcccctaccctcttccgcgtgatcagactggctcgaataggtagaatactcagactgatacggggtgctaagggcattcgaacactactgttcgccctgatgatgtctctgcctgctctattcaatatcggactgctgctgtttctcgtcatgtttatttactcaatctttggcatggccaacttcgcttacgtcaaatgggaggccggtattgacgacatgttcaacttccagactttcgccaacagcatgctgtgtctgtttcagatcacaacgtcagccggttgggacggtctgctctcaccaattctaaatacagggcctccctactgtgatcctacgctcccaaactctaacggcagcaggggcgactgtggaagtcccgcagtggggatattgtttttcaccacatatatcatcatctcattccttattgtcgtgaatatgtacatagccatcatactggaaaactttagcgttgccaccgaggagagcaccgagcccctgagtgaagatgacttcgacatgttctacgaaatctgggaaaagttcgatcctgaagcaacacaattcattgaatatagtgtgctgtctgactttgcagatgcactcagtgagccattgagaatcgccaagccgaatcagatcagtcttattaacatggatctgccaatggtctctggggaccgaatccactgcatggatatccttttcgctttcacaaagcgggtactgggagagtctggagagatggatgctctcaagatccaaatggaggaaaagttcatggccgcaaatccaagtaagatctcctacgagcctattacaactaccctccgacgaaaacatgaggaggttagcgctatggtcattcagcgcgcattcagaaggcaccttctgcagcgatccttaaaacacgcctcattcctgtttcgccagcaggccggttctgggctgtcagaggaggacgcacctgaacgggaggggctgatagcatacgttatgagcgaaaacttctcccgcccactggggccaccgtctagctcctcaattagctcaacttcctttcccccatcgtacgactccgttacgagagccactagtgataacctccaggtgcgaggtagcgactactctcatagtgaagatctagcagacttccctcccagccccgatagggatagagaatccatcgtata

SEQ ID NO: 60817 - DNA, 5888 bp, Artificial Sequence
  derived and/or modified sequence
atggccaacttcctcctcccacgaggtactagttcctttcggagattcacccgagagagtctggccgcaatcgagaagaggatggccgagaagcaggccagaggatccacgaccttgcaggagtcacgagaaggtctccccgaagaagaagcccctaggccacagttagatttacaggcttccaaaaagttgccagatttgtacggcaatccaccgcaggaactgattggcgagcctctcgaagacctggaccctttttactcaacccagaagacattcatagttttgaacaaaggtaaaaccattttcagattcagtgcaacgaatgccctgtatgttctttcgccattccatccaatcagacgagcagccgtcaagatattggtgcatagcttatttaacatgctaatcatgtgtaccatcctcacaaactgtgtgtttatggcacagcacgacccaccaccttggacgaaatacgtggagtacacatttactgctatatacacctttgagtctcttgtgaagatcttggcacggggtttttgtctacacgcattcacctttctgagggatccttggaattggctcgatttttcggtgattatcatggcatatgtctctgagaacattaaactgggcaacttaagcgctctgcgtacgttccgtgtgctgagggcccttaagaccattagtgtgatccctggtcttaaaaccatagtcggtgcattaatacagagcgttaaaaaattggcagacgttatggtcttgacagttttttgtctgtccgtgttcgctcttattgggctgcagctgttcatgggcaacctgaggcacaaatgtgtccgaaattttaccgccctgaacggcaccaacggatcggttgaagctgacggtctggtctgggaatcgcttgacctgtacctctctgatcccgagaactatctgttgaagaatggaacctctgatgtgctgctctgcgggaactcctcggacgccggtacttgtcctgaggggtacagatgcctcaaagctggagagaacccagaccacgggtacacatcatttgatagtttcgcttgggccttcctggcgctctttaggttaatgactcaagattgttgggaaaggctttatcagcagaccttaaggagcgccggaaaaatctatatgatcttttttatgttagttatttttctggggtcattttatctcgtgaacctgattctcgccgtcgtggctatggcctatgaggagcagaatcaggcaacaatcgctgagactgaggagaaggagaaacgctttcaggaagcaatggagatgctgaagaaggagcatgaagctttgacaataaggggggtggacacggtgtcccgctcatctctggagatgtcccctctggctcctgttaactcgcacgaacgacggtctaagcggaggaagcgcatgagcagtggaaccgaggagtgcggagaagatcgcctgccaaaaagcgactccgaagacggcccaagagcaatgaaccacctttccctcacacgcggactgtcgcggaccagcatgaagccccgttcatctcgagggtccatttttacctttcgtaggcgagacctcggctccgaggctgattttgccgacgatgagaatagtacagccggagagtcggaatctcatcacacatccctgctcgtcccatggcccttaagaagaacatcggctcagggtcagccaagccccggaacttcagcacccggacacgcgttgcatgggaagaaaaattcaactgttgattgtaacggagtggtctccctactcggagctggtgaccctgaagccacatctccgggttctcacctgctaagacccgtgatgctcgaacacccccctgacaccaccactccaagtgaggagcctggtggcccacagatgttgaccagtcaagccccatgcgtggatggattcgaggagccaggtgccaggcaaagagccctgtcagccgtcagtgttcttacttccgccctggaggaactggaagagtcaaggcacaaatgcccaccgtgctggaatagactggcccagcgatatctgatatgggaatgctgtcccctttggatgagcatcaagcaaggcgtgaagctggtggtgatggacccgttcaccgacttgacaattactatgtgcatagtattgaataccctctttatggccttggagcactataacatgacgagcgagtttgaagagatgctgcaggtcggcaatctggtcttcactgggatttttactgcagaaatgaccttcaagatcattgctttagatccctattattatttccaacaagggtggaacatcttcgactccattatcgtgatactttcactgatggaactcggactgtcccgaatgtcgaatctgagcgtgctccgctcatttaggctgctaagagtttttaagttggcgaaaagttggcccaccctgaacacactgatcaagataattgggaattccgtaggcgcactggggaacctcacactggttctggccattatcgtcttcatcttcgccgtcgtgggaatgcagttgttcggtaagaattactccgagctgcgcgatagtgacagcgggctcctgccgagatggcatatgatggactttttccatgcttttcttattatatttaggattctgtgtggcgaatggattgaaactatgtgggattgcatggaggtcagcggccaaagcttgtgtcttctggtgtttctgttggtcatggtcatcggcaacttggtggttctgaatctcttcctggccttgctgctgtccagtttctccgccgataacttgaccgctccggacgaggaccgagaaatgaacaacctccagctggcattagcacgaattcagcggggactgaggttcgtcaagagaactacctgggacttctgctgcggcctgctgcgacagcgaccccaaaagccggctgccctggccgctcagggtcaactgccttcttgtatagcaactccatacagtcctcctccacccgagacggaaaaggtgcctcctacacgcaaggaaaccaggttcgaagagggagaacagcccggtcaggggacccccggagatcccgaacccgtgtgcgtccctattgctgtggcagagagcgacacagatgaccaggaagaggacgaggagaacagcctggggactgaggaggaaagctcaaagcagactcccgaggactcttgcagcgaagggtccaccgctgacatgacaaacaccgcagaactcctagagcaaattccagatctggggcaagacgtgaaagatcccgaagattgctttacagagggatgcgtgcgtagatgtccatgttgtgctgtggataccacacaagcccctgggaaagtctggtggcgtctccgcaagacctgctaccacatagttgagcatagctggttcgagacctttattatcttcatgatcctgctctccagtggcgcactggcatttgaagatatctacctcgaggaacgtaaaactataaaggtcctgctggaatacgctgataaaatgttcacttacgttttcgtgcttgaaatgttgctcaaatgggtggcctatggattcaagaaatacttcaccaatgcttggtgttggcttgatttcctaatcgttgatgtctctcttgtgtctctcgtggcgaatactctgggttttgcagaaatgggtcccatcaaaagtctaagaactttgcgagctctccggccactcagagccctgagtcggttcgagggaatgagggtcgtggtcaatgcattggtaggagcaatcccctctatcatgaatgtgctactggtgtgccttatcttctggctaatattctccatcatgggtgtgaatctgttcgctgggaagtttgggagatgcataaatcagacggaaggtgatctcccactgaactacacaatcgtaaataataaaagtcaatgcgagtccctcaatctgacgggcgaactgtactggacgaaagttaaggtgaactttgacaacgttggcgcaggctatctcgctttgctgcaggtggccaccttcaagggatggatggacattatgtacgccgctgtcgacagtcggggttatgaggaacaaccgcaatgggagtataatttatatatgtacatatacttcgtaatttttattatcttcggatctttttttactctgaacctgttcattggggttatcattgacaacttcaaccagcagaaaaaaaaattaggaggacaggacatattcatgacagaggaacaaaagaaatattacaacgctatgaagaagctgggcagtaaaaagccccagaaaccgatccccaggcctctgaataagtatcagggcttcatttttgatatcgtgacaaaacaggcattcgacgtcaccattatgttcctaatctgtctgaacatggtgaccatgatggtggaaaccgacgaccaaagtcctgagaagatcaatattttagctaagatcaatctgctctttgtggctattttcacgggagagtgcatagtgaaattggcggcactgcggcactactatttcaccaacagctggaatattttcgatttcgtcgtggttatcctgagcatcgtcgggactgtgctatccgacattattcagaaatacttctttagtccaacactgttcagagtaataagactggcgagaattggccgaatcttaagattgattcggggagcaaaggggatccggactctcctgttcgccctgatgatgtccctgccagctctgttcaatatcggcctgctgctgttcttggtaatgtttatctactcaatttttggtatggctaattttgcttatgtgaaatgggaagctggtatcgatgacatgtttaactttcagacttttgctaacagcatgttgtgcctgttccaaattacaaccagcgccggttgggatgggcttctgtcgcctattctgaatacgggtcctccttattgtgaccctaccctacccaatagcaacggatcgagaggtgactgcggcagtcctgctgtaggcatcctcttcttcaccacatatatcattatctcatttttaattgtcgtgaacatgtatatcgcaatcatcctggaaaatttctccgttgccaccgaggagtcgactgaaccgctgtccgaagatgacttcgacatgttttacgaaatctgggaaaaattcgatcctgaggcaacacagttcattgaatattcggtactgagtgacttcgctgacgcactgtcggaaccgctgaggatcgctaagccgaaccagattagcctgattaacatggatcttcccatggtcagtggagaccgcattcattgcatggacatactgttcgccttcacgaaaagggtgctcggtgaatctggggagatggatgccctgaagatccagatggaagagaaatttatggctgccaatccaagcaaaatctcttacgagccaataactacgacactgagacgcaagcacgaggaggtcagcgcaatggttattcagagggccttccgcagacatctgttacagcgaagcttaaagcacgccagtttccttttccgtcagcaagctggttctgggctttctgaggaagacgctcctgagagagaggggctgatcgcctacgtaatgtcagagaattttagccgacccctgggcccaccctcaagcagctccatctcctcgacctccttccccccatcatatgactctgttacccgagctacaagcgacaatctgcaggttcggggtagcgactacagtcattcagaggacctggctgactttcccccttcccctgatagggatcgggagtctatcgtata

SEQ ID NO: 60818 - DNA, 5888 bp, Artificial Sequence
  derived and/or modified sequence
atggccaacttcctactgccaaggggcacatcctcctttcgccgtttcacgcgtgagtctctggctgccatcgagaagcggatggccgagaagcaggctcgaggatccacgactctgcaagagagccgcgaaggtctgccagaagaggaggcaccacgcccacaactggacctgcaagcatccaagaagctgcctgatctctacggaaaccctccccaggagcttatcggggagccgttagaggacctcgaccctttctacagcactcagaagactttcatcgttttgaataagggcaaaaccatattccgcttcagtgcaaccaacgccctctacgtattgagtcccttccatccaattcggagggctgcagtgaagattttggtccattccctgtttaatatgctgatcatgtgcactatcctcacgaattgtgtcttcatggcacagcatgatccaccaccatggaccaagtacgtcgaatacacctttacagcaatctacaccttcgaaagcttggtcaagatcttggcccgagggttctgtctccacgcttttaccttcctgagggacccctggaactggttagactttagtgtgatcatcatggcttacgtgtcagaaaacattaagctgggtaacctcagcgctctccgaactttccgggtgctcagggctctgaagactattagcgttatccccggtctgaagactattgtgggggcactcatccagagcgtcaaaaagttggcagacgttatggtgctgacggtgttctgtctgagcgttttcgcgctcatcggactacagcttttcatgggcaacctgagacacaagtgcgtaaggaacttcacagcactgaacggcaccaatgggagcgtcgaagcagacggccttgtgtgggagagcctcgacttatatttaagcgacccggagaactacctgttgaaaaacgggaccagcgacgtgctattgtgtgggaattcaagcgatgcaggcacatgtcctgaaggatatcgttgcctgaaggctggagaaaaccccgatcacgggtataccagtttcgatagttttgcttgggcttttcttgcgttgttccgactcatgacccaggactgctgggaaaggctgtaccagcagaccctgagatctgccggtaagatttacatgattttctttatgctggttatctttttaggctctttctatctggtaaatctcatccttgcggtagtcgcaatggcctacgaagaacagaatcaagctactatagcagagactgaggagaaggagaagcggttccaggaagccatggagatgctgaaaaaggaacatgaagccctcacaattcggggtgtggatacggtaagcaggagtagcctcgaaatgtcccctttagccccagtgaacagccatgagcgccgtagcaaacggagaaaacgaatgagttctggcacggaggaatgtggggaagatcggcttccgaagtctgactctgaggacggacccagggccatgaaccacctctcacttacacggggactgagccgcacctcaatgaagcccagatcctctcgcggttcaattttcacgttcaggagaagggacttgggcagcgaagctgatttcgccgacgacgaaaacagcacagctggagagtccgaatcgcaccacacaagcctgttggtgccttggccgctgcggcgtacctcggcccagggacagccttcccccggaacctccgcccctggtcacgctctccacggcaagaagaattccactgttgactgcaacggtgtcgttagcttgctgggcgctggagaccccgaggccacttctcccggttcacacctgcttcgtcccgtcatgctagagcaccccccagacaccaccacaccttccgaagagcccggtgggccacagatgctgacatcacaggcaccgtgtgtagacggctttgaggagcctggtgcgcgtcagagggcactttccgccgtgtccgtgcttacatcggctctcgaggagctcgaagagtctaggcacaagtgtcccccttgctggaatcgcctcgcacagagatatctcatttgggaatgttgccctctgtggatgagcatcaagcagggtgtcaagctggtcgtgatggatccctttactgatctcacaatcactatgtgcattgtactcaatacactgttcatggccttggagcactataacatgacgtccgagtttgaagagatgctgcaggttggcaatctggtgttcactggtatctttactgccgagatgactttcaagatcatcgccttggacccctactattacttccaacaaggatggaacatttttgacagtatcatcgtgattctgtctctaatggagctcgggctctccagaatgagcaacctcagcgttctgcgatcctttagactgctccgagtgttcaaattggccaaaagctggccaaccttgaacactctgattaagattattggcaactccgtcggtgcgctcggtaacctgacgcttgtgctcgcaattatcgtctttatcttcgctgtggtcggcatgcagttatttggcaagaattatagcgagctcagagacagtgacagcggattactccctcgctggcatatgatggactttttccatgctttcctgatcattttcaggatattgtgtggagaatggattgagacgatgtgggattgcatggaagtgagcggacagtccctttgtctgctagtcttcctcctcgtgatggtgatcggaaacctagtggttctgaatcttttcctggctctcctgctttcttcgttcagcgccgacaatttgaccgccccagacgaggacagagagatgaataaccttcagttagctctggcccgaattcagcgaggactgcgctttgtgaaacgtactacatgggacttttgctgtgggctcttacggcagagacctcagaaacccgctgccctggctgctcaggggcagctgcccagttgcatcgctaccccatatagtcctccaccgcctgagacagagaaagtacctcccacccgtaaggagacacggttcgaagagggggaacagccagggcagggtaccccgggagatcccgaaccagtgtgtgtgccgatcgcggtggccgagagtgatacagacgaccaggaggaagatgaagagaattctctgggcactgaggaggagagttctaaacaaacgcctgaggactcttgtagtgaaggtagcaccgctgacatgaccaacaccgctgaactgctggagcagatcccagatctcggccaggatgtgaaggatcctgaggattgttttaccgagggttgtgtgagacggtgtccatgctgcgctgtggacaccacccaggcaccagggaaggtgtggtggaggctgaggaagacttgctaccatatcgttgaacatagttggttcgagacattcatcatcttcatgatcttgcttagcagcggcgctctggccttcgaggatatataccttgaggagcgaaagactatcaaagtgctactagaatatgcggataagatgttcacgtacgtgtttgtccttgaaatgcttcttaagtgggttgcatatggatttaaaaagtacttcacaaatgcgtggtgttggttggactttctcatcgtagatgtgtcactggtcagtctagtggctaatactctcggctttgcggaaatgggccctattaaaagtctgaggacgctccgtgcactgcgtcccctacgagccctctctcggttcgagggcatgagagtcgtggttaatgctctggtgggagctatacctagcattatgaacgtattgcttgtctgccttattttttggctgattttctctataatgggagtgaatctgttcgcaggtaaattcgggaggtgcattaaccagacagaaggagacctgcccctcaattatactattgtcaacaataaatctcagtgtgaatcattgaatttgacaggggagctatactggactaaagtgaaagttaacttcgacaatgtgggagctggttacctagctctgcttcaggtggccacattcaagggctggatggacatcatgtatgcagcagtggatagcaggggatacgaggagcagccccagtgggaatacaacctgtatatgtacatttatttcgtgatattcatcatttttggaagttttttcactttgaatcttttcatcggggtgatcattgacaacttcaatcagcaaaagaaaaaactgggcggacaggacatctttatgactgaggagcagaaaaaatactacaacgccatgaaaaagctgggaagcaaaaagccgcagaagcctataccacgcccactgaataaatatcaaggcttcatcttcgatattgtgacgaaacaggcgttcgacgtcacgataatgttcctcatatgtcttaacatggtgacaatgatggtggaaactgacgaccagtcacccgaaaaaatcaacattctcgcaaagattaacctgctctttgtagcaatctttactggggagtgcatcgtgaagctcgcagcactcaggcactactacttcactaactcatggaacatctttgatttcgttgttgtcatcctgtctatcgtgggtactgttttatctgatattatacaaaagtacttttttagtccaaccttgttccgtgtgattcgcctcgctaggattgggcgtattctgcggctcatcagaggagccaagggcattcggaccttgcttttcgcactcatgatgtctttaccagcgctctttaatatcgggttactgttgtttcttgtcatgtttatttacagtatcttcggtatggctaattttgcctatgtgaaatgggaagctgggatagatgacatgtttaactttcagactttcgcaaatagcatgctttgcctgttccaaattacaacgagcgcgggttgggatggccttctgtcccctatactcaacacaggaccaccctattgcgaccctaccctgccaaatagtaacggaagcaggggggactgcggatcccctgccgtgggtatcctctttttcactacctatatcattatctcttttctcatcgtggtgaacatgtatattgcgattatcctcgagaacttctccgtcgcgacagaagaatccacggaaccactgtccgaggatgatttcgacatgttctatgagatttgggagaagtttgaccccgaagccacccaatttattgagtattctgtgctgtctgattttgcggacgctctctctgagcccctgaggattgcaaagccaaaccagatttctttgatcaatatggatctgccaatggtgagcggggacagaatccactgtatggatatcctctttgcttttaccaaacgggtgctgggcgagtctggtgaaatggacgctctgaagattcagatggaggagaaattcatggctgctaatccatctaaaatatcatacgagccaattacaacgactctcaggagaaagcatgaagaggtgtccgccatggtcatccagcgggcatttcgaagacatttactccaaagatcgttgaaacatgcgtcattcctttttcgacagcaagccggaagtgggttgtcagaagaggacgccccagagcgggagggcctaatcgcatacgttatgagtgagaattttagccgacctctcggccctccttcgtccagctcaatttcgagtaccagcttccccccaagttacgattctgtcactagggctacatcggacaatttgcaagtgagggggtcagactacagccattcagaagacctggccgatttcccaccgtctcccgacagagaccgcgagtccatagtgta

SEQ ID NO: 60819 - DNA, 335 bp, Artificial Sequence
  derived and/or modified sequence
agtggacactgtgggcatgcgtgtccgtgcagcacatcgccatgcaggagcctgggggaaggcctttccctcagtgagggctgcagcttccccacaggcaacgtgaggagagcctgtgcccagaagcaggatgagaagatggcaaacttcctattacctcggggcaccagcagcttccgcaggttcacacgggagtccctggcagccatcgagaagcgcatggcagagaagcaagcccgcggctcaaccaccttgcaggagagccgagaggggctgcccgaggaggaggctccccggccccagctggacctgcaggcctccaaaaagctgccaga

SEQ ID NO: 60820 - DNA, 5898 bp, Artificial Sequence
  derived and/or modified sequence
gatgagaagatggcaaacttcctattacctcggggcaccagcagcttccgcaggttcacacgggagtccctggcagccatcgagaagcgcatggcagagaagcaagcccgcggctcaaccaccttgcaggagagccgagaggggctgcccgaggaggaggctccccggccccagctggacctgcaggcctccaaaaagctgccagatctctatggcaatccaccccaagagctcatcggagagcccctggaggacctggaccccttctatagcacccaaaagactttcatcgtactgaataaaggcaagaccatcttccggttcagtgccaccaacgccttgtatgtcctcagtcccttccaccccatccggagagcggctgtgaagattctggttcactcgctcttcaacatgctcatcatgtgcaccatcctcaccaactgcgtgttcatggcccagcacgaccctccaccctggaccaagtatgtcgagtacaccttcaccgccatttacacctttgagtctctggtcaagattctggctcgaggcttctgcctgcacgcgttcactttccttcgggacccatggaactggctggactttagtgtgattatcatggcatacacaactgaatttgtggacctgggcaatgtctcagccttacgcaccttccgagtcctccgggccctgaaaactatatcagtcatttcagggctgaagaccatcgtgggggccctgatccagtctgtgaagaagctggctgatgtgatggtcctcacagtcttctgcctcagcgtctttgccctcatcggcctgcagctcttcatgggcaacctaaggcacaagtgcgtgcgcaacttcacagcgctcaacggcaccaacggctccgtggaggccgacggcttggtctgggaatccctggacctttacctcagtgatccagaaaattacctgctcaagaacggcacctctgatgtgttactgtgtgggaacagctctgacgctgggacatgtccggagggctaccggtgcctaaaggcaggcgagaaccccgaccacggctacaccagcttcgattcctttgcctgggcctttcttgcactcttccgcctgatgacgcaggactgctgggagcgcctctatcagcagaccctcaggtccgcagggaagatctacatgatcttcttcatgcttgtcatcttcctggggtccttctacctggtgaacctgatcctggccgtggtcgcaatggcctatgaggagcaaaaccaagccaccatcgctgagaccgaggagaaggaaaagcgcttccaggaggccatggaaatgctcaagaaagaacacgaggccctcaccatcaggggtgtggataccgtgtcccgtagctccttggagatgtcccctttggccccagtaaacagccatgagagaagaagcaagaggagaaaacggatgtcttcaggaactgaggagtgtggggaggacaggctccccaagtctgactcagaagatggtcccagagcaatgaatcatctcagcctcacccgtggcctcagcaggacttctatgaagccacgttccagccgcgggagcattttcacctttcgcaggcgagacctgggttctgaagcagattttgcagatgatgaaaacagcacagcgggggagagcgagagccaccacacatcactgctggtgccctggcccctgcgccggaccagtgcccagggacagcccagtcccggaacctcggctcctggccacgccctccatggcaaaaagaacagcactgtggactgcaatggggtggtctcattactgggggcaggcgacccagaggccacatccccaggaagccacctcctccgccctgtgatgctagagcacccgccagacacgaccacgccatcggaggagccaggcgggccccagatgctgacctcccaggctccgtgtgtagatggcttcgaggagccaggagcacggcagcgggccctcagcgcagtcagcgtcctcaccagcgcactggaagagttagaggagtctcgccacaagtgtccaccatgctggaaccgtctcgcccagcgctacctgatctgggagtgctgcccgctgtggatgtccatcaagcagggagtgaagttggtggtcatggacccgtttactgacctcaccatcactatgtgcatcgtactcaacacactcttcatggcgctggagcactacaacatgacaagtgaattcgaggagatgctgcaggtcggaaacctggtcttcacagggattttcacagcagagatgaccttcaagatcattgccctcgacccctactactacttccaacagggctggaacatcttcgacagcatcatcgtcatccttagcctcatggagctgggcctgtcccgcatgagcaacttgtcggtgctgcgctccttccgcctgctgcgggtcttcaagctggccaaatcatggcccaccctgaacacactcatcaagatcatcgggaactcagtgggggcactggggaacctgacactggtgctagccatcatcgtgttcatctttgctgtggtgggcatgcagctctttggcaagaactactcggagctgagggacagcgactcaggcctgctgcctcgctggcacatgatggacttctttcatgccttcctcatcatcttccgcatcctctgtggagagtggatcgagaccatgtgggactgcatggaggtgtcggggcagtcattatgcctgctggtcttcttgcttgttatggtcattggcaaccttgtggtcctgaatctcttcctggccttgctgctcagctccttcagtgcagacaacctcacagcccctgatgaggacagagagatgaacaacctccagctggccctggcccgcatccagaggggcctgcgctttgtcaagcggaccacctgggatttctgctgtggtctcctgcggcagcggcctcagaagcccgcagcccttgccgcccagggccagctgcccagctgcattgccaccccctactccccgccacccccagagacggagaaggtgcctcccacccgcaaggaaacacggtttgaggaaggcgagcaaccaggccagggcacccccggggatccagagcccgtgtgtgtgcccatcgctgtggccgagtcagacacagatgaccaagaagaagatgaggagaacagcctgggcacggaggaggagtccagcaagcagaccccagaggacagttgctccgagggcagcacagcagacatgaccaacaccgctgagctcctggagcagatccctgacctcggccaggatgtcaaggacccagaggactgcttcactgaaggctgtgtccggcgctgtccctgctgtgcggtggacaccacacaggccccagggaaggtctggtggcggttgcgcaagacctgctaccacatcgtggagcacagctggttcgagacattcatcatcttcatgatcctactcagcagtggagcgctggccttcgaggacatctacctagaggagcggaagaccatcaaggttctgcttgagtatgccgacaagatgttcacatatgtcttcgtgctggagatgctgctcaagtgggtggcctacggcttcaagaagtacttcaccaatgcctggtgctggctcgacttcctcatcgtagacgtctctctggtcagcctggtggccaacaccctgggctttgccgagatgggccccatcaagtcactgcggacgctgcgtgcactccgtcctctgagagctctgtcacgatttgagggcatgagggtggtggtcaatgccctggtgggcgccatcccgtccatcatgaacgtcctcctcgtctgcctcatcttctggctcatcttcagcatcatgggcgtgaacctctttgcggggaagtttgggaggtgcatcaaccagacagagggagacttgcctttgaactacaccatcgtgaacaacaagagccagtgtgagtccttgaacttgaccggagaattgtactggaccaaggtgaaagtcaactttgacaacgtgggggccgggtacctggcccttctgcaggtggcaacatttaaaggctggatggacattatgtatgcagctgtggactccagggggtatgaagagcagcctcagtgggaatacaacctctacatgtacatctattttgtcattttcatcatctttgggtctttcttcaccctgaacctctttattggtgtcatcattgacaacttcaaccaacagaagaaaaagttagggggccaggacatcttcatgacagaggagcagaagaagtactacaatgccatgaagaagctgggctccaagaagccccagaagcccatcccacggcccctgaacaagtaccagggcttcatattcgacattgtgaccaagcaggcctttgacgtcaccatcatgtttctgatctgcttgaatatggtgaccatgatggtggagacagatgaccaaagtcctgagaaaatcaacatcttggccaagatcaacctgctctttgtggccatcttcacaggcgagtgtattgtcaagctggctgccctgcgccactactacttcaccaacagctggaatatcttcgacttcgtggttgtcatcctctccatcgtgggcactgtgctctcggacatcatccagaagtacttcttctccccgacgctcttccgagtcatccgcctggcccgaataggccgcatcctcagactgatccgaggggccaaggggatccgcacgctgctctttgccctcatgatgtccctgcctgccctcttcaacatcgggctgctgctcttcctcgtcatgttcatctactccatctttggcatggccaacttcgcttatgtcaagtgggaggctggcatcgacgacatgttcaacttccagaccttcgccaacagcatgctgtgcctcttccagatcaccacgtcggccggctgggatggcctcctcagccccatcctcaacactgggccgccctactgcgaccccactctgcccaacagcaatggctctcggggggactgcgggagcccagccgtgggcatcctcttcttcaccacctacatcatcatctccttcctcatcgtggtcaacatgtacattgccatcatcctggagaacttcagcgtggccacggaggagagcaccgagcccctgagtgaggacgacttcgatatgttctatgagatctgggagaaatttgacccagaggccactcagtttattgagtattcggtcctgtctgactttgccgatgccctgtctgagccactccgtatcgccaagcccaaccagataagcctcatcaacatggacctgcccatggtgagtggggaccgcatccattgcatggacattctctttgccttcaccaaaagggtcctgggggagtctggggagatggacgccctgaagatccagatggaggagaagttcatggcagccaacccatccaagatctcctacgagcccatcaccaccacactccggcgcaagcacgaagaggtgtcggccatggttatccagagagccttccgcaggcacctgctgcaacgctctttgaagcatgcctccttcctcttccgtcagcaggcgggcagcggcctctccgaagaggatgcccctgagcgagagggcctcatcgcctacgtgatgagtgagaacttctcccgaccccttggcccaccctccagctcctccatctcctccacttccttcccaccctcctatgacagtgtcactagagccaccagcgataacctccaggtgcgggggtctgactacagccacagtgaagatctcgccgacttccccccttctccggacagggaccgtgagtccatcgtgtga

SEQ ID NO: 60821 - DNA, 6284 bp, Artificial Sequence
  derived and/or modified sequence
ggcaacgtgaggagagcctgtgcccagaagcaggatgagaagatggcaaacttcctattacctcggggcaccagcagcttccgcaggttcacacgggagtccctggcagccatcgagaagcgcatggcagagaagcaagcccgcggctcaaccaccttgcaggagagccgagaggggctgcccgaggaggaggctccccggccccagctggacctgcaggcctccaaaaagctgccagatctctatggcaatccaccccaagagctcatcggagagcccctggaggacctggaccccttctatagcacccaaaagactttcatcgtactgaataaaggcaagaccatcttccggttcagtgccaccaacgccttgtatgtcctcagtcccttccaccccatccggagagcggctgtgaagattctggttcactcgctcttcaacatgctcatcatgtgcaccatcctcaccaactgcgtgttcatggcccagcacgaccctccaccctggaccaagtatgtcgagtacaccttcaccgccatttacacctttgagtctctggtcaagattctggctcgaggcttctgcctgcacgcgttcactttccttcgggacccatggaactggctggactttagtgtgattatcatggcgtatgtatcagaaaatataaaactaggcaatttgtcggctcttcgaactttcagagtcctgagagctctaaaaactatttcagttatcccagggctgaagaccatcgtgggggccctgatccagtctgtgaagaagctggctgatgtgatggtcctcacagtcttctgcctcagcgtctttgccctcatcggcctgcagctcttcatgggcaacctaaggcacaagtgcgtgcgcaacttcacagcgctcaacggcaccaacggctccgtggaggccgacggcttggtctgggaatccctggacctttacctcagtgatccagaaaattacctgctcaagaacggcacctctgatgtgttactgtgtgggaacagctctgacgctgggacatgtccggagggctaccggtgcctaaaggcaggcgagaaccccgaccacggctacaccagcttcgattcctttgcctgggcctttcttgcactcttccgcctgatgacgcaggactgctgggagcgcctctatcagcagaccctcaggtccgcagggaagatctacatgatcttcttcatgcttgtcatcttcctggggtccttctacctggtgaacctgatcctggccgtggtcgcaatggcctatgaggagcaaaaccaagccaccatcgctgagaccgaggagaaggaaaagcgcttccaggaggccatggaaatgctcaagaaagaacacgaggccctcaccatcaggggtgtggataccgtgtcccgtagctccttggagatgtcccctttggccccagtaaacagccatgagagaagaagcaagaggagaaaacggatgtcttcaggaactgaggagtgtggggaggacaggctccccaagtctgactcagaagatggtcccagagcaatgaatcatctcagcctcacccgtggcctcagcaggacttctatgaagccacgttccagccgcgggagcattttcacctttcgcaggcgagacctgggttctgaagcagattttgcagatgatgaaaacagcacagcgggggagagcgagagccaccacacatcactgctggtgccctggcccctgcgccggaccagtgcccagggacagcccagtcccggaacctcggctcctggccacgccctccatggcaaaaagaacagcactgtggactgcaatggggtggtctcattactgggggcaggcgacccagaggccacatccccaggaagccacctcctccgccctgtgatgctagagcacccgccagacacgaccacgccatcggaggagccaggcgggccccagatgctgacctcccaggctccgtgtgtagatggcttcgaggagccaggagcacggcagcgggccctcagcgcagtcagcgtcctcaccagcgcactggaagagttagaggagtctcgccacaagtgtccaccatgctggaaccgtctcgcccagcgctacctgatctgggagtgctgcccgctgtggatgtccatcaagcagggagtgaagttggtggtcatggacccgtttactgacctcaccatcactatgtgcatcgtactcaacacactcttcatggcgctggagcactacaacatgacaagtgaattcgaggagatgctgcaggtcggaaacctggtcttcacagggattttcacagcagagatgaccttcaagatcattgccctcgacccctactactacttccaacagggctggaacatcttcgacagcatcatcgtcatccttagcctcatggagctgggcctgtcccgcatgagcaacttgtcggtgctgcgctccttccgcctgctgcgggtcttcaagctggccaaatcatggcccaccctgaacacactcatcaagatcatcgggaactcagtgggggcactggggaacctgacactggtgctagccatcatcgtgttcatctttgctgtggtgggcatgcagctctttggcaagaactactcggagctgagggacagcgactcaggcctgctgcctcgctggcacatgatggacttctttcatgccttcctcatcatcttccgcatcctctgtggagagtggatcgagaccatgtgggactgcatggaggtgtcggggcagtcattatgcctgctggtcttcttgcttgttatggtcattggcaaccttgtggtcctgaatctcttcctggccttgctgctcagctccttcagtgcagacaacctcacagcccctgatgaggacagagagatgaacaacctccagctggccctggcccgcatccagaggggcctgcgctttgtcaagcggaccacctgggatttctgctgtggtctcctgcggcagcggcctcagaagcccgcagcccttgccgcccagggccagctgcccagctgcattgccaccccctactccccgccacccccagagacggagaaggtgcctcccacccgcaaggaaacacggtttgaggaaggcgagcaaccaggccagggcacccccggggatccagagcccgtgtgtgtgcccatcgctgtggccgagtcagacacagatgaccaagaagaagatgaggagaacagcctgggcacggaggaggagtccagcaagcagaccccagaggacagttgctccgagggcagcacagcagacatgaccaacaccgctgagctcctggagcagatccctgacctcggccaggatgtcaaggacccagaggactgcttcactgaaggctgtgtccggcgctgtccctgctgtgcggtggacaccacacaggccccagggaaggtctggtggcggttgcgcaagacctgctaccacatcgtggagcacagctggttcgagacattcatcatcttcatgatcctactcagcagtggagcgctggccttcgaggacatctacctagaggagcggaagaccatcaaggttctgcttgagtatgccgacaagatgttcacatatgtcttcgtgctggagatgctgctcaagtgggtggcctacggcttcaagaagtacttcaccaatgcctggtgctggctcgacttcctcatcgtagacgtctctctggtcagcctggtggccaacaccctgggctttgccgagatgggccccatcaagtcactgcggacgctgcgtgcactccgtcctctgagagctctgtcacgatttgagggcatgagggtggtggtcaatgccctggtgggcgccatcccgtccatcatgaacgtcctcctcgtctgcctcatcttctggctcatcttcagcatcatgggcgtgaacctctttgcggggaagtttgggaggtgcatcaaccagacagagggagacttgcctttgaactacaccatcgtgaacaacaagagccagtgtgagtccttgaacttgaccggagaattgtactggaccaaggtgaaagtcaactttgacaacgtgggggccgggtacctggcccttctgcaggtggcaacatttaaaggctggatggacattatgtatgcagctgtggactccagggggtatgaagagcagcctcagtgggaatacaacctctacatgtacatctattttgtcattttcatcatctttgggtctttcttcaccctgaacctctttattggtgtcatcattgacaacttcaaccaacagaagaaaaagttagggggccaggacatcttcatgacagaggagcagaagaagtactacaatgccatgaagaagctgggctccaagaagccccagaagcccatcccacggcccctgaacaagtaccagggcttcatattcgacattgtgaccaagcaggcctttgacgtcaccatcatgtttctgatctgcttgaatatggtgaccatgatggtggagacagatgaccaaagtcctgagaaaatcaacatcttggccaagatcaacctgctctttgtggccatcttcacaggcgagtgtattgtcaagctggctgccctgcgccactactacttcaccaacagctggaatatcttcgacttcgtggttgtcatcctctccatcgtgggcactgtgctctcggacatcatccagaagtacttcttctccccgacgctcttccgagtcatccgcctggcccgaataggccgcatcctcagactgatccgaggggccaaggggatccgcacgctgctctttgccctcatgatgtccctgcctgccctcttcaacatcgggctgctgctcttcctcgtcatgttcatctactccatctttggcatggccaacttcgcttatgtcaagtgggaggctggcatcgacgacatgttcaacttccagaccttcgccaacagcatgctgtgcctcttccagatcaccacgtcggccggctgggatggcctcctcagccccatcctcaacactgggccgccctactgcgaccccactctgcccaacagcaatggctctcggggggactgcgggagcccagccgtgggcatcctcttcttcaccacctacatcatcatctccttcctcatcgtggtcaacatgtacattgccatcatcctggagaacttcagcgtggccacggaggagagcaccgagcccctgagtgaggacgacttcgatatgttctatgagatctgggagaaatttgacccagaggccactcagtttattgagtattcggtcctgtctgactttgccgatgccctgtctgagccactccgtatcgccaagcccaaccagataagcctcatcaacatggacctgcccatggtgagtggggaccgcatccattgcatggacattctctttgccttcaccaaaagggtcctgggggagtctggggagatggacgccctgaagatccagatggaggagaagttcatggcagccaacccatccaagatctcctacgagcccatcaccaccacactccggcgcaagcacgaagaggtgtcggccatggttatccagagagccttccgcaggcacctgctgcaacgctctttgaagcatgcctccttcctcttccgtcagcaggcgggcagcggcctctccgaagaggatgcccctgagcgagagggcctcatcgcctacgtgatgagtgagaacttctcccgaccccttggcccaccctccagctcctccatctcctccacttccttcccaccctcctatgacagtgtcactagagccaccagcgataacctccaggtgcgggggtctgactacagccacagtgaagatctcgccgacttccccccttctccggacagggaccgtgagtccatcgtgtgagcctcggcctggctggccaggacacactgaaaagcagcctttttcaccatggcaaacctaaatgcagtcagtcacaaaccagcctggggccttcctggctttgggagtaagaaatgggcctcagccccgcggatcaaccaggcagagttctgtggcgccgcgtggacagccggagcagttggcctgtgcttggaggcctcagatagacctgtgacctggtctggtcaggcaatgccctgcggctctggaaagcaacttcatcccagctgctgaggcgaaatataaaactgagactgtatatgttgtgaatgggctttcataaatttattatatttgatatttttttacttgag

SEQ ID NO: 60822 - DNA, 198 bp, Artificial Sequence
  derived and/or modified sequence
atggccaacttcctgctgcccagaggcaccagcagcttcagaagattcaccagagagagcctggccgccatcgagaagagaatggccgagaagcaggccagaggcagcaccaccctgcaggagagcagagagggcctgcccgaggaggaggcccccagaccccagctggacctgcaggccagcaagaagctgccctag

SEQ ID NO: 60823 - DNA, 5889 bp, Artificial Sequence
  derived and/or modified sequence
atggccaacttcctgctgcccagaggcaccagcagcttcagaagattcaccagagagagcctggccgccatcgagaagagaatggccgagaagcaggccagaggcagcaccaccctgcaggagagcagagagggcctgcccgaggaggaggcccccagaccccagctggacctgcaggccagcaagaagctgcccgacctgtacggcaaccccccccaggagctgatcggcgagcccctggaggacctggaccccttctacagcacccagaagaccttcatcgtgctgaacaagggcaagaccatcttcagattcagcgccaccaacgccctgtacgtgctgagccccttccaccccatcagaagagccgccgtgaagatcctggtgcacagcctgttcaacatgctgatcatgtgcaccatcctgaccaactgcgtgttcatggcccagcacgacccccccccctggaccaagtacgtggagtacaccttcaccgccatctacaccttcgagagcctggtgaagatcctggccagaggcttctgcctgcacgccttcaccttcctgagagacccctggaactggctggacttcagcgtgatcatcatggcctacaccaccgagttcgtggacctgggcaacgtgagcgccctgagaaccttcagagtgctgagagccctgaagaccatcagcgtgatcagcggcctgaagaccatcgtgggcgccctgatccagagcgtgaagaagctggccgacgtgatggtgctgaccgtgttctgcctgagcgtgttcgccctgatcggcctgcagctgttcatgggcaacctgagacacaagtgcgtgagaaacttcaccgccctgaacggcaccaacggcagcgtggaggccgacggcctggtgtgggagagcctggacctgtacctgagcgaccccgagaactacctgctgaagaacggcaccagcgacgtgctgctgtgcggcaacagcagcgacgccggcacctgccccgagggctacagatgcctgaaggccggcgagaaccccgaccacggctacaccagcttcgacagcttcgcctgggccttcctggccctgttcagactgatgacccaggactgctgggagagactgtaccagcagaccctgagaagcgccggcaagatctacatgatcttcttcatgctggtgatcttcctgggcagcttctacctggtgaacctgatcctggccgtggtggccatggcctacgaggagcagaaccaggccaccatcgccgagaccgaggagaaggagaagagattccaggaggccatggagatgctgaagaaggagcacgaggccctgaccatcagaggcgtggacaccgtgagcagaagcagcctggagatgagccccctggcccccgtgaacagccacgagagaagaagcaagagaagaaagagaatgagcagcggcaccgaggagtgcggcgaggacagactgcccaagagcgacagcgaggacggccccagagccatgaaccacctgagcctgaccagaggcctgagcagaaccagcatgaagcccagaagcagcagaggcagcatcttcaccttcagaagaagagacctgggcagcgaggccgacttcgccgacgacgagaacagcaccgccggcgagagcgagagccaccacaccagcctgctggtgccctggcccctgagaagaaccagcgcccagggccagcccagccccggcaccagcgcccccggccacgccctgcacggcaagaagaacagcaccgtggactgcaacggcgtggtgagcctgctgggcgccggcgaccccgaggccaccagccccggcagccacctgctgagacccgtgatgctggagcacccccccgacaccaccacccccagcgaggagcccggcggcccccagatgctgaccagccaggccccctgcgtggacggcttcgaggagcccggcgccagacagagagccctgagcgccgtgagcgtgctgaccagcgccctggaggagctggaggagagcagacacaagtgccccccctgctggaacagactggcccagagatacctgatctgggagtgctgccccctgtggatgagcatcaagcagggcgtgaagctggtggtgatggaccccttcaccgacctgaccatcaccatgtgcatcgtgctgaacaccctgttcatggccctggagcactacaacatgaccagcgagttcgaggagatgctgcaggtgggcaacctggtgttcaccggcatcttcaccgccgagatgaccttcaagatcatcgccctggacccctactactacttccagcagggctggaacatcttcgacagcatcatcgtgatcctgagcctgatggagctgggcctgagcagaatgagcaacctgagcgtgctgagaagcttcagactgctgagagtgttcaagctggccaagagctggcccaccctgaacaccctgatcaagatcatcggcaacagcgtgggcgccctgggcaacctgaccctggtgctggccatcatcgtgttcatcttcgccgtggtgggcatgcagctgttcggcaagaactacagcgagctgagagacagcgacagcggcctgctgcccagatggcacatgatggacttcttccacgccttcctgatcatcttcagaatcctgtgcggcgagtggatcgagaccatgtgggactgcatggaggtgagcggccagagcctgtgcctgctggtgttcctgctggtgatggtgatcggcaacctggtggtgctgaacctgttcctggccctgctgctgagcagcttcagcgccgacaacctgaccgcccccgacgaggacagagagatgaacaacctgcagctggccctggccagaatccagagaggcctgagattcgtgaagagaaccacctgggacttctgctgcggcctgctgagacagagaccccagaagcccgccgccctggccgcccagggccagctgcccagctgcatcgccaccccctacagcccccccccccccgagaccgagaaggtgccccccaccagaaaggagaccagattcgaggagggcgagcagcccggccagggcacccccggcgaccccgagcccgtgtgcgtgcccatcgccgtggccgagagcgacaccgacgaccaggaggaggacgaggagaacagcctgggcaccgaggaggagagcagcaagcagacccccgaggacagctgcagcgagggcagcaccgccgacatgaccaacaccgccgagctgctggagcagatccccgacctgggccaggacgtgaaggaccccgaggactgcttcaccgagggctgcgtgagaagatgcccctgctgcgccgtggacaccacccaggcccccggcaaggtgtggtggagactgagaaagacctgctaccacatcgtggagcacagctggttcgagaccttcatcatcttcatgatcctgctgagcagcggcgccctggccttcgaggacatctacctggaggagagaaagaccatcaaggtgctgctggagtacgccgacaagatgttcacctacgtgttcgtgctggagatgctgctgaagtgggtggcctacggcttcaagaagtacttcaccaacgcctggtgctggctggacttcctgatcgtggacgtgagcctggtgagcctggtggccaacaccctgggcttcgccgagatgggccccatcaagagcctgagaaccctgagagccctgagacccctgagagccctgagcagattcgagggcatgagagtggtggtgaacgccctggtgggcgccatccccagcatcatgaacgtgctgctggtgtgcctgatcttctggctgatcttcagcatcatgggcgtgaacctgttcgccggcaagttcggcagatgcatcaaccagaccgagggcgacctgcccctgaactacaccatcgtgaacaacaagagccagtgcgagagcctgaacctgaccggcgagctgtactggaccaaggtgaaggtgaacttcgacaacgtgggcgccggctacctggccctgctgcaggtggccaccttcaagggctggatggacatcatgtacgccgccgtggacagcagaggctacgaggagcagccccagtgggagtacaacctgtacatgtacatctacttcgtgatcttcatcatcttcggcagcttcttcaccctgaacctgttcatcggcgtgatcatcgacaacttcaaccagcagaagaagaagctgggcggccaggacatcttcatgaccgaggagcagaagaagtactacaacgccatgaagaagctgggcagcaagaagccccagaagcccatccccagacccctgaacaagtaccagggcttcatcttcgacatcgtgaccaagcaggccttcgacgtgaccatcatgttcctgatctgcctgaacatggtgaccatgatggtggagaccgacgaccagagccccgagaagatcaacatcctggccaagatcaacctgctgttcgtggccatcttcaccggcgagtgcatcgtgaagctggccgccctgagacactactacttcaccaacagctggaacatcttcgacttcgtggtggtgatcctgagcatcgtgggcaccgtgctgagcgacatcatccagaagtacttcttcagccccaccctgttcagagtgatcagactggccagaatcggcagaatcctgagactgatcagaggcgccaagggcatcagaaccctgctgttcgccctgatgatgagcctgcccgccctgttcaacatcggcctgctgctgttcctggtgatgttcatctacagcatcttcggcatggccaacttcgcctacgtgaagtgggaggccggcatcgacgacatgttcaacttccagaccttcgccaacagcatgctgtgcctgttccagatcaccaccagcgccggctgggacggcctgctgagccccatcctgaacaccggccccccctactgcgaccccaccctgcccaacagcaacggcagcagaggcgactgcggcagccccgccgtgggcatcctgttcttcaccacctacatcatcatcagcttcctgatcgtggtgaacatgtacatcgccatcatcctggagaacttcagcgtggccaccgaggagagcaccgagcccctgagcgaggacgacttcgacatgttctacgagatctgggagaagttcgaccccgaggccacccagttcatcgagtacagcgtgctgagcgacttcgccgacgccctgagcgagcccctgagaatcgccaagcccaaccagatcagcctgatcaacatggacctgcccatggtgagcggcgacagaatccactgcatggacatcctgttcgccttcaccaagagagtgctgggcgagagcggcgagatggacgccctgaagatccagatggaggagaagttcatggccgccaaccccagcaagatcagctacgagcccatcaccaccaccctgagaagaaagcacgaggaggtgagcgccatggtgatccagagagccttcagaagacacctgctgcagagaagcctgaagcacgccagcttcctgttcagacagcaggccggcagcggcctgagcgaggaggacgcccccgagagagagggcctgatcgcctacgtgatgagcgagaacttcagcagacccctgggcccccccagcagcagcagcatcagcagcaccagcttcccccccagctacgacagcgtgaccagagccaccagcgacaacctgcaggtgagaggcagcgactacagccacagcgaggacctggccgacttcccccccagccccgacagagacagagagagcatcgtgtag

SEQ ID NO: 60824 - DNA, 5889 bp, Artificial Sequence
  derived and/or modified sequence
atggccaacttcctgctgcccagaggcaccagcagcttcagaagattcaccagagagagcctggccgccatcgagaagagaatggccgagaagcaggccagaggcagcaccaccctgcaggagagcagagagggcctgcccgaggaggaggcccccagaccccagctggacctgcaggccagcaagaagctgcccgacctgtacggcaaccccccccaggagctgatcggcgagcccctggaggacctggaccccttctacagcacccagaagaccttcatcgtgctgaacaagggcaagaccatcttcagattcagcgccaccaacgccctgtacgtgctgagccccttccaccccatcagaagagccgccgtgaagatcctggtgcacagcctgttcaacatgctgatcatgtgcaccatcctgaccaactgcgtgttcatggcccagcacgacccccccccctggaccaagtacgtggagtacaccttcaccgccatctacaccttcgagagcctggtgaagatcctggccagaggcttctgcctgcacgccttcaccttcctgagagacccctggaactggctggacttcagcgtgatcatcatggcctacgtgagcgagaacatcaagctgggcaacctgagcgccctgagaaccttcagagtgctgagagccctgaagaccatcagcgtgatccccggcctgaagaccatcgtgggcgccctgatccagagcgtgaagaagctggccgacgtgatggtgctgaccgtgttctgcctgagcgtgttcgccctgatcggcctgcagctgttcatgggcaacctgagacacaagtgcgtgagaaacttcaccgccctgaacggcaccaacggcagcgtggaggccgacggcctggtgtgggagagcctggacctgtacctgagcgaccccgagaactacctgctgaagaacggcaccagcgacgtgctgctgtgcggcaacagcagcgacgccggcacctgccccgagggctacagatgcctgaaggccggcgagaaccccgaccacggctacaccagcttcgacagcttcgcctgggccttcctggccctgttcagactgatgacccaggactgctgggagagactgtaccagcagaccctgagaagcgccggcaagatctacatgatcttcttcatgctggtgatcttcctgggcagcttctacctggtgaacctgatcctggccgtggtggccatggcctacgaggagcagaaccaggccaccatcgccgagaccgaggagaaggagaagagattccaggaggccatggagatgctgaagaaggagcacgaggccctgaccatcagaggcgtggacaccgtgagcagaagcagcctggagatgagccccctggcccccgtgaacagccacgagagaagaagcaagagaagaaagagaatgagcagcggcaccgaggagtgcggcgaggacagactgcccaagagcgacagcgaggacggccccagagccatgaaccacctgagcctgaccagaggcctgagcagaaccagcatgaagcccagaagcagcagaggcagcatcttcaccttcagaagaagagacctgggcagcgaggccgacttcgccgacgacgagaacagcaccgccggcgagagcgagagccaccacaccagcctgctggtgccctggcccctgagaagaaccagcgcccagggccagcccagccccggcaccagcgcccccggccacgccctgcacggcaagaagaacagcaccgtggactgcaacggcgtggtgagcctgctgggcgccggcgaccccgaggccaccagccccggcagccacctgctgagacccgtgatgctggagcacccccccgacaccaccacccccagcgaggagcccggcggcccccagatgctgaccagccaggccccctgcgtggacggcttcgaggagcccggcgccagacagagagccctgagcgccgtgagcgtgctgaccagcgccctggaggagctggaggagagcagacacaagtgccccccctgctggaacagactggcccagagatacctgatctgggagtgctgccccctgtggatgagcatcaagcagggcgtgaagctggtggtgatggaccccttcaccgacctgaccatcaccatgtgcatcgtgctgaacaccctgttcatggccctggagcactacaacatgaccagcgagttcgaggagatgctgcaggtgggcaacctggtgttcaccggcatcttcaccgccgagatgaccttcaagatcatcgccctggacccctactactacttccagcagggctggaacatcttcgacagcatcatcgtgatcctgagcctgatggagctgggcctgagcagaatgagcaacctgagcgtgctgagaagcttcagactgctgagagtgttcaagctggccaagagctggcccaccctgaacaccctgatcaagatcatcggcaacagcgtgggcgccctgggcaacctgaccctggtgctggccatcatcgtgttcatcttcgccgtggtgggcatgcagctgttcggcaagaactacagcgagctgagagacagcgacagcggcctgctgcccagatggcacatgatggacttcttccacgccttcctgatcatcttcagaatcctgtgcggcgagtggatcgagaccatgtgggactgcatggaggtgagcggccagagcctgtgcctgctggtgttcctgctggtgatggtgatcggcaacctggtggtgctgaacctgttcctggccctgctgctgagcagcttcagcgccgacaacctgaccgcccccgacgaggacagagagatgaacaacctgcagctggccctggccagaatccagagaggcctgagattcgtgaagagaaccacctgggacttctgctgcggcctgctgagacagagaccccagaagcccgccgccctggccgcccagggccagctgcccagctgcatcgccaccccctacagcccccccccccccgagaccgagaaggtgccccccaccagaaaggagaccagattcgaggagggcgagcagcccggccagggcacccccggcgaccccgagcccgtgtgcgtgcccatcgccgtggccgagagcgacaccgacgaccaggaggaggacgaggagaacagcctgggcaccgaggaggagagcagcaagcagacccccgaggacagctgcagcgagggcagcaccgccgacatgaccaacaccgccgagctgctggagcagatccccgacctgggccaggacgtgaaggaccccgaggactgcttcaccgagggctgcgtgagaagatgcccctgctgcgccgtggacaccacccaggcccccggcaaggtgtggtggagactgagaaagacctgctaccacatcgtggagcacagctggttcgagaccttcatcatcttcatgatcctgctgagcagcggcgccctggccttcgaggacatctacctggaggagagaaagaccatcaaggtgctgctggagtacgccgacaagatgttcacctacgtgttcgtgctggagatgctgctgaagtgggtggcctacggcttcaagaagtacttcaccaacgcctggtgctggctggacttcctgatcgtggacgtgagcctggtgagcctggtggccaacaccctgggcttcgccgagatgggccccatcaagagcctgagaaccctgagagccctgagacccctgagagccctgagcagattcgagggcatgagagtggtggtgaacgccctggtgggcgccatccccagcatcatgaacgtgctgctggtgtgcctgatcttctggctgatcttcagcatcatgggcgtgaacctgttcgccggcaagttcggcagatgcatcaaccagaccgagggcgacctgcccctgaactacaccatcgtgaacaacaagagccagtgcgagagcctgaacctgaccggcgagctgtactggaccaaggtgaaggtgaacttcgacaacgtgggcgccggctacctggccctgctgcaggtggccaccttcaagggctggatggacatcatgtacgccgccgtggacagcagaggctacgaggagcagccccagtgggagtacaacctgtacatgtacatctacttcgtgatcttcatcatcttcggcagcttcttcaccctgaacctgttcatcggcgtgatcatcgacaacttcaaccagcagaagaagaagctgggcggccaggacatcttcatgaccgaggagcagaagaagtactacaacgccatgaagaagctgggcagcaagaagccccagaagcccatccccagacccctgaacaagtaccagggcttcatcttcgacatcgtgaccaagcaggccttcgacgtgaccatcatgttcctgatctgcctgaacatggtgaccatgatggtggagaccgacgaccagagccccgagaagatcaacatcctggccaagatcaacctgctgttcgtggccatcttcaccggcgagtgcatcgtgaagctggccgccctgagacactactacttcaccaacagctggaacatcttcgacttcgtggtggtgatcctgagcatcgtgggcaccgtgctgagcgacatcatccagaagtacttcttcagccccaccctgttcagagtgatcagactggccagaatcggcagaatcctgagactgatcagaggcgccaagggcatcagaaccctgctgttcgccctgatgatgagcctgcccgccctgttcaacatcggcctgctgctgttcctggtgatgttcatctacagcatcttcggcatggccaacttcgcctacgtgaagtgggaggccggcatcgacgacatgttcaacttccagaccttcgccaacagcatgctgtgcctgttccagatcaccaccagcgccggctgggacggcctgctgagccccatcctgaacaccggccccccctactgcgaccccaccctgcccaacagcaacggcagcagaggcgactgcggcagccccgccgtgggcatcctgttcttcaccacctacatcatcatcagcttcctgatcgtggtgaacatgtacatcgccatcatcctggagaacttcagcgtggccaccgaggagagcaccgagcccctgagcgaggacgacttcgacatgttctacgagatctgggagaagttcgaccccgaggccacccagttcatcgagtacagcgtgctgagcgacttcgccgacgccctgagcgagcccctgagaatcgccaagcccaaccagatcagcctgatcaacatggacctgcccatggtgagcggcgacagaatccactgcatggacatcctgttcgccttcaccaagagagtgctgggcgagagcggcgagatggacgccctgaagatccagatggaggagaagttcatggccgccaaccccagcaagatcagctacgagcccatcaccaccaccctgagaagaaagcacgaggaggtgagcgccatggtgatccagagagccttcagaagacacctgctgcagagaagcctgaagcacgccagcttcctgttcagacagcaggccggcagcggcctgagcgaggaggacgcccccgagagagagggcctgatcgcctacgtgatgagcgagaacttcagcagacccctgggcccccccagcagcagcagcatcagcagcaccagcttcccccccagctacgacagcgtgaccagagccaccagcgacaacctgcaggtgagaggcagcgactacagccacagcgaggacctggccgacttcccccccagccccgacagagacagagagagcatcgtgtag

SEQ ID NO: 60825 - DNA, 873 bp, Artificial Sequence
  derived and/or modified sequence
atggatattgaggcctaccttgagcggataggctacaagaagtccagaaacaagctggatctcgagacacttactgacattctccagcaccagatacgagcagtgcctttcgagaacctaaacatccactgtggcgacgccatggacctgggcctggaagctatctttgatcaagtggtgagacgcaataggggcggttggtgtctgcaagtaaatcacctgctgtattgggccctcaccaccattggattcgagaccactatgctagggggatatgtgtacagcacccctgctaagaagtactcaaccggcatgattcatcttctgcttcaggttacaattgacggccgaaattatattgtcgatgctggcttcggcaggtcataccagatgtggcagcccttggagctcatatccgggaaggatcagccccaggtgccctgcgtgttcagattgacggaagagaacggcttttggtatctggaccagattaggagagaacagtatattccaaacgaagagtttctccactccgacctgctggaggattcaaagtatagaaaaatctatagctttacacttaagccacgtacaatcgaggattttgagtccatgaatacctacctgcagacctctccatccagcgtcttcacatctaagagcttctgttctctccagacgccagacggcgtccactgtttagttggattcacgctcacacacaggcggttcaattacaaagataacaccgatcttatcgaattcaaaactctgagcgaggaagaaattgaaaaggtgcttaagaatatcttcaatatatcactacagaggaaactggttcctaaacatggtgatcgcttcttcacaatatag

SEQ ID NO: 60826 - DNA, 873 bp, Artificial Sequence
  derived and/or modified sequence
atggatatcgaggcctacctggagcgcataggttacaaaaaaagtcggaacaagttggatctcgagacactgacggacatccttcaacaccagatcagagccgtgccatttgaaaatctcaacattcactgtggtgatgccatggacctaggtctcgaagccatttttgaccaggtggtgaggcgcaaccggggcggctggtgtcttcaggtcaaccacctgttatattgggctctgaccacaattggcttcgaaactactatgttaggcggatacgtttattcgactccagcaaagaaatactccaccgggatgattcatctcctgctccaggtcacaattgacggacgcaactatatcgtggacgctggatttgggcggtcttatcagatgtggcaaccgctggaactgatctccggaaaggaccagccacaggttccatgcgtgtttcgacttaccgaagaaaatggcttttggtacctagaccagatacggcgagaacagtatatccccaacgaagaatttttgcactcggacctgctagaggacagcaagtatagaaagatttatagcttcacattaaaacccagaacgatcgaggatttcgaaagtatgaatacgtacctgcagacttctccctcatcagtctttacaagtaagtccttctgctccctgcagaccccagacggcgtccattgcctggtgggcttcaccttgactcaccgtagatttaattataaggacaacaccgacttgatagaattcaagacactatctgaggaggagatagaaaaggtcctaaaaaatatttttaacatcagtctgcagagaaagctggtccccaaacacggtgaccgtttcttcacaatttag

SEQ ID NO: 60827 - DNA, 873 bp, Artificial Sequence
  derived and/or modified sequence
atggatatcgaggcttacctcgagcgcattggctacaagaagtccaggaataaattagacctggaaactctgactgacattttgcagcaccagatcagggccgttccctttgagaacctgaacatccactgtggagatgcaatggacttgggtcttgaggccatcttcgaccaggtggttaggagaaaccgagggggctggtgccttcaggtcaatcacctcctttactgggccctgaccactatcggcttcgaaaccactatgctcggcggctatgtgtatagcaccccagcgaaaaaatactctacagggatgattcatctcctgcttcaggtgacgatagacggccgcaactacattgtggatgcgggtttcggccgtagttatcagatgtggcagcctctggagcttataagcggaaaagaccagccgcaggtaccctgcgtcttcagactgacagaagagaacggtttttggtatcttgatcagattagaagagaacagtatattcctaatgaagagttcctgcacagcgacttgctcgaggactctaaataccggaagatttattcctttacacttaagcccagaacaatcgaagactttgagtccatgaacacatatctgcaaacctcacccagctcagtttttacaagcaaatcattttgtagtcttcagacccccgacggggtgcactgtctggtaggatttacccttactcaccgacgatttaattacaaagacaacaccgacctcattgagtttaaaacactgtcagaggaagagattgagaaagtgcttaaaaatatttttaacatcagcctgcagagaaagctcgtcccaaaacacggtgataggtttttcaccatttag

SEQ ID NO: 60828 - DNA, 873 bp, Artificial Sequence
  derived and/or modified sequence
atggatattgaggcctaccttgaacggataggttataagaagtctcggaataagcttgacctcgagacactgaccgatatcctgcagcaccagatccgcgcggtgcctttcgagaatctcaatattcactgtggcgacgccatggatctgggcctggaggcaattttcgatcaagttgtgaggcggaaccgaggaggctggtgtctgcaggtcaatcacctattgtactgggcactcaccactattggttttgagactacaatgcttggcggctacgtctacagcacacccgcaaaaaagtacagcacagggatgattcacttactgttgcaagtgaccattgatgggcgcaattatatcgtggacgccggctttggccggagttaccagatgtggcagcctctggagctcatcagcgggaaggaccagccgcaagtaccgtgtgtgttcaggctgactgaggagaatgggttttggtatcttgatcagattagacgagaacagtatatcccaaatgaggaattcctgcactcagacctgcttgaggatagtaaatacagaaaaatttattcgtttacactgaaaccaagaaccatcgaagacttcgaaagcatgaacacatatctccagacatctccctccagtgtctttactagtaagtcgttttgcagcctgcaaactccagatggggtacactgcctggtcggattcactttaacacacaggaggtttaactataaggataacaccgaccttattgagtttaagactctgagcgaggaggagattgaaaaagtgctaaagaatatttttaacatatccctgcagagaaaactggtgccgaagcacggcgataggtttttcaccatttag

SEQ ID NO: 60829 - DNA, 873 bp, Artificial Sequence
  derived and/or modified sequence
atggatattgaagcatacttggaacgtattggctataaaaagtccagaaataaactggacctagagacactgacagacatccttcagcaccagatacgcgcagtgcccttcgagaatctcaacatccattgtggcgatgctatggatctgggcctcgaggccatctttgatcaggtagtaagaagaaaccgaggagggtggtgtttacaggtgaaccatctgttgtattgggccctgaccacaattggcttcgaaaccaccatgttaggcgggtacgtttactccacccctgccaagaaatacagcacaggaatgattcacctgttgctccaggtcactatcgatgggcgcaactatatcgtggatgcgggtttcggccggtcctaccaaatgtggcaacctctggaattgatctctggtaaggaccagccccaggttccctgtgtgttccggctcacagaggagaacggattctggtaccttgaccaaatccgccgggaacagtacatacccaatgaagagtttttacacagcgatctcctggaagatagcaagtatcgaaaaatctattcttttacactgaagcctaggacaattgaagactttgagagtatgaacacctacctgcagacctcaccatcttctgtgttcactagcaaaagcttttgtagtctgcagacacctgatggggtccattgtctggtggggtttactttgactcatcggaggttcaattacaaggacaacacagatctgatcgaatttaaaacactttccgaggaggaaattgaaaaggtgctgaaaaacattttcaacataagtttacagaggaagctggtgccgaaacatggcgaccgattctttaccatctag

SEQ ID NO: 60830 - DNA, 873 bp, Artificial Sequence
  derived and/or modified sequence
atggacatcgaggcctaccttgagcggatcggttataagaagtctaggaataaactggatttggaaacactgactgacattctgcagcaccaaatccgggcagtccccttcgagaatctgaatatacactgtggagatgccatggatttgggactggaagctatcttcgatcaggtggtgcgtcggaaccgggggggctggtgtctgcaggtgaatcaccttctttattgggctcttaccacaatcgggtttgagactacaatgctgggaggctatgtgtactctacccccgctaagaaatatagtacgggaatgatccatttactgctgcaggtgaccatcgatggccgcaattacattgttgatgctggttttggacgttcttatcagatgtggcagccccttgaacttataagcggtaaggaccaaccccaggtgccttgcgtcttccgactgactgaagagaatggcttttggtatctagaccagatccgacgcgagcaatatatcccaaatgaggagttcctccattccgatctgctggaggactcaaagtataggaagatttattcatttactctaaaacccagaacaatcgaggattttgagtccatgaatacttatctgcagacttcaccctcatccgtgttcacatcgaaatcattttgctctctccagacgcccgacggagttcactgcctggtaggattcaccctgactcaccgaagattcaattacaaggacaacaccgatcttattgaattcaaaactctgtcagaggaagaaatagagaaggttctcaagaatatctttaatatatcactgcagcgtaaactcgtacccaaacacggagaccgatttttcactatctag

SEQ ID NO: 60831 - DNA, 873 bp, Artificial Sequence
  derived and/or modified sequence
atggacatagaggcctatctggagagaatcgggtataagaaatccagaaacaaactggatttggagacactgacggatatcctgcagcaccagatcagggcagtgccattcgaaaacctcaatatccactgtggcgatgccatggatctcggtctagaggctatattcgatcaagtagttcggaggaatcgcggcggatggtgtctccaggtgaaccacttgctctactgggccttaaccaccatcgggttcgagaccaccatgttgggcgggtatgtgtatagcacccccgcaaaaaaatattcaactggcatgatccatctccttctgcaggtcactatcgacggaagaaactatatcgtggatgctggcttcgggaggtcctaccagatgtggcagcccctcgagctcatttctggcaaagaccaaccgcaggtaccatgtgtctttaggctgactgaggagaacgggttttggtacctggatcagatccggagagaacagtatattccaaacgaagaattcctgcactctgacctgttagaggactccaaatacagaaagatttatagctttaccttgaaacccagaacaatcgaggattttgagtctatgaatacctacctgcaaacatctccgtccagcgtgttcacaagcaaatctttttgtagcctgcagacacctgacggcgtgcattgccttgttggctttacccttacacatcgtcgcttcaactataaggacaatacagacctgatcgagttcaagaccttgtccgaggaggagatcgagaaagtcctcaagaacatatttaatattagtctccagcgcaaactggttcccaagcatggggatcgctttttcacaatatag

SEQ ID NO: 60832 - DNA, 873 bp, Artificial Sequence
  derived and/or modified sequence
atggacatcgaggcctacctggagcgcatcggctacaagaagagcaggaacaagctggacctggagaccctgacagacatcctgcagcaccagatccgggctgtgccctttgagaacctgaacatccactgtggagatgccatggacctgggcctggaggccatctttgaccaggtggtgagaagaaacagaggaggctggtgcctgcaggtgaaccacctgctgtactgggccctgaccaccatcggctttgagaccaccatgctgggcggctacgtgtacagcaccccagccaagaagtacagcacaggcatgatccacctgctgctgcaggtgaccattgatggaagaaactacatcgtggatgctggcttcggccgcagctaccagatgtggcagcccctggagctgatcagcggcaaggaccagccccaggtgccctgtgtgttccggctgacagaagaaaatggcttctggtacctggaccagatcagaagagagcagtacatccccaatgaggagttcctgcacagcgacctgctggaggacagcaagtacaggaagatctacagcttcaccctgaagcccaggaccatcgaggactttgagagcatgaacacctacctgcagaccagccccagctctgtgttcaccagcaagagcttctgcagcctgcagaccccagatggagtgcactgcctggtgggcttcaccctgacccaccggcgcttcaactacaaggacaacacagacctgattgagttcaagaccctgtctgaggaggagattgagaaggtgctgaagaacatcttcaacatcagcctgcagaggaagctggtgcccaagcatggagaccgcttcttcaccatctag

SEQ ID NO: 60833 - DNA, 873 bp, Artificial Sequence
  derived and/or modified sequence
atggacatcgaggcctacctggagcggatcggctacaagaagagcagaaataagttggacctcgagacattaaccgatatcttgcaacaccagatacgagctgtacccttcgagaacctgaacattcactgcggagacgcaatggaccttgggctggaagcaatcttcgaccaggtggttcgacgtaaccggggtggctggtgtttgcaagtgaaccatcttttgtattgggctctaacaactatagggttcgaaacgaccatgcttggcggctacgtgtattcaaccccagcaaagaagtactcaactggcatgattcaccttttactgcaggtcaccatcgacggacgtaactatattgtagatgccggtttcgggaggtcataccaaatgtggcaacccttagagctgatatccgggaaggaccagccgcaggtgccgtgtgttttccgcttaaccgaagagaatggattttggtatctggaccagattagaagggagcagtacatcccgaatgaggaattcctgcacagtgatctactggaagactccaaataccggaaaatctacagttttacactgaaaccccggacaattgaggatttcgaaagcatgaatacttacctgcagacaagcccgtcttccgtcttcacatcaaagagcttctgttccctgcagactccggatggagtccactgtctggtcgggttcacactaacacacagacgcttcaattacaaagacaacacggatctgatcgagtttaaaaccctgtccgaggaagagatcgagaaggttctgaagaacatcttcaatataagcttacagcgcaaactggtgcccaaacacggcgatcggttcttcactatctag

SEQ ID NO: 60834 - DNA, 873 bp, Artificial Sequence
  derived and/or modified sequence
atggacatcgaggcctacctggagcggatcggctacaagaagagccgcaataagcttgatctggagactctgactgacattctgcagcatcagatcagggctgtcccctttgagaacctgaatatccactgcggcgacgcgatggacctagggctggaagctatcttcgatcaggtggtgcggcgcaaccgcggggggtggtgcttgcaggtcaaccatctgctctactgggccctgaccaccataggctttgaaacaactatgttgggtggctacgtttactcgactccagccaaaaagtactcaaccggcatgatccacttgctgctgcaggttaccatagatgggcgaaattacattgtggacgccgggtttggcaggagttaccagatgtggcagcctctggaattaatcagtgggaaggaccagcctcaggtcccctgtgtttttcggctgacggaggaaaatgggttttggtaccttgatcagatccggagggaacaatatattcctaacgaggagtttctgcactctgacctgttggaggatagcaagtaccgcaagatctactctttcacactcaagccgaggaccatcgaggatttcgagtccatgaatacctacctccagacaagtcctagttccgttttcacatccaaatctttttgtagccttcagacacccgacggagttcactgtctggttggctttacccttacacatcggcgattcaattacaaggataacaccgatcttatcgaatttaagacgctttccgaagaagaaattgaaaaggtattgaagaatatctttaacatttcactgcagcgcaagctggttcctaagcatggcgaccggttctttacaatatag

SEQ ID NO: 60835 - DNA, 873 bp, Artificial Sequence
  derived and/or modified sequence
atggacatcgaggcctacctggagcggatcggctacaagaagagccgcaacaagttggacctcgaaacattaacagacatccttcaacatcaaataagagcagtgccattcgagaatctgaatatccactgtggggacgccatggacttggggctcgaggcaattttcgatcaggtggtacggcggaaccgggggggttggtgtctgcaggttaaccatctgctgtactgggccctcaccacaattggattcgaaactaccatgctgggcggttacgtctattctacacccgcaaaaaagtactctacagggatgatccatctgcttctccaggtgaccattgacggcagaaattatatcgtagacgcgggctttggaaggtcctaccagatgtggcagcccctggagctaatttcgggaaaagaccagccccaggtcccatgcgtgttcaggctaactgaggagaacggcttttggtacttggaccagattaggcgggagcagtatatccctaacgaggaatttctgcacagcgaccttttggaggacagcaaatatcgcaagatctacagctttactttgaagcctagaaccatcgaggactttgagtctatgaacacatatttacagacctcaccttcaagcgtttttactagcaaatccttctgctctttgcagaccccagatggagtccactgcttagtgggtttcactcttactcacaggcggttcaattacaaagacaacacagatctgattgagttcaagactctctcagaagaggaaatcgagaaagtgcttaaaaacatcttcaatatcagcctgcagcgcaaattggtcccgaagcacggagatcgcttcttcactatctag

SEQ ID NO: 60836 - DNA, 873 bp, Artificial Sequence
  derived and/or modified sequence
atggacatcgaggcctacctggagcggatcggctacaagaagagcagaaacaaactggacctggagacccttactgatattttgcagcaccaaatcagggcagtgccattcgaaaacctcaatatccattgcggggacgccatggatctgggcctcgaagccatatttgaccaggtggtgcggaggaaccgcggcggatggtgtcttcaagtgaatcaccttctctactgggccctcacaactatcgggttcgagacgaccatgctgggtggatatgtttacagtacccctgcaaaaaaatatagcacagggatgatccatctgttgctgcaggttaccatcgatgggcgaaattacattgtggacgccggatttggcaggagctatcaaatgtggcaaccacttgaactaatatcggggaaggaccaaccccaggtcccttgtgtgtttcgcctgaccgaagagaacgggttttggtatctagatcaaatcagacgtgaacagtacatccctaacgaagagtttctacacagcgacctgcttgaagactcaaaataccgaaagatctattcttttacactgaaaccacggaccatcgaggacttcgaatccatgaatacatacctgcagacatctccctcttcagtgttcacatccaagagcttctgttccctgcagactcccgacggtgtacactgcttagtcggcttcaccctcacccatcggcgcttcaactacaaggataatactgacctcatcgagttcaaaacactgtctgaagaggagatagaaaaagttttgaagaacatctttaatataagtctgcagcgtaagttggtacccaaacacggcgatagattcttcacaatatag

SEQ ID NO: 60837 - DNA, 873 bp, Artificial Sequence
  derived and/or modified sequence
atggacatcgaggcctacctggagcggatcggctacaagaagagcaggaacaaactagacctggagaccctgaccgatatcttgcagcaccagatcagggcggtcccctttgaaaatctaaatattcactgtggcgatgccatggatctcggcctggaggctattttcgaccaggtcgtccgtcgcaatcggggaggatggtgcctacaggtcaatcacctgttgtactgggctctgactaccattggctttgagaccacaatgttgggcggatacgtgtactctactccagcaaaaaagtatagcactgggatgattcatttactcctgcaggttacaattgacgggcggaactacatcgttgacgctggcttcggacggtcctatcagatgtggcagccgctggagctgattagcggaaaagaccagcctcaagtgccctgcgtgtttcggctgactgaggagaacggattctggtacttggatcaaataaggagggaacagtacatcccaaacgaggagttcctccacagcgatctgctcgaggacagcaagtaccgcaagatctattcgtttaccctcaaaccaaggacaatcgaagatttcgaatctatgaacacatatcttcagacttctccgagctctgtgttcactagtaaatctttttgtagcctccagaccccagacggggtgcactgccttgtgggctttaccctgacccaccgccggttcaattacaaggataatactgacctcattgagtttaaaaccttgtcagaggaggagatcgaaaaagtactgaaaaacatatttaacattagtctccagagaaaactcgtcccaaagcatggcgaccggttcttcaccatttag

SEQ ID NO: 60838 - DNA, 873 bp, Artificial Sequence
  derived and/or modified sequence
atggacatcgaggcctacctggagcggatcggctacaagaagagcaggaataaactggatcttgaaacgttgactgacattcttcagcaccaaattagggctgtgccgttcgagaacctgaacattcactgtggcgacgctatggatctcggtttggaagcgattttcgaccaggtggtgaggcggaatcgtggtgggtggtgtcttcaggtaaatcacctcttgtattgggccttgacgaccattggcttcgagacaacgatgctgggcggatacgtctatagtaccccggctaaaaaatactccacaggaatgatacacctgctgctgcaggtcactattgatggcaggaactatatcgtggatgccggctttggcaggagctaccaaatgtggcagcctctggagctaatctcgggcaaggaccaaccacaagtcccctgtgtcttccggcttacagaggagaacgggttctggtacctggatcagattagaagggagcagtatatcccgaacgaggagtttctgcatagtgacctgcttgaggatagcaagtatagaaaaatttacagttttacccttaaacctagaacaattgaggatttcgaaagtatgaacacctatctgcagactagcccttcgtcagtgttcacctccaaatctttttgtagcttacagacccccgacggggtacattgcctggtagggttcaccttgactcatagacgcttcaattataaggataacaccgacctgatcgaattcaaaacactgagcgaggaagaaatagagaaggtgctgaagaacattttcaatatatctctccagcgaaagctggtgccaaagcacggggacaggttttttacaatttag

SEQ ID NO: 60839 - DNA, 873 bp, Artificial Sequence
  derived and/or modified sequence
atggacatcgaggcctacctggagcggatcggctacaagaagagcaggaataagttggacttagagaccctgactgatattctacaacatcaaatccgggctgtccccttcgaaaacctgaatatacattgcggagatgccatggacctcggcctggaagctatttttgaccaagttgtgcgaagaaatcgtggaggctggtgcttgcaagtgaaccacctcctttattgggcgctgacaactattggcttcgagacaaccatgctgggtggttacgtctattctaccccagccaaaaagtactcaacaggcatgatccacctgctcttacaggtcaccatcgacggccggaattatattgttgatgccggatttggacgaagctaccaaatgtggcagcccctggagctgatttccgggaaggaccagccacaggtcccttgcgtattccgcctgaccgaggaaaacgggttctggtacttggatcagatcagaagagagcagtacattcccaacgaagagtttctccacagcgacctgttagaagattctaagtataggaaaatttacagcttcacgctgaagccccgtaccattgaagacttcgaatcaatgaacacgtacctccagacatctccgagctcggtgttcacgagtaaaagtttctgcagccttcagacccccgatggcgtgcactgcctcgtgggcttcaccttgactcatagacggtttaactacaaagacaataccgacctgatcgagttcaaaacgctctccgaggaggaaatcgagaaggtgctgaagaatatcttcaatatttccttacagagaaagttagtcccaaaacacggagataggttcttcaccatttag

SEQ ID NO: 60840 - DNA, 873 bp, Artificial Sequence
  derived and/or modified sequence
atggatattgaagcatatctggaacgaattggctacaagaagtcgagaaacaagctagatctggaaactctgaccgacatcttacagcatcagattagggcagtgcctttcgagaatctgaacatccactgcggggatgcaatggacttagggttggaggccatctttgatcaggtcgttcgacgaaataggggcggatggtgtctgcaagttaatcatctgctttattgggctttgacgaccattggctttgaaaccaccatgctcggtggttacgtttacagtacccccgctaagaaatactccacgggcatgatccacctacttttgcaggttactatagatgggcgtaactatatagttgatgcaggtttcggcaggtcctatcagatgtggcaacctttagagttgatcagcggcaaagaccagccgcaagttccttgcgtcttccggcttactgaggagaatggattttggtaccttgaccagatcaggagggagcaatatattcccaatgaagagttcctgcatagcgaccttctggaggactctaaatacaggaaaatctactcttttactctaaagccacgtactattgaggatttcgaatccatgaatacctacctgcagacatccccctcctcggtgttcacatcgaagtcattctgctccctgcagactcccgacggagtacattgcttggttggcttcactctgacacatcggagattcaattataaggataacaccgaccttatagagtttaagacacttagcgaggaggagatcgagaaagtcctcaaaaacatcttcaacatctccttgcaaagaaaactcgttccaaagcacggggataggttcttcacaatctag

SEQ ID NO: 60841 - DNA, 873 bp, Artificial Sequence
  derived and/or modified sequence
atggatatcgaggcctatctggagcgtatcgggtataagaagagtaggaataagctcgacctcgaaaccctgactgacatcttgcagcatcagattcgggctgttccttttgaaaacttaaacatccattgtggggatgccatggacctgggcctggaagcaatcttcgaccaagtcgtacggcgaaaccgaggcggttggtgtctgcaggtgaatcatctgctctactgggctcttactacaattggcttcgagaccactatgctggggggatacgtttatagtacaccagcgaagaagtactctactggaatgatccacctgcttctacaagtgaccattgacggtagaaactacatagtggatgctggatttggcaggtcctatcagatgtggcagcccttggagcttatttctggcaaagatcagccccaggtcccatgcgtttttcggctcacggaagagaatggcttctggtacctggaccagattagaagggagcagtacatccccaacgaggagtttttgcattccgacctgctggaagacagtaaatatcgcaaaatctactcctttacactgaaacctcggactatcgaggacttcgagtctatgaatacttacctccaaacctctccttctagcgtatttacaagtaaaagtttctgttccctacaaacgcctgacggcgtgcactgtctcgtgggattcacactgacacaccggaggttcaactacaaagacaataccgatttgatagagtttaagacgctgtcagaagaagaaatcgaaaaggtcctcaaaaatatcttcaacatctctctgcagcgcaaacttgttcctaagcatggagatcgcttctttacgatttag

SEQ ID NO: 60842 - DNA, 873 bp, Artificial Sequence
  derived and/or modified sequence
atggacattgaagcgtacctcgaacgtattggctataaaaagagccgtaataagttggacctggaaacccttacagacatcctgcagcaccagatacgtgccgtgcccttcgaaaatctcaatattcactgcggggacgcgatggatctaggactggaagctatattcgatcaggtggttcgacggaacagaggcggttggtgtcttcaagtcaatcacctcttatactgggcactcaccaccattggttttgaaaccacgatgctagggggttacgtttattcgacgcctgcaaaaaagtactctaccggcatgatacacctcttattacaggtgactattgacggcaggaattacatagtggacgccggattcggcagatcttatcaaatgtggcaacccctggagcttatttctggcaaggatcagccccaggtgccttgtgtctttcggctcaccgaagagaacggcttctggtacctggaccagattagacgggaacagtatataccaaacgaagaattcctccatagcgacttgctggaggacagtaagtataggaagatctacagtttcaccctgaaaccgaggacaattgaagatttcgagagcatgaatacctacttgcagacttccccctcaagcgtcttcacatctaagagtttttgttcattgcagacacctgacggggtgcattgtttggtagggttcaccttgacacaccgacgcttcaattacaaagataatactgacttgattgagtttaaaactttgagtgaggaggagatcgaaaaggtgctaaaaaacatctttaacattagcctccagcggaaactcgtgcctaagcatggtgaccgtttttttacaatctag

SEQ ID NO: 60843 - DNA, 873 bp, Artificial Sequence
  derived and/or modified sequence
atggacatcgaggcttatctggagcggattgggtacaagaaatccagaaataagctggatttggaaacattgactgacatccttcaacaccagatcagggctgtcccttttgagaatctcaatatacactgtggcgacgctatggatctcggactcgaagctatctttgaccaggttgtgcgcaggaaccggggaggatggtgtctccaggtcaaccacctgctgtattgggcattaaccaccattggcttcgagaccaccatgcttggcggatacgtgtacagcacgcccgcaaaaaaatatagtaccggcatgatacatttgttactacaagttaccatcgatggcaggaactatattgtcgacgcaggcttcggaagatcatatcagatgtggcaacctctggaattgatctccggcaaagatcagccacaggttccctgtgtgtttcgccttactgaagaaaacggattctggtacctcgaccagatcagacgggaacagtatatccccaatgaagagtttctgcattccgatttattggaagactccaaataccggaagatttactcttttacgctaaaacctcggactattgaggactttgaaagtatgaatacatacctgcagacctcaccgtccagtgtatttacctctaagtcgttctgctctctccaaacacccgacggcgtgcattgcctggtggggtttacactgacccacaggagatttaattacaaggataatactgatctaattgagttcaaaacactgagcgaagaagagattgaaaaagtgcttaaaaacatctttaatatttctctccagcggaaattggtgccgaaacacggtgatagatttttcaccatctag

SEQ ID NO: 60844 - DNA, 873 bp, Artificial Sequence
  derived and/or modified sequence
atggacattgaggcgtatctggaacgaatcggctacaaaaaatctcgcaacaagctcgacctggaaacgctgaccgacatccttcagcatcagattcgcgcagtgccgtttgaaaatttgaacattcattgtggtgacgccatggacctcggtctggaggcaatctttgaccaagtggtacggagaaatcgcggaggatggtgtctccaggtgaaccacctcctatactgggccctgacaaccattggattcgagacaaccatgctgggcggttatgtctattctactccagcgaaaaaatacagtaccggaatgatccacctgctcctacaggtaacgatcgatggcaggaattatatcgtggatgccggatttggcaggagctaccaaatgtggcaaccgctggaattgatttccgggaaggatcaaccccaagtgccatgtgtgttccgccttacagaggaaaatggtttctggtacctcgatcaaatccggagggagcaatacattccaaatgaggagtttttacattccgatctgttggaagactccaagtaccgtaaaatctatagctttaccctaaagccacgcactatcgaggattttgagtctatgaacacttatctgcagacctctccttccagcgtgttcacttctaaatccttctgctctttacagaccccagatggcgtgcattgcttagtggggtttactcttacccacaggagattcaattacaaggacaatacagacctcattgaattcaagacactgtccgaggaagagattgagaaggtcctgaagaatatcttcaacataagtctccagaggaagctcgtgccaaagcatggcgaccgtttctttaccatatag

SEQ ID NO: 60845 - DNA, 873 bp, Artificial Sequence
  derived and/or modified sequence
atggatatcgaggcctacctggagcgtattggctacaaaaagagcaggaacaagttggacctggaaactctcactgacatcctccagcaccagatcagagcagttcctttcgagaatttaaatatacattgcggtgacgctatggacctgggacttgaagccatttttgatcaggtggtgcgtcgaaaccgaggtggatggtgcctgcaggtaaatcacttgctgtactgggccctgactacaatcggattcgaaaccactatgttggggggatatgtctacagcacccccgctaaaaagtacagcacgggaatgattcacttgctattgcaggtcacgattgatggcaggaattatatagtcgacgctggcttcggaaggtcttaccagatgtggcagcccctggagctcatctctggcaaagaccaaccacaagtcccttgcgtttttcggctgacagaggaaaacgggttctggtacctggaccaaatccggcgtgagcaatacatccccaacgaagagtttttgcactcagacctcctcgaggactccaaatatcggaagatctattccttcaccctgaagcctcgcactatcgaagattttgagagcatgaacacttacttgcagacatctccctcatccgtctttacttctaaaagtttttgctcgttgcagaccccagacggcgtgcactgcttagtggggtttactctgacgcacaggcgatttaactacaaggacaacactgatcttatcgaattcaagacactaagcgaggaggagattgaaaaggtcttgaagaacatctttaacatctcactgcagaggaaactggtccctaagcacggtgaccgatttttcacgatttag

SEQ ID NO: 60846 - DNA, 873 bp, Artificial Sequence
  derived and/or modified sequence
atggacatagaggcataccttgagaggatcggatataagaaatcccggaacaagctggatttggaaacgctcaccgacatccttcagcaccagatccgggcagttccgttcgaaaatcttaacatccattgcggagacgccatggacctggggcttgaggccattttcgatcaggtcgtgcgacgcaataggggcggatggtgtttacaagtgaatcatctattgtactgggctctgaccacaataggctttgagacaacaatgttggggggatacgtatattccacaccagccaagaaatactctacgggcatgatccacctgctgcttcaggtgaccattgacggacgaaattacatcgtcgatgccggatttggacggtcttaccaaatgtggcagcctctggaactgatctctggtaaggaccagccccaggtaccatgtgtgtttcgccttactgaggagaacggcttttggtaccttgaccagatccgccgagagcagtatattccgaatgaggagttcctgcacagcgatctcctcgaggacagtaagtacaggaagatttacagctttacactgaaacccaggaccatcgaagattttgagtccatgaatacttatcttcaaacctccccatcatccgtttttaccagtaagagcttctgtagcctgcagacgccagacggggttcattgcttggtgggtttcactctgacccaccgaagattcaactataaagacaatactgatttgatcgaatttaagacactgagcgaggaggagatcgagaaagtgctcaagaacatcttcaacatcagcctccagaggaaactcgttccaaagcatggggatcgattcttcaccatatag

SEQ ID NO: 60847 - DNA, 873 bp, Artificial Sequence
  derived and/or modified sequence
atggacatcgaggcctacctggagagaatcggctacaagaagagcagaaacaagctggacctggagaccctgaccgacatcctgcagcaccagatcagagccgtgcccttcgagaacctgaacatccactgcggcgacgccatggacctgggcctggaggccatcttcgaccaggtggtgagaagaaacagaggcggctggtgcctgcaggtgaaccacctgctgtactgggccctgaccaccatcggcttcgagaccaccatgctgggcggctacgtgtacagcacccccgccaagaagtacagcaccggcatgatccacctgctgctgcaggtgaccatcgacggcagaaactacatcgtggacgccggcttcggcagaagctaccagatgtggcagcccctggagctgatcagcggcaaggaccagccccaggtgccctgcgtgttcagactgaccgaggagaacggcttctggtacctggaccagatcagaagagagcagtacatccccaacgaggagttcctgcacagcgacctgctggaggacagcaagtacagaaagatctacagcttcaccctgaagcccagaaccatcgaggacttcgagagcatgaacacctacctgcagaccagccccagcagcgtgttcaccagcaagagcttctgcagcctgcagacccccgacggcgtgcactgcctggtgggcttcaccctgacccacagaagattcaactacaaggacaacaccgacctgatcgagttcaagaccctgagcgaggaggagatcgagaaggtgctgaagaacatcttcaacatcagcctgcagagaaagctggtgcccaagcacggcgacagattcttcaccatctag

SEQ ID NO: 60848 - protein, 676 aa, Artificial Sequence
  derived and/or modified sequence
MAAAKVALTKRADPAELRTIFLKYASIEKNGEFFMSPNDFVTRYLNIFGESQPNPKTVELLSGVVDQTKDGLISFQEFVAFESVLCAPDALFMVAFQLFDKAGKGEVTFEDVKQVFGQTTIHQHIPFNWDSEFVQLHFGKERKRHLTYAEFTQFLLEIQLEHAKQAFVQRDNARTGRVTAIDFRDIMVTIRPHVLTPFVEECLVAAAGGTTSHQVSFSYFNGFNSLLNNMELIRKIYSTLAGTRKDVEVTKEEFVLAAQKFGQVTPMEVDILFQLADLYEPRGRMTLADIERIAPLEEGTLPFNLAEAQRQQKASGDSARPVLLQVAESAYRFGLGSVAGAVGATAVYPIDLVKTRMQNQRSTGSFVGELMYKNSFDCFKKVLRYEGFFGLYRGLLPQLLGVAPEKAIKLTVNDFVRDKFMHKDGSVPLAAEILAGGCAGGSQVIFTNPLEIVKIRLQVAGEITTGPRVSALSVVRDLGFFGIYKGAKACFLRDIPFSAIYFPCYAHVKASFANEDGQVSPGSLLLAGAIAGMPAASLVTPADVIKTRLQVAARAGQTTYSGVIDCFRKILREEGPKALWKGAGARVFRSSPQFGVTLLTYELLQRWFYIDFGGVKPMGSEPVPKSRINLPAPNPDHVGGYKLAVATFAGIENKFGLYLPLFKPSVSTSKAIGGGP

SEQ ID NO: 60849 - DNA, 2031 bp, Artificial Sequence
  derived and/or modified sequence
atggccgctgctaaagtcgcattaacgaagcgcgcggatccagcagaacttagaaccatcttcctgaagtatgcctctatcgagaagaacggtgagttcttcatgtcccccaatgattttgtgactcggtatctgaacattttcggagagagtcagcccaaccctaagaccgttgagctgttgagtggagtcgtagaccagacaaaagacggcctgatctccttccaggagttcgttgcttttgagtccgtactttgtgcccccgacgctctgttcatggtcgctttccaactctttgacaaggcaggcaaaggcgaggtgacattcgaggatgtcaagcaggtttttggacagactacaattcatcagcatatccccttcaactgggactctgagtttgtccagcttcacttcggaaaggagcgaaaacggcatttaacttatgccgaatttacccagttcctgcttgaaatccagctagaacatgcaaagcaggccttcgtacagcgagataacgctagaactggccgtgtgactgccatcgactttcgggatattatggttacaatcagaccacacgtgctaacccctttcgtggaagaatgtctggtcgccgcagccggtgggaccactagccaccaggtctctttctcatatttcaacgggttcaacagtttactgaacaatatggaacttatccggaaaatatactcaacactagctggcacacgcaaggacgtagaggtaactaaagaggaatttgttcttgccgcgcagaaatttggacaggttacccctatggaggttgatatcttgttccagctggcggacctctatgagcctcgaggcagaatgacattagccgacatagagcgcattgcgccgctggaagaggggacactgccgttcaatcttgcggaggctcagcgccaacagaaggccagcggcgatagcgcgagacccgttttactccaggtggcagagtcagcatatcgattcggccttggatctgtggctggagcagtgggcgctactgccgtatacccgatcgacttggtcaagactcgcatgcagaatcaaaggagcactgggtcgtttgtgggcgagctaatgtacaaaaatagttttgattgcttcaagaaggtactgagatacgagggctttttcggcctctacagaggtctgctgccccagctgcttggagtcgcccccgaaaaggccattaaactaacagtgaacgacttcgtgcgggacaagtttatgcacaaagatggaagtgtgcctctcgcagcagaaattttggccgggggctgtgccggtggaagccaagtaatattcaccaaccctctggaaatagtgaagatcagactacaagtggcaggggagattactaccggcccccgcgtgagtgccctcagcgtggtccgggacctcgggtttttcggtatttataagggtgcaaaagcatgcttcctgagggatattcccttctctgccatttatttcccttgttatgcgcacgtgaaagcctccttcgccaacgaagacgggcaagtgagccccgggtcactcctgctggccggggccattgccgggatgccagcagccagcctggtgacccccgccgacgttatcaagacaaggttacaggtggccgccagggcagggcagacaacttacagcggggtgatcgattgcttccggaaaattctgagagaagagggacccaaagctctctggaaaggagcgggagcgagggtctttcggagcagcccccagttcggagtgactctcctgacatacgagctattgcagaggtggttctacatcgactttgggggtgttaagccaatgggctcagagccggttcctaaaagtaggatcaacctgcctgcccctaaccctgaccatgtgggcgggtacaaactggctgtggccactttcgctggaattgagaacaagttcggtctgtatctgcctttatttaaaccttccgtcagtacatctaaggctatcggggggggaccttag

SEQ ID NO: 60850 - DNA, 2031 bp, Artificial Sequence
  derived and/or modified sequence
atggctgctgccaaggtggccctgaccaagagagctgaccctgctgagctgcggaccatcttcctgaagtatgccagcattgagaagaatggagagttcttcatgagccccaatgactttgtgacccgctacctgaacatctttggagagagccagcccaaccccaagacagtggagctgctgagcggcgtggtggaccagaccaaggatggcctcatctccttccaggagtttgtggcctttgaatctgtgctgtgtgccccagatgccctcttcatggtggccttccagctgtttgacaaggccggcaagggggaggtgacctttgaagatgtgaagcaggtgtttggccagaccaccatccaccagcacatccccttcaactgggacagcgagtttgtgcagctgcactttgggaaggagaggaagaggcacctgacctatgcagagttcacccagttcctgctggagatccagctggagcacgccaagcaggcctttgtgcagagggacaatgccaggacaggccgggtgacagccatcgacttccgggacatcatggtgaccatccggccccacgtgctgaccccatttgtggaggagtgcctggtggccgctgctgggggcaccaccagccaccaggtgtccttctcctacttcaacggcttcaacagcctgctgaacaacatggagctgatcaggaagatctacagcaccctggccggcaccaggaaggatgtggaggtgaccaaggaggagtttgtgctggccgcccagaagtttggccaggtgacccccatggaggtggacatcctcttccagctggccgacctgtatgagccccggggccgcatgaccctggccgacatcgagagaattgcccccctggaggagggcaccctgcccttcaacctggccgaggcccagaggcagcagaaggccagcggggacagcgcccggcctgtgctgctgcaggtggccgagagcgcctacagatttggcctgggctctgtggccggggctgtgggcgccacagctgtgtaccccatcgacctggtgaagaccaggatgcagaaccagaggagcacaggcagctttgtgggggagctgatgtacaagaacagctttgactgcttcaagaaggtgctgcgctatgagggcttcttcggcctgtaccggggcctgctgccccagctgctgggcgtggcccctgagaaggccatcaagctgactgtgaatgactttgtgcgggacaagttcatgcacaaggatggctctgtgcccctggccgctgagatcctggccggcggctgtgccggcggcagccaggtgatcttcaccaaccccctggagatcgtgaagatccggctgcaggtggccggggagatcaccaccggcccccgggtgtctgccctgtctgtggtgcgggacctgggcttcttcggcatctacaagggggccaaggcctgcttcctgcgggacatccccttcagcgccatctacttcccctgctacgcccacgtgaaggccagctttgccaatgaagatggccaggtgtccccaggcagcctgctgctggccggggccatcgccggcatgcctgctgccagcctggtgaccccagcagatgtgatcaagacccggctgcaggtggccgcccgggccggccagaccacctacagcggggtcatcgactgcttcaggaagatcctgcgggaggagggccccaaggccctgtggaagggagctggggcccgggtcttccgcagcagcccccagtttggagtgaccctgctgacctatgagctgctgcagcgctggttctacatcgactttggaggagtgaagcccatgggcagcgagcctgtgcccaagagccgcatcaacctgcctgcccccaacccagaccacgtgggcggctacaagctggccgtggccacctttgctggcatcgagaacaagtttggcctgtacctgcccctcttcaagcccagcgtgtccaccagcaaggccatcggcggcggcccctag

SEQ ID NO: 60851 - DNA, 2031 bp, Artificial Sequence
  derived and/or modified sequence
atggccgccgccaaggtggccctgaccaagcgggccgaccccgccgaattaagaaccatctttctgaaatatgcatctattgaaaagaatggcgagttcttcatgtccccaaatgactttgtgacgaggtatcttaacatttttggtgagtctcagcctaacccaaagactgttgagctgctgagcggggttgttgaccaaacaaaagacggcctgatttcgttccaagagtttgtggccttcgaatccgttctgtgcgcccctgatgcactgtttatggtggcgttccagctattcgacaaagctgggaagggggaagttacgttcgaagacgttaagcaggtctttggacaaactacaatccaccagcacattccctttaattgggacagtgaattcgtgcaactccactttggaaaggagagaaagagacacctgacctacgctgaattcactcaatttctcctggaaattcagttggagcatgcaaagcaggcttttgttcagagagacaacgccaggacagggagagtgaccgcaatcgacttccgtgatatcatggtgactattcgccctcatgtattgacgccttttgtcgaagaatgtctggtggcagctgcaggcgggacgaccagtcatcaggtgtccttcagctatttcaacggtttcaacagtcttctgaacaatatggaactcatccgcaagatctatagcacattggctggtacccgaaaggatgtcgaggtcacgaaggaagagttcgtgctggccgctcagaagtttggccaggttaccccaatggaggtggacattctcttccagcttgctgatctgtacgaaccacgtgggaggatgactctcgccgatatcgaacgaattgcccccctcgaagaaggcactttgcctttcaacctcgccgaggctcaaagacagcagaaggcatcgggagacagtgctagaccggttttgctccaggtcgctgagtcggcatataggttcggcctcggtagcgttgcaggcgcagttggagctactgccgtatatcccatcgaccttgtgaaaacaagaatgcagaaccagcgttccaccggatcctttgtgggcgagctgatgtataagaactcttttgattgttttaaaaaggtattgaggtatgaaggattcttcggtctttacaggggtctgctgccccaactcctgggggtggctcccgaaaaagccatcaaacttaccgtaaacgactttgtccgcgacaagtttatgcacaaagacgggtctgtgccactggcggctgagattctcgccggcggatgtgctggggggtctcaggtcattttcacaaaccctttggagatcgtgaaaatacggctccaggttgcgggcgaaatcacgactggcccacgcgtatccgccctgtcggttgtgcgcgatctcgggtttttcgggatatataagggcgccaaggcatgctttttgagggacatcccgtttagcgccatttactttccttgttatgcccacgtgaaggccagtttcgccaacgaggacggacaggtttccccaggctccctgctgctggctggggcaattgccggcatgcccgcagcctcgttggtgacaccagcagatgtgataaaaacccgcctgcaggtggccgctagggctggtcaaacgacatattcaggagtgattgattgctttcgaaaaattttacgtgaagaaggacccaaggcgttgtggaaaggagccggggctagagtctttcggtcctctcctcagttcggagtaactctgctgacctatgaactcctccagaggtggttctatatagacttcggcggggtgaagcccatgggcagcgagcccgttcctaagtctcggattaacctccccgcccccaacccagatcacgtgggcggatataagctcgcagtcgcaacctttgccggaatagagaacaagtttggactttatttgccgcttttcaagcccagtgtcagcaccagtaaagccatcggcggaggtccttag

SEQ ID NO: 60852 - DNA, 2031 bp, Artificial Sequence
  derived and/or modified sequence
atggctgctgcaaaggtggctcttaccaagcgagcggaccctgcggaactgcgaacaatatttctcaagtacgcatccatagaaaagaacggtgaatttttcatgtccccaaacgattttgtcacacggtacctgaatatctttggcgagagccaacccaaccctaaaaccgtcgaacttctctccggcgttgtggaccagacaaaggacggattaatttccttccaggagttcgtcgcttttgaatccgttttgtgcgcacccgacgcgttgttcatggtggcgttccagctcttcgacaaggccggtaagggggaagttaccttcgaggatgtaaagcaggtcttcggacaaacaactatccaccagcatattcccttcaattgggactccgaatttgtgcagttacacttcgggaaagagaggaaacgccaccttacatacgccgaattcacccagtttttactggagattcagctggagcacgccaaacaggcattcgtgcagagggacaatgccagaacaggaagggtgactgcgatagatttcagggacatcatggtgactatccgacctcacgtgcttacacccttcgtggaggaatgcctagtcgctgcagcagggggtacaactagtcatcaggtgtcgttcagttacttcaacggattcaattctctcctgaataatatggagctgattcgcaagatctattcgactctcgcaggaacacgcaaggatgtcgaggtgacaaaagaggagttcgttctggccgctcaaaagttcgggcaggttaccccaatggaggttgacattctgttccagctcgcagatctgtacgagccaaggggacgcatgactctggccgatattgagaggatagctcccttggaagaggggaccctgccttttaatctagcagaggctcaaaggcagcagaaggcctccggggatagcgctcgccctgttctattgcaggtggctgaatcagcctatcgcttcggcctggggtctgtcgcgggagcagtcggtgcaacagcagtctatcctatcgacttggtaaaaaccaggatgcagaatcagcgaagcactggctctttcgtgggggaattaatgtataagaacagctttgattgtttcaaaaaagtgctccgatacgagggattttttggcctctacaggggtctgctgccgcagctgctgggagtggctccggagaaagccattaaactgaccgttaacgattttgtccgcgataaattcatgcacaaggacggttctgtacccctggcagctgagatacttgccggaggctgtgccggtggttcgcaggtgatttttaccaacccgctcgagatcgtgaaaattcgcctgcaggtagctggagaaattacaacaggaccgcgagtgtcagcactaagtgtggtaagagatctcggatttttcgggatctacaaaggggcaaaggcttgtttcttgcgggacattccattttctgcaatatattttccctgttacgctcatgtgaaggctagctttgcaaacgaggatggccaggtgagtcccggatctctgctactcgccggagccatagccggtatgccagccgcaagcctggtcactcctgcggacgtcatcaagactcgacttcaggtggctgctcgtgccggacaaaccacctactctggggtaatcgactgttttcgtaagattcttcgagaagagggacctaaggcactttggaagggggctggagctcgggtgttcaggagcagtcctcagtttggggttactcttctgacatatgaactgctacagcgatggttttatattgatttcggtggggtgaagcctatgggaagtgagccagtcccaaagtctagaatcaatttgccagctcctaaccctgaccacgtaggtggatacaagctcgccgtcgccacattcgctggcatcgagaacaagtttggtctgtacttgccactgttcaaaccctccgtgtccacttctaaagccatcgggggaggcccttag

SEQ ID NO: 60853 - DNA, 3192 bp, Artificial Sequence
  derived and/or modified sequence
aatgggcgggcagcatccacatgacccgcgccggcgggagggcgtggggaggcaggccaggaacgcacgctgcctggccgtatcgccgcccccaccgccgccgccgccgggactagaagtgagccgcccgggtcccaaacgccagccagccagtcagtgggtcccgcagtcgcccgcaaccggggcgaatcatggcggccgccaaggtggctttaaccaagagagcagatccagctgagcttagaacaatatttttgaagtatgcaagcattgagaaaaacggtgaatttttcatgtcccccaatgactttgtcactcgatacttgaacatttttggagaaagccagcctaatccaaagactgtggaacttttaagtggagtggtggatcagaccaaagatggattaatatcttttcaagaatttgttgcctttgaatctgtcctgtgtgcccctgatgctttgtttatggtagcctttcagctgtttgacaaagctggcaaaggagaagtaacttttgaggatgttaagcaagtttttggacagaccacaattcatcaacatattccatttaactgggattcagaatttgtgcaactacattttggaaaagaaagaaaaagacacctgacatatgcggaatttactcagtttttattggaaatacaactggagcacgcaaagcaagcctttgtgcaacgggacaatgctaggactgggagagtcacagccatcgacttccgagacatcatggtcaccatccgcccccatgtcttgactccttttgtagaagaatgtctagtagctgctgctggaggtaccacatcccatcaagttagtttctcctattttaatggatttaattcgctccttaacaacatggaactcattagaaagatctatagcactctggctggcaccaggaaagatgttgaagtgactaaggaggagtttgttctggcagctcagaaatttggtcaggttacacccatggaagttgacatcttgtttcagttagcagatttatatgagccaaggggacgtatgaccttagcagacattgaacggattgctcctctggaagagggaactctgccctttaacttggctgaggcccagaggcagcagaaggcctcaggtgattcagctcgaccagttcttctacaagttgcagagtcggcctacaggtttggtctgggttctgttgctggagctgttggagccactgctgtgtatcctatcgatcttgtaaaaactcgaatgcagaaccaacgatcaactggctcttttgtgggagaactcatgtataaaaacagctttgactgttttaagaaagtgctacgctatgaaggcttctttggactgtatagaggtctgttgccacagttattgggagttgccccagagaaggccataaaacttacagtgaacgattttgtgagggataaatttatgcacaaagatggttcggtcccacttgcagcagaaattcttgctggaggctgcgctggaggctcccaggtgattttcacaaatcctttagaaatcgtcaagatccgtttgcaagtggcaggagaaatcaccactggtcctcgagtcagtgctctgtctgtcgtgcgggacctggggttttttgggatctacaagggtgccaaagcatgctttctgcgggacattcctttctcggccatctactttccgtgctatgctcatgtgaaggcttcctttgcaaatgaagatgggcaggttagcccaggaagcctgctcttagctggtgccatagctggtatgcctgcagcatctttagtgacccctgctgatgttatcaagacgagattacaggtggctgcccgggctggccaaaccacttacagcggagtgatagactgctttagaaagatactgcgtgaagaaggaccaaaagctctgtggaagggagctggtgctcgtgtatttcgatcctcaccccagtttggtgtaactttgctgacttacgaattgctacagcgatggttctacattgattttggaggagtaaaacccatgggatcagagccagttcctaaatccaggatcaacctgcctgccccgaatcctgatcacgttgggggctacaaactggcagttgctacatttgcagggattgaaaacaaatttggactttacctacctctcttcaagccatcagtatctacctcaaaggctattggtggaggcccataggaagatcagccctgggatagtgctgtctttttgtgggtactgcagtaaagaacatccctcctgggaatgaagcaatgcttcatcccttttacgtccatctcttgtttaaattcaagtccaggcttttttatcatgtgaaatcattcattttctgggtgttttcttaaccagatcattgtgaaattattcataattattatttggccctctgcccagaaacctttgtttgcatctgaaaattgatgggatttggtcaacactaacatgatttggggaaaggagcaagtcagaatagaaattagtactcccctccttgaactaggattgtagtcccaaagaggctactgtaaggcaatcatggtgctcagagcagtgtttcgtgtgtgttttaaactggtaggaaactaggtgcatatttataaaaataaaaaacactgggagaaatgaaaaaatatatatcaaatatattcagcctggcttcaaattgtaagcatgcacaaattctgtctctggattatattatgaagcttttatgtgaaacatgtttctttgtaatgaaaaccacattggagatgtttagtaatcatattgttactggtaccaagactactagggaaatgcctttgtactttagggaagtacttttggcattttactgtacagacagaaaaaactgagatgtagcccctctcctggaagtgctaattttgaaaaactgctcatatgatgtacatgtactgattactgcctattttaataaacactcttgaaaaatgcatgttgccctgttgctgcctgccctattctcctcatctccccatcattggtacccacttgcttttaaaatccactttatcttgaataatgtaagacaaatatgttctgacataagtatttaattcatgttgccttgcataatggtcagaggcgcatgaatttgtgaaggtggaaataaactatttgtaaagtg

SEQ ID NO: 60854 - DNA, 2031 bp, Artificial Sequence
  derived and/or modified sequence
atggccgccgccaaggtggccctgaccaagagagccgaccccgccgagctgagaaccatcttcctgaagtacgccagcatcgagaagaacggcgagttcttcatgagccccaacgacttcgtgaccagatacctgaacatcttcggcgagagccagcccaaccccaagaccgtggagctgctgagcggcgtggtggaccagaccaaggacggcctgatcagcttccaggagttcgtggccttcgagagcgtgctgtgcgcccccgacgccctgttcatggtggccttccagctgttcgacaaggccggcaagggcgaggtgaccttcgaggacgtgaagcaggtgttcggccagaccaccatccaccagcacatccccttcaactgggacagcgagttcgtgcagctgcacttcggcaaggagagaaagagacacctgacctacgccgagttcacccagttcctgctggagatccagctggagcacgccaagcaggccttcgtgcagagagacaacgccagaaccggcagagtgaccgccatcgacttcagagacatcatggtgaccatcagaccccacgtgctgacccccttcgtggaggagtgcctggtggccgccgccggcggcaccaccagccaccaggtgagcttcagctacttcaacggcttcaacagcctgctgaacaacatggagctgatcagaaagatctacagcaccctggccggcaccagaaaggacgtggaggtgaccaaggaggagttcgtgctggccgcccagaagttcggccaggtgacccccatggaggtggacatcctgttccagctggccgacctgtacgagcccagaggcagaatgaccctggccgacatcgagagaatcgcccccctggaggagggcaccctgcccttcaacctggccgaggcccagagacagcagaaggccagcggcgacagcgccagacccgtgctgctgcaggtggccgagagcgcctacagattcggcctgggcagcgtggccggcgccgtgggcgccaccgccgtgtaccccatcgacctggtgaagaccagaatgcagaaccagagaagcaccggcagcttcgtgggcgagctgatgtacaagaacagcttcgactgcttcaagaaggtgctgagatacgagggcttcttcggcctgtacagaggcctgctgccccagctgctgggcgtggcccccgagaaggccatcaagctgaccgtgaacgacttcgtgagagacaagttcatgcacaaggacggcagcgtgcccctggccgccgagatcctggccggcggctgcgccggcggcagccaggtgatcttcaccaaccccctggagatcgtgaagatcagactgcaggtggccggcgagatcaccaccggccccagagtgagcgccctgagcgtggtgagagacctgggcttcttcggcatctacaagggcgccaaggcctgcttcctgagagacatccccttcagcgccatctacttcccctgctacgcccacgtgaaggccagcttcgccaacgaggacggccaggtgagccccggcagcctgctgctggccggcgccatcgccggcatgcccgccgccagcctggtgacccccgccgacgtgatcaagaccagactgcaggtggccgccagagccggccagaccacctacagcggcgtgatcgactgcttcagaaagatcctgagagaggagggccccaaggccctgtggaagggcgccggcgccagagtgttcagaagcagcccccagttcggcgtgaccctgctgacctacgagctgctgcagagatggttctacatcgacttcggcggcgtgaagcccatgggcagcgagcccgtgcccaagagcagaatcaacctgcccgcccccaaccccgaccacgtgggcggctacaagctggccgtggccaccttcgccggcatcgagaacaagttcggcctgtacctgcccctgttcaagcccagcgtgagcaccagcaaggccatcggcggcggcccctag

SEQ ID NO: 60855 - protein, 258 aa, Artificial Sequence
  derived and/or modified sequence
MAKYQGEVQSLKLDDDSVIEGVSDQVLVAVVVSFALIATLVYALFRNVHQNIHPENQELVRVLREQLQTEQDAPAATRQQFYTDMYCPICLHQASFPVETNCGHLFCGACIIAYWRYGSWLGAISCPICRQTVTLLLTVFGEDDQSQDVLRLHQDINDYNRRFSGQPRSIMERIMDLPTLLRHAFREMFSVGGLFWMFRIRIILCLMGAFFYLISPLDFVPEALFGILGFLDDFFVIFLLLIYISIMYREVITQRLTR

SEQ ID NO: 60856 - protein, 115 aa, Artificial Sequence
  derived and/or modified sequence
MAKYQGEVQSLKLDDDSVIEGVSDQVLVAVVVSFALIATLVYALFRNVHQNIHPENQELVRVLREQLQTEQDAPAATRQQFYTDMYCPICLHQASFPVETNCGHLFCGACIIAYW

SEQ ID NO: 60857 - protein, 174 aa, Artificial Sequence
  derived and/or modified sequence
MYCPICLHQASFPVETNCGHLFCGACIIAYWRYGSWLGAISCPICRQTVTLLLTVFGEDDQSQDVLRLHQDINDYNRRFSGQPRSIMERIMDLPTLLRHAFREMFSVGGLFWMFRIRIILCLMGAFFYLISPLDFVPEALFGILGFLDDFFVIFLLLIYISIMYREVITQRLTR

SEQ ID NO: 60858 - DNA, 777 bp, Artificial Sequence
  derived and/or modified sequence
atggccaagtaccagggcgaggtgcagagcctgaagctggacgacgacagcgtgatcgagggcgtgagcgaccaggtgctggtggccgtggtggtgagcttcgccctgatcgccaccctggtgtacgccctgttcagaaacgtgcaccagaacatccaccccgagaaccaggagctggtgagagtgctgagagagcagctgcagaccgagcaggacgcccccgccgccaccagacagcagttctacaccgacatgtactgccccatctgcctgcaccaggccagcttccccgtggagaccaactgcggccacctgttctgcggcgcctgcatcatcgcctactggagatacggcagctggctgggcgccatcagctgccccatctgcagacagaccgtgaccctgctgctgaccgtgttcggcgaggacgaccagagccaggacgtgctgagactgcaccaggacatcaacgactacaacagaagattcagcggccagcccagaagcatcatggagagaatcatggacctgcccaccctgctgagacacgccttcagagagatgttcagcgtgggcggcctgttctggatgttcagaatcagaatcatcctgtgcctgatgggcgccttcttctacctgatcagccccctggacttcgtgcccgaggccctgttcggcatcctgggcttcctggacgacttcttcgtgatcttcctgctgctgatctacatcagcatcatgtacagagaggtgatcacccagagactgaccagatag

SEQ ID NO: 60859 - DNA, 777 bp, Artificial Sequence
  derived and/or modified sequence
atggccaagtaccagggagaagtacagagcctcaaactggacgacgactcagtaatcgagggagtgtccgatcaggtccttgtggctgtcgtagtgtcctttgctttgatagctaccttagtctacgctctgtttcgaaacgtccatcaaaatatccatccagaaaatcaggagctggtccgagtactcagagaacaactgcagacagaacaggatgcaccagctgcaactagacaacagttctacactgacatgtactgcccaatttgcttgcaccaggccagttttcccgttgagacaaactgcggccacctgttttgcggcgcctgcatcattgcctattggcgctatggcagttggttgggagccatcagctgcccaatttgtcgacaaaccgtaaccttactactcactgtgttcggtgaggacgaccagagccaggatgtgctacgccttcaccaggacatcaacgactataaccgtagattctctggacagccccgatctattatggagcggatcatggacctgcctactctcctgcgtcacgcgttcagagagatgttctccgtgggaggcctgttctggatgttcagaattagaatcatcctctgcttaatgggcgcatttttttatctgatcagcccgctcgacttcgtccccgaagctctgttcggcatcttaggcttcctggacgactttttcgtgatttttcttctattgatttacatttctatcatgtatagagaagttataacacagcggctgactaggtag

SEQ ID NO: 60860 - DNA, 777 bp, Artificial Sequence
  derived and/or modified sequence
atggctaaatatcaaggagaagtccagagtctcaaattggatgacgactcagtaatcgaaggcgttagcgatcaagttctcgtcgctgtggtagtgtctttcgcgcttattgcaacccttgtgtatgccctctttcgaaatgtgcatcagaacatccatcccgagaatcaggagttggtgagggtcctccgtgaacaactgcagaccgaacaggatgccccggccgccacaagacagcagttttacaccgatatgtattgtcctatttgtctgcaccaggcgtcattccctgtggaaactaattgtggacacctgttctgcggcgcctgtattatagcctactggagatatggatcttggctgggggccatcagctgcccaatctgtcgccagaccgtgactttactgcttactgtcttcggggaggatgaccaatctcaagacgtcctacggctccaccaggacattaatgattacaatagacggttttcaggccagcctcgcagcataatggaacgcattatggatcttcccacgctgctgcgtcacgctttccgagagatgttctcggtcggcggattgttctggatgtttcggatcagaataatcctctgcctgatgggtgcattcttttatctgattagcccccttgactttgttccagaggcactttttgggattctaggatttctggatgacttcttcgtgatctttttgttgctgatctacatatccattatgtacagagaagtgataactcaacggctcacccggtag

SEQ ID NO: 60861 - DNA, 777 bp, Artificial Sequence
  derived and/or modified sequence
atggccaagtaccagggcgaggtgcagagcctgaagctggatgatgattctgtgattgaaggagtgtctgaccaggtgctggtggccgtggtggtgtcctttgccctgattgccaccctggtgtatgccctcttcagaaatgtgcaccagaacatccaccctgagaaccaggagctggtgcgggtgctgcgggagcagctgcagacagagcaggatgccccagctgccacccggcagcagttctacacagacatgtactgccccatctgcctgcaccaggccagcttccctgtggagaccaactgtggccacctgttctgtggggcctgcatcatcgcctactggaggtatggctcctggctgggcgccatcagctgccccatctgccggcagacagtgaccctgctgctgactgtgtttggagaagatgaccagagccaggatgtgctgcggctgcaccaggacatcaatgactacaacagacgcttcagcggccagcccaggagcatcatggagcgcatcatggacctgcccaccctgctgcggcatgccttccgggagatgttttctgtgggcggcctcttctggatgttccgcatccgcatcatcctgtgcctgatgggcgccttcttctacctgatcagccccctggactttgtgcctgaggccctgtttggcatcctgggcttcctggatgacttctttgtgatcttcctgctgctgatctacatcagcatcatgtaccgggaggtgatcacccagaggctgaccaggtag

SEQ ID NO: 60862 - DNA, 777 bp, Artificial Sequence
  derived and/or modified sequence
atggccaagtaccagggcgaggtgcagagcctgaagctggacgacgacagtgtgatagaaggcgtgagcgatcaggttctggtggctgtggtggtttctttcgctctcatcgccaccctagtgtatgcgcttttccgtaacgttcatcaaaacattcatccggaaaatcaggagctggtgagagtactacgcgaacagttacaaaccgagcaggacgcccctgctgcaacacgccaacagttctacactgatatgtactgccctatttgcttgcaccaagcgagtttccccgtagaaaccaattgtgggcacctgttttgcggggcctgtattattgcttattggaggtacggcagttggctgggagccattagttgcccaatttgcaggcagacagtcacactgctgttaactgttttcggggaagacgatcagtcccaggacgtgctgaggctgcaccaggacattaacgactacaatagaagattcagcgggcagcctagatctattatggaacggatcatggatctcccgacactgctgaggcatgcctttcgcgagatgttctctgtggggggactcttttggatgtttagaatacgaataatcctgtgcctcatgggcgcatttttttatctgatctcaccactagatttcgtgccagaggctttgtttgggatccttgggtttctggatgatttctttgttatattcttgctgctaatctatatatctattatgtaccgggaagtcatcactcagcgcctcaccagatag

SEQ ID NO: 60863 - DNA, 777 bp, Artificial Sequence
  derived and/or modified sequence
atggccaagtaccagggcgaggtgcagagcctgaagctggacgacgacagtgtcattgaaggcgtctcagatcaggtgttggttgcagtggtggtgtcattcgccctgatcgcgacactagtatacgcactgttccgaaacgttcatcagaacatccaccccgagaatcaggagctggtcagggtcctgcgcgagcagcttcagaccgaacaggatgctccagccgccaccagacagcagttctatacggatatgtactgtcccatatgtcttcaccaggcatctttccccgttgagaccaattgtggtcatttgttttgtggggcatgcataatagcgtactggcgttacggatcttggctcggggccatttcttgcccaatctgcaggcaaaccgtgacattattgctgaccgtgttcggtgaagacgatcagtcccaggacgtgctccggctgcaccaggacattaacgactacaaccgacgtttctctggccaaccacgaagtatcatggagcgcatcatggacctgcctaccttgcttcggcatgccttcagagagatgttctcggtcggtggactattttggatgttccggatccgaatcatactttgcctgatgggagcgttcttctacctcatcagccccctggacttcgtccccgaggccctttttggcatcttaggcttcctggatgatttttttgttatctttttactgctgatttatatttccatcatgtatcgcgaggtgataacccaaagactcacgcgctag

SEQ ID NO: 60864 - DNA, 777 bp, Artificial Sequence
  derived and/or modified sequence
atggcaaaataccagggcgaggtgcagagcctgaagctggatgacgatagcgtgattgaaggcgtgagcgaccaagtgctggtggctgtcgtggtttctttcgccttgattgcaactctagtctacgctctcttccgcaacgttcatcaaaacatccaccccgagaaccaggaactggttcgcgtgctgcgggaacagctacaaaccgagcaagatgcccctgctgccacacgccagcaattctatacagacatgtattgcccaatctgccttcatcaggcgagttttcccgtggagactaactgcgggcacctgttctgtggtgcttgtatcatagcatactggcggtatgggagttggctgggagcgatttcttgccctatctgtcggcagactgtcacacttctgttgaccgtatttggagaggacgaccagtcccaggacgtcctgcgacttcatcaggatattaatgactataaccgacggttctctgggcagccccgtagcattatggaaaggattatggatctcccgacccttctccgtcatgcatttcgagaaatgttcagtgtggggggactgttctggatgttccgtattcgtatcatcctgtgtcttatgggcgctttcttttatctgatctcacctctggactttgtaccagaggctctgttcggcattctcgggtttttggatgattttttcgtgatattcctgctcctgatttatatctcaattatgtatcgagaggtgatcacacagagactcacacgctag

SEQ ID NO: 60865 - DNA, 777 bp, Artificial Sequence
  derived and/or modified sequence
atggcgaagtatcagggtgaggtgcaatcactcaagttagacgatgattctgtcatcgagggcgtgtctgatcaggtgcttgtcgcagtggttgtgagctttgccctcatcgctactctggtgtatgcgctgttccggaacgtgcaccaaaacatccacccagaaaatcaggagttagtgcgtgtgctgcgtgagcagctccagacagagcaggacgcgcctgctgccacacgtcagcagttctacacggatatgtactgccccatatgtttgcatcaggcctcttttcctgtcgagaccaattgtggacacctcttctgtggcgcatgtattattgcttactggcgatacggtagctggctgggtgccatctcatgccctatctgtaggcagacggtcactctgctgctgactgtattcggcgaagatgaccaatcacaagatgtgttgcgcttgcatcaggacattaacgactacaacagaagattcagtggtcaaccacgctctattatggaacgcatcatggatctcccgacgctgcttcggcacgccttccgggagatgtttagcgtgggcggtctattttggatgtttcgcatccggatcatactgtgtctgatgggcgctttcttctatctgatctccccattggatttcgtgcccgaagctctgtttggcattttaggctttctcgatgactttttcgttatcttcctcctgttgatctacattagcatcatgtatcgtgaagtcataacccagagattgaccaggtag

SEQ ID NO: 60866 - DNA, 3812 bp, Artificial Sequence
  derived and/or modified sequence
agttcgctgcgtgtcgaggcgagcacgcgctccgccctggaggctgcggcgacgggtcctcctccgccgtccggtcgcgccctcgcggaagctcggcagtgcgcgtgcgcccgcacccgcactccaaattagaaaggggacgtctagtgggttgcccgggaggggtggcgggagcggtcctggaaataatctgtcctctgtcgccgggaactggcgaggtagttccttcgcggtggagagacctggaatggccaaatatcaaggtgaagttcaaagtttgaaactggatgatgattcagttatagaaggagtaagcgaccaagtacttgtggcagttgtggtcagtttcgctttgattgctaccctggtatatgcacttttcagaaatgtacatcaaaacattcacccagaaaaccaggagctagtaagggtacttcgagaacagcttcaaacagaacaggatgcacctgctgccactcgacagcagttctacactgacatgtactgtcccatctgcctgcaccaagcctccttcccggtggagaccaactgtggacatcttttttgtggtaaccttactcctaacagtatttggtgaagatgatcagtctcaggatgttctgagattgcatcaggatattaatgattataaccggagattctcagggcaacccagatctattatggagagaattatggatctacccactttactgaggcatgcattcagggaaatgttttcagtcgggggccttttctggatgtttcgcatcaggataatactttgtttaatgggagcttttttctatcttatatcacctctagattttgtacctgaagccttgtttggaattctaggctttctagatgatttctttgtcatctttttattgcttatctacatctctattatgtatcgagaagtgataacccaaaggctaactagatgaaaaagaaaacaaaactgagtttactaggatatctgagctaatgtagaacatcaaacagaaggacccatggcagtataaagcaatgaagcaatggagtattatctcacaaatataaaaccactataagacaaacatttgattatcatttgacaaatacctaggtataactggaattttcatgtttgaagttctaatattaagtttagaattataatgatctacagttgtatcttgattctatgttgtctggaaaaaatatggaattatataaaaagggatgcttttatatatttttcttttccccagaattacttagattaattagatgtatagtaaaatattgttaaatgtcagtttatccatcttatccttctcagcaggtacctatatgataatatatagctgtgaaactcatctaaatatttttgttccaataaaatattatatactattggggaaaattcagtatttcttttagtgctagctaagttttgtgcatttggagcagttctgccttttcattctggtataattaattatttgctatcagctgaaactgaaagaagaaacttgaacttcatacttcgatatcatattctagtttacagaacacattttaatcaatagaagaattaagatgaaaaacatggccgggcggggtggctcacgcctgtaatcctagcactttgggaggctgaggcgggtagatcacaaggtcaggagatcaggaccatcctggctaacatggtgaaaccccgtctctactaaaaatacaaaaaattagccaggcgtggtggcaggcgcctgtagtcccagctactcgggaggctgaggcagaagaatggcgtaaacccaggaggtggattgcgccactgcactccagcctgggcaacagagtgagactccctctcaaaaaaaaaaaaaaaaaagatgaaaaacatttatctccagtcagcacacttgatgttcacagttagacatttaaacaagagctcatcctttcgtagtagatataaaagtaatttgtaaagggaagattgttttaggaacctgggcgatgctgcaaacacagagtagcctgatgcatttctgaggaaggtgaatcttcgtgtctttgagcatcaagccaataggaaggtactgggaacggtatttacatttgacaaaagaaattactggttagctatagcaacagattggacaaattttgttagttttctgttgtcagaaatttttataatactgtctcaggatggcagcacacagctcagattcatgtcttgagccaaacaagtgaatgtatctgagaagactcagtaccacatggtactgggagatcttactcacttcagctggcgttgctcattagtgaatgtatgacagcaggatgtgaggggatgcccaggagtcagtgttagcattgtcatctgagatcactgctattaatatcatccattaatttattagtgagcttcactatatgcagactgggagataaggagaaaatctgtcacattctctctagctaatcagatcagctaccaattaatgagattctgaatgaaatatcaatatgtgtttttctaatttggacctaggacagagctgttgcttgtcatagagaaaaacaataatgcttaaacatagcacattataattaaagcaggtttctcacatacttttcattttatcctttggataattttgtgaggaacgcaggacaccaacttccctttcatagatacaatccccatgctattgatgaaagtgtttttgaatgaagtcatacaacaaataactgatcaaagtggcattacaccaaaatttcttagtaggactcctgcatagaatgtttagatagacgtgaaagttgttaagaggaacagcaagagagaaactggttctttggaagtctttcgtgctacattatacctccatcagagtaagacagcttaggcactcctaagaggaaaggtctgtggagatgacatgaatccgaattctacacttccaaatcaaataggtaaaagggtggcatacatcacagaaaaacatttcagctgcagtcaccaacttgaaaagcgagtgagtaggagtttgtcacactgccatgtaccagactggaaatgcatttcctaccaattacacatttggtgtgggggaatggtgatgtcattttttgacaggattttattttgtgtgcatgcattctgctccaagtgtcacaattctggttacaataattataatatttggagttactactaagactttcctgaaagaggtgtattgtaccaaattttgtaacataaaaaaatactaaatgatcttaaagcttcctaaattgtgaaaagggtatgtgctaacatctcagaactttagacctgcttgttgtcatctttaccgatctctgatgataaatgcagaagggatctgagagtttttaaagcaagtagagtcaatcagagttttgaacatcatagtaatacttccgtgattcagagttagatcatataaatcaaagtaacaatttggattttttttaaacaacaatatcataactgtcataaaacagatggtccaaccccaggagcagataataacttgggcagctctgtggggaacaagacggggaaaacaactgttctaactgcccactagaacagtggtttcaactactacaattctcagtgtttgagaggtacaagggaagaaaggactatgtggatcccttgtggctatgcagatacctacctcacagagttgttgtagaagactggtggtttggttcaaaccttgtgattaaagagtttgtcaagcattttattcttttgaataaaagcaacatatctaaaacatttt

SEQ ID NO: 60867 - DNA, 3880 bp, Artificial Sequence
  derived and/or modified sequence
ttcgctgcgtgtcgaggcgagcacgcgctccgccctggaggctgcggcgacgggtcctcctccgccgtccggtcgcgccctcgcggaagctcggcagtgcgcgtgcgcccgcacccgcactccaaattagaaaggggacgtctagtgggttgcccgggaggggtggcgggagcggtcctggaaataatctgtcctctgtcgccgggaactggcgaggtagttccttcgcggtggagagacctggaatggccaaatatcaaggtgaagttcaaagtttgaaactggatgatgattcagttatagaaggagtaagcgaccaagtacttgtggcagttgtggtcagtttcgctttgattgctaccctggtatatgcacttttcagaaatgtacatcaaaacattcacccagaaaaccaggagctagtaagggtacttcgagaacagcttcaaacagaacaggatgcacctgctgccactcgacagcagttctacactgacatgtactgtcccatctgcctgcaccaagcctccttcccggtggagaccaactgtggacatcttttttgtggtgcctgcattattgcttactggcgatatggttcatggcttggggcaatcagttgtccaatctgtagacaaacggtaaccttactcctaacagtatttggtgaagatgatcagtctcaggatgttctgagattgcatcaggatattaatgattataaccggagattctcagggcaacccagatctattatggagagaattatggatctacccactttactgaggcatgcattcagggaaatgttttcagtcgggggccttttctggatgtttcgcatcaggataatactttgtttaatgggagcttttttctatcttatatcacctctagattttgtacctgaagccttgtttggaattctaggctttctagatgatttctttgtcatctttttattgcttatctacatctctattatgtatcgagaagtgataacccaaaggctaactagatgaaaaagaaaacaaaactgagtttactaggatatctgagctaatgtagaacatcaaacagaaggacccatggcagtataaagcaatgaagcaatggagtattatctcacaaatataaaaccactataagacaaacatttgattatcatttgacaaatacctaggtataactggaattttcatgtttgaagttctaatattaagtttagaattataatgatctacagttgtatcttgattctatgttgtctggaaaaaatatggaattatataaaaagggatgcttttatatatttttcttttccccagaattacttagattaattagatgtatagtaaaatattgttaaatgtcagtttatccatcttatccttctcagcaggtacctatatgataatatatagctgtgaaactcatctaaatatttttgttccaataaaatattatatactattggggaaaattcagtatttcttttagtgctagctaagttttgtgcatttggagcagttctgccttttcattctggtataattaattatttgctatcagctgaaactgaaagaagaaacttgaacttcatacttcgatatcatattctagtttacagaacacattttaatcaatagaagaattaagatgaaaaacatggccgggcggggtggctcacgcctgtaatcctagcactttgggaggctgaggcgggtagatcacaaggtcaggagatcaggaccatcctggctaacatggtgaaaccccgtctctactaaaaatacaaaaaattagccaggcgtggtggcaggcgcctgtagtcccagctactcgggaggctgaggcagaagaatggcgtaaacccaggaggtggattgcgccactgcactccagcctgggcaacagagtgagactccctctcaaaaaaaaaaaaaaaaaagatgaaaaacatttatctccagtcagcacacttgatgttcacagttagacatttaaacaagagctcatcctttcgtagtagatataaaagtaatttgtaaagggaagattgttttaggaacctgggcgatgctgcaaacacagagtagcctgatgcatttctgaggaaggtgaatcttcgtgtctttgagcatcaagccaataggaaggtactgggaacggtatttacatttgacaaaagaaattactggttagctatagcaacagattggacaaattttgttagttttctgttgtcagaaatttttataatactgtctcaggatggcagcacacagctcagattcatgtcttgagccaaacaagtgaatgtatctgagaagactcagtaccacatggtactgggagatcttactcacttcagctggcgttgctcattagtgaatgtatgacagcaggatgtgaggggatgcccaggagtcagtgttagcattgtcatctgagatcactgctattaatatcatccattaatttattagtgagcttcactatatgcagactgggagataaggagaaaatctgtcacattctctctagctaatcagatcagctaccaattaatgagattctgaatgaaatatcaatatgtgtttttctaatttggacctaggacagagctgttgcttgtcatagagaaaaacaataatgcttaaacatagcacattataattaaagcaggtttctcacatacttttcattttatcctttggataattttgtgaggaacgcaggacaccaacttccctttcatagatacaatccccatgctattgatgaaagtgtttttgaatgaagtcatacaacaaataactgatcaaagtggcattacaccaaaatttcttagtaggactcctgcatagaatgtttagatagacgtgaaagttgttaagaggaacagcaagagagaaactggttctttggaagtctttcgtgctacattatacctccatcagagtaagacagcttaggcactcctaagaggaaaggtctgtggagatgacatgaatccgaattctacacttccaaatcaaataggtaaaagggtggcatacatcacagaaaaacatttcagctgcagtcaccaacttgaaaagcgagtgagtaggagtttgtcacactgccatgtaccagactggaaatgcatttcctaccaattacacatttggtgtgggggaatggtgatgtcattttttgacaggattttattttgtgtgcatgcattctgctccaagtgtcacaattctggttacaataattataatatttggagttactactaagactttcctgaaagaggtgtattgtaccaaattttgtaacataaaaaaatactaaatgatcttaaagcttcctaaattgtgaaaagggtatgtgctaacatctcagaactttagacctgcttgttgtcatctttaccgatctctgatgataaatgcagaagggatctgagagtttttaaagcaagtagagtcaatcagagttttgaacatcatagtaatacttccgtgattcagagttagatcatataaatcaaagtaacaatttggattttttttaaacaacaatatcataactgtcataaaacagatggtccaaccccaggagcagataataacttgggcagctctgtggggaacaagacggggaaaacaactgttctaactgcccactagaacagtggtttcaactactacaattctcagtgtttgagaggtacaagggaagaaaggactatgtggatcccttgtggctatgcagatacctacctcacagagttgttgtagaagactggtggtttggttcaaaccttgtgattaaagagtttgtcaagcattttattcttttgaataaaagcaacatatctaaaaca

SEQ ID NO: 60868 - DNA, 4116 bp, Artificial Sequence
  derived and/or modified sequence
agttcgctgcgtgtcgaggcgagcacgcgctccgccctggaggctgcggcgacgggtcctcctccgccgtccggtcgcgccctcgcggaagctcggcagtgcgcgtgcgcccgcacccgcactccaaattagaaaggggacgtctagtgggttgcccgggaggggtggcgggagcggtcctggaaataatctgtcctctgtcgccgggaactggcgaggtagttccttcgcggtggagaggtacgtccggcgcgcggcggccacgcccaccctatcggggcccgcggagccgcggacggcggggtctggccttcttggggtagctctggccgccgaggctctgcggggcggcgggagtcgccgcctccttccccccgggcccctccctcgtctggaagccccagaatcgccccgcggctgtccggagtcgccggcgacggtggaggggccgacgcggagagcggctctagacctggaatggccaaatatcaaggtgaagttcaaagtttgaaactggatgatgattcagttatagaaggagtaagcgaccaagtacttgtggcagttgtggtcagtttcgctttgattgctaccctggtatatgcacttttcagaaatgtacatcaaaacattcacccagaaaaccaggagctagtaagggtacttcgagaacagcttcaaacagaacaggatgcacctgctgccactcgacagcagttctacactgacatgtactgtcccatctgcctgcaccaagcctccttcccggtggagaccaactgtggacatcttttttgtggtgcctgcattattgcttactggcgatatggttcatggcttggggcaatcagttgtccaatctgtagacaaacggtaaccttactcctaacagtatttggtgaagatgatcagtctcaggatgttctgagattgcatcaggatattaatgattataaccggagattctcagggcaacccagatctattatggagagaattatggatctacccactttactgaggcatgcattcagggaaatgttttcagtcgggggccttttctggatgtttcgcatcaggataatactttgtttaatgggagcttttttctatcttatatcacctctagattttgtacctgaagccttgtttggaattctaggctttctagatgatttctttgtcatctttttattgcttatctacatctctattatgtatcgagaagtgataacccaaaggctaactagatgaaaaagaaaacaaaactgagtttactaggatatctgagctaatgtagaacatcaaacagaaggacccatggcagtataaagcaatgaagcaatggagtattatctcacaaatataaaaccactataagacaaacatttgattatcatttgacaaatacctaggtataactggaattttcatgtttgaagttctaatattaagtttagaattataatgatctacagttgtatcttgattctatgttgtctggaaaaaatatggaattatataaaaagggatgcttttatatatttttcttttccccagaattacttagattaattagatgtatagtaaaatattgttaaatgtcagtttatccatcttatccttctcagcaggtacctatatgataatatatagctgtgaaactcatctaaatatttttgttccaataaaatattatatactattggggaaaattcagtatttcttttagtgctagctaagttttgtgcatttggagcagttctgccttttcattctggtataattaattatttgctatcagctgaaactgaaagaagaaacttgaacttcatacttcgatatcatattctagtttacagaacacattttaatcaatagaagaattaagatgaaaaacatggccgggcggggtggctcacgcctgtaatcctagcactttgggaggctgaggcgggtagatcacaaggtcaggagatcaggaccatcctggctaacatggtgaaaccccgtctctactaaaaatacaaaaaattagccaggcgtggtggcaggcgcctgtagtcccagctactcgggaggctgaggcagaagaatggcgtaaacccaggaggtggattgcgccactgcactccagcctgggcaacagagtgagactccctctcaaaaaaaaaaaaaaaaaagatgaaaaacatttatctccagtcagcacacttgatgttcacagttagacatttaaacaagagctcatcctttcgtagtagatataaaagtaatttgtaaagggaagattgttttaggaacctgggcgatgctgcaaacacagagtagcctgatgcatttctgaggaaggtgaatcttcgtgtctttgagcatcaagccaataggaaggtactgggaacggtatttacatttgacaaaagaaattactggttagctatagcaacagattggacaaattttgttagttttctgttgtcagaaatttttataatactgtctcaggatggcagcacacagctcagattcatgtcttgagccaaacaagtgaatgtatctgagaagactcagtaccacatggtactgggagatcttactcacttcagctggcgttgctcattagtgaatgtatgacagcaggatgtgaggggatgcccaggagtcagtgttagcattgtcatctgagatcactgctattaatatcatccattaatttattagtgagcttcactatatgcagactgggagataaggagaaaatctgtcacattctctctagctaatcagatcagctaccaattaatgagattctgaatgaaatatcaatatgtgtttttctaatttggacctaggacagagctgttgcttgtcatagagaaaaacaataatgcttaaacatagcacattataattaaagcaggtttctcacatacttttcattttatcctttggataattttgtgaggaacgcaggacaccaacttccctttcatagatacaatccccatgctattgatgaaagtgtttttgaatgaagtcatacaacaaataactgatcaaagtggcattacaccaaaatttcttagtaggactcctgcatagaatgtttagatagacgtgaaagttgttaagaggaacagcaagagagaaactggttctttggaagtctttcgtgctacattatacctccatcagagtaagacagcttaggcactcctaagaggaaaggtctgtggagatgacatgaatccgaattctacacttccaaatcaaataggtaaaagggtggcatacatcacagaaaaacatttcagctgcagtcaccaacttgaaaagcgagtgagtaggagtttgtcacactgccatgtaccagactggaaatgcatttcctaccaattacacatttggtgtgggggaatggtgatgtcattttttgacaggattttattttgtgtgcatgcattctgctccaagtgtcacaattctggttacaataattataatatttggagttactactaagactttcctgaaagaggtgtattgtaccaaattttgtaacataaaaaaatactaaatgatcttaaagcttcctaaattgtgaaaagggtatgtgctaacatctcagaactttagacctgcttgttgtcatctttaccgatctctgatgataaatgcagaagggatctgagagtttttaaagcaagtagagtcaatcagagttttgaacatcatagtaatacttccgtgattcagagttagatcatataaatcaaagtaacaatttggattttttttaaacaacaatatcataactgtcataaaacagatggtccaaccccaggagcagataataacttgggcagctctgtggggaacaagacggggaaaacaactgttctaactgcccactagaacagtggtttcaactactacaattctcagtgtttgagaggtacaagggaagaaaggactatgtggatcccttgtggctatgcagatacctacctcacagagttgttgtagaagactggtggtttggttcaaaccttgtgattaaagagtttgtcaagcattttattcttttgaataaaagcaacatatctaaaacatttt

SEQ ID NO: 60869 - DNA, 1338 bp, Artificial Sequence
  derived and/or modified sequence
ggcgagcacgcgctccgccctggaggctgcggcgacgggtcctcctccgccgtccggtcgcgccctcgcggaagctcggcagtgcgcgtgcgcccgcacccgcactccaaattagaaaggggacgtctagtgggttgcccgggaggggtggcgggagcggtcctggaaataatctgtcctctgtcgccgggaactggcgaggtagttccttcgcggtggagagacctggaatggccaaatatcaagaaatgtacatcaaaacattcacccagaaaaccaggagctagtaagggtacttcgagaacagcttcaaacagaacaggatgcacctgctgccactcgacagcagttctacactgacatgtactgtcccatctgcctgcaccaagcctccttcccggtggagaccaactgtggacatcttttttgtggtgcctgcattattgcttactggcgatatggttcatggcttggggcaatcagttgtccaatctgtagacaaacggtaaccttactcctaacagtatttggtgaagatgatcagtctcaggatgttctgagattgcatcaggatattaatgattataaccggagattctcagggcaacccagatctattatggagagaattatggatctacccactttactgaggcatgcattcagggaaatgttttcagtcgggggccttttctggatgtttcgcatcaggataatactttgtttaatgggagcttttttctatcttatatcacctctagattttgtacctgaagccttgtttggaattctaggctttctagatgatttctttgtcatctttttattgcttatctacatctctattatgtatcgagaagtgataacccaaaggctaactagatgaaaaagaaaacaaaactgagtttactaggatatctgagctaatgtagaacatcaaacagaaggacccatggcagtataaagcaatgaagcaatggagtattatctcacaaatataaaaccactataagacaaacatttgattatcatttgacaaatacctaggtataactggaattttcatgtttgaagttctaatattaagtttagaattataatgatctacagttgtatcttgattctatgttgtctggaaaaaatatggaattatataaaaagggatgcttttatatatttttcttttccccagaattacttagattaattagatgtatagtaaaatattgttaaatgtcagtttatccatcttatccttctcagcaggtacctatatgataatatatagctgtgaaactcatctaaatatttttgttccaataaaatattatatactat

SEQ ID NO: 60870 - protein, 200 aa, Artificial Sequence
  derived and/or modified sequence
MAKYQGEVQSLKLDDDSVIEGVSDQVLVAVVVSFALIATLVYALFRNVHQNIHPENQELVRVLREQLQTEQDAPAATRQQFYTDMYCPICLHQASFPVETNCGHLFCGACIIAYWRYGSWLGAISCPICRQTGSSEKSSRASEQTHQEAVACLDTQNSPACTVGCRSGPQHIPHDRMLPSASPRLCFTLLDCVSILWFSG

SEQ ID NO: 60871 - protein, 45 aa, Artificial Sequence
  derived and/or modified sequence
MAKYQGEVQSLKLDDDSVIEGVSDQVLVAVVVSFALIATLVYALF

SEQ ID NO: 60872 - DNA, 603 bp, Artificial Sequence
  derived and/or modified sequence
atggccaagtaccagggcgaggtgcagagcctgaagctggacgacgacagcgtgatcgagggcgtgagcgaccaggtgctggtggccgtggtggtgagcttcgccctgatcgccaccctggtgtacgccctgttcagaaacgtgcaccagaacatccaccccgagaaccaggagctggtgagagtgctgagagagcagctgcagaccgagcaggacgcccccgccgccaccagacagcagttctacaccgacatgtactgccccatctgcctgcaccaggccagcttccccgtggagaccaactgcggccacctgttctgcggcgcctgcatcatcgcctactggagatacggcagctggctgggcgccatcagctgccccatctgcagacagaccggcagcagcgagaagagcagcagagccagcgagcagacccaccaggaggccgtggcctgcctggacacccagaacagccccgcctgcaccgtgggctgcagaagcggcccccagcacatcccccacgacagaatgctgcccagcgccagccccagactgtgcttcaccctgctggactgcgtgagcatcctgtggttcagcggctag

SEQ ID NO: 60873 - DNA, 603 bp, Artificial Sequence
  derived and/or modified sequence
atggccaagtaccagggggaggttcaaagtctcaagctggacgacgatagcgtgattgagggcgtgtcagaccaggtcttggtggcagtcgttgtgtcctttgccctgatagctactctcgtctacgctcttttccgaaacgttcaccaaaatattcaccccgaaaatcaggagcttgtgcgggtcctccgggagcagctgcagactgagcaggacgcccctgcagccacacgtcagcagttttacactgacatgtattgtccaatatgcctccaccaggcctctttccccgtcgagacgaactgtgggcacctgttttgtggcgcgtgcattatcgcctactggaggtacggttcatggcttggggcaatatcctgtcctatttgcaggcaaaccggaagttccgaaaagtcaagtagagctagtgaacagacccaccaggaggccgtggcatgcttggacacccaaaatagcccagcttgtacagtgggctgccgctccgggccacagcatattccacacgataggatgctgccctcggcttcgccacgattgtgttttactctgctggactgtgtcagcattctgtggttctccgggtag

SEQ ID NO: 60874 - DNA, 603 bp, Artificial Sequence
  derived and/or modified sequence
atggccaagtaccagggcgaggtgcagagcctgaagctggatgatgattctgtgattgaaggagtgtctgaccaggtgctggtggccgtggtggtgtcctttgccctgattgccaccctggtgtatgccctcttcagaaatgtgcaccagaacatccaccctgagaaccaggagctggtgcgggtgctgcgggagcagctgcagacagagcaggatgccccagctgccacccggcagcagttctacacagacatgtactgccccatctgcctgcaccaggccagcttccctgtggagaccaactgtggccacctgttctgtggggcctgcatcatcgcctactggaggtatggctcctggctgggcgccatcagctgccccatctgccggcagacaggcagcagcgagaagagcagccgggccagcgagcagacccaccaggaggccgtggcctgcctggacacccagaacagccctgcctgcaccgtgggctgccgcagcggcccccagcacatcccccatgacaggatgctgcccagcgccagcccccggctgtgcttcaccctgctggactgtgtgtccatcctgtggttctctggatag

SEQ ID NO: 60875 - DNA, 603 bp, Artificial Sequence
  derived and/or modified sequence
atggccaagtaccagggcgaggtgcagagcctgaagctggacgacgactctgtcatcgagggcgtcagtgaccaggtattagtcgctgtggtcgtaagtttcgcattgatcgcaacgctcgtgtacgccctctttcgtaatgtccatcaaaacatacatcccgagaaccaagaactcgtgcgcgtattgcgtgaacagctccagacggaacaggacgctcccgctgccacacggcaacagttttataccgacatgtactgtcctatctgtttgcaccaggcgagctttcctgtggagacaaactgtggtcacctattctgcggggcgtgcatcattgcatactggcgctatggctcctggctaggtgcgattagctgtccaatttgccgccagacagggtcaagcgaaaaatcttcccgggcttcagaacagactcaccaggaggcagtggcgtgcctggacacacaaaacagtccagcctgtacggttggatgtcgtagtggaccacaacacatcccacatgatagaatgctcccatcagctagcccccgcctgtgcttcacgcttttagactgcgtcagcatcctatggttttccggttag

SEQ ID NO: 60876 - DNA, 603 bp, Artificial Sequence
  derived and/or modified sequence
atggcgaaataccagggggaagtccagtcattgaagctcgacgatgatagtgtgatcgagggcgtttctgatcaggtcctagttgcggtcgtcgtgtcctttgcactgatcgccacacttgtgtatgccctgtttcgcaacgtccaccagaacattcaccccgaaaaccaggaactggtcagagtcttaagagagcagctgcagacagaacaagacgcacctgccgcaaccagacaacagttctacactgatatgtactgcccgatttgcttgcaccaggcaagcttccccgtggagactaattgcggacacttgttctgcggtgcttgcatcattgcttattggcgatacggctcatggctgggggctatctcttgtccaatatgccggcaaactggctctagtgaaaagtcctcccgtgcctctgaacagacacaccaggaagcagtggcatgtttagatacccagaatagcccagcttgcacagtggggtgtcgctccggcccacagcatatcccccacgatcgaatgctgccttccgcttcccctagactgtgtttcaccctcctggactgcgtgtcaattctttggttcagtggctag

SEQ ID NO: 60877 - DNA, 1866 bp, Artificial Sequence
  derived and/or modified sequence
gacgtctagtgggttgcccgggaggggtggcgggagcggtcctggaaataatctgtcctctgtcgccgggaactggcgaggtagttccttcgcggtggagagacctggaatggccaaatatcaaggtgaagttcaaagtttgaaactggatgatgattcagttatagaaggagtaagcgaccaagtacttgtggcagttgtggtcagtttcgctttgattgctaccctggtatatgcacttttcagaaatgtacatcaaaacattcacccagaaaaccaggagctagtaagggtacttcgagaacagcttcaaacagaacaggatgcacctgctgccactcgacagcagttctacactgacatgtactgtcccatctgcctgcaccaagcctccttcccggtggagaccaactgtggacatcttttttgtggtgcctgcattattgcttactggcgatatggttcatggcttggggcaatcagttgtccaatctgtagacaaacgggttcatcagagaagagcagccgtgcaagtgagcagacccatcaagaggctgttgcatgcctggacacacagaactctcctgcctgtacagtcggatgcaggtcagggcctcagcatataccccatgaccgaatgctcccttcagcctcaccacgtttatgcttcacgttactagactgtgtttccatcctttggttctcaggttaaatgttccctcctcactcagactacccaaaagtaggcagtgcaaaagtagtgcaaaagtaggcagtgaccctcccctccccttaccccagggcactctgaggcattcagacatctcagcacagcatcatcatattgacatttccattgtctgtctgcttctcactagaacacaagctctatgaaaacagagacaatgttagttttgtccacccagatattcacagatgtaccattatgcctgccaccacagtagtgctcaacacattaaagattaataaataaagcaagggaaagacaggaaagggcagaagacaaggaaagatcacttcttactcagtcatggctgccgcccaggtctaagccaccctcacttctcacctaaaggatcacagcgaccttccaggcagtctcccaggcaccaagtgcctggctccctacatgcaacgcagcccgatgatcatctcaagtgtgactctgctggaaagcctgctctccctttcccacagagtaaaggtaaagtcctcacgccagcctgcaaggccccatgtgaccttggttgctcatttcctctctaacctcatctcacatttgtccccacagctcactctgctccagccatccagccctccttgctgtcctttgagcaggctgaagacgcccagcctcaggagctctgccctggccagtccctctgactgctaggctcctccgccgggcatcctcacagccaactctcaccaactccagatcttcgcacaatagccatttcctctgttaggcctgtcctgtccaccataaggaaacttgcaactccctcagcccacagagcacctctcaccggctaacatactctgtggtcacgtgtttgctatctgcctccctaatgtctttgagaacattagctccctgagggcagaaatctccttcactgacatatcccaagcccccagaactatgcgtgcagcatagtcagtaactatttgttgaatcaatgaatgagaaaacaatatcagggaactctaagttgaaatacactttctcagttcacaatgttatccattctgacctttatcagacacaggcacagaggacctcagagatattcccagcagtctcaatatccatggtaatgctaataaactactattctggca

SEQ ID NO: 60878 - DNA, 525 bp, Artificial Sequence
  derived and/or modified sequence
atgtactgccccatctgcctgcaccaggccagcttccccgtggagaccaactgcggccacctgttctgcggcgcctgcatcatcgcctactggagatacggcagctggctgggcgccatcagctgccccatctgcagacagaccgtgaccctgctgctgaccgtgttcggcgaggacgaccagagccaggacgtgctgagactgcaccaggacatcaacgactacaacagaagattcagcggccagcccagaagcatcatggagagaatcatggacctgcccaccctgctgagacacgccttcagagagatgttcagcgtgggcggcctgttctggatgttcagaatcagaatcatcctgtgcctgatgggcgccttcttctacctgatcagccccctggacttcgtgcccgaggccctgttcggcatcctgggcttcctggacgacttcttcgtgatcttcctgctgctgatctacatcagcatcatgtacagagaggtgatcacccagagactgaccagatag

SEQ ID NO: 60879 - DNA, 525 bp, Artificial Sequence
  derived and/or modified sequence
atgtactgcccaatctgtctccatcaggcttcgtttccagtcgagactaactgcggtcaccttttttgtggcgcttgcatcattgcctattggaggtatgggtcgtggctgggcgccatatcttgtccgatctgtaggcagactgtgactctcttgctcacggttttcggtgaggacgatcagtctcaggatgttctccggcttcaccaagacatcaacgattataaccggagattcagcggccagccgcggagcatcatggaacgaatcatggacctcccgaccctacttcggcacgcctttcgggaaatgttttcagtcggtggcttattctggatgttccgcattaggatcatcctgtgtctgatgggagcattcttctatctcatcagtcccctggacttcgtgccagaggcattgtttggaatcttaggttttcttgacgattttttcgttatatttctgctgctgatctacatctctatcatgtatcgcgaagttatcacacagcggctgactagatag

SEQ ID NO: 60880 - DNA, 525 bp, Artificial Sequence
  derived and/or modified sequence
atgtactgccccatctgcctgcaccaggccagcttccctgtggagaccaactgtggccacctgttctgtggggcctgcatcatcgcctactggaggtatggctcctggctgggcgccatcagctgccccatctgccggcagacagtgaccctgctgctgactgtgtttggagaagatgaccagagccaggatgtgctgcggctgcaccaggacatcaatgactacaacagacgcttcagcggccagcccaggagcatcatggagcgcatcatggacctgcccaccctgctgcggcatgccttccgggagatgttttctgtgggcggcctcttctggatgttccgcatccgcatcatcctgtgcctgatgggcgccttcttctacctgatcagccccctggactttgtgcctgaggccctgtttggcatcctgggcttcctggatgacttctttgtgatcttcctgctgctgatctacatcagcatcatgtaccgggaggtgatcacccagaggctgaccaggtag

SEQ ID NO: 60881 - DNA, 525 bp, Artificial Sequence
  derived and/or modified sequence
atgtactgccccatctgcctgcaccaggccagcttccccgtggagacgaattgtggtcatctgttttgtggagcatgcatcatcgcctattggaggtacgggtcgtggctgggcgctattagctgccccatttgccgtcagaccgtgaccctgctcctgacggtattcggagaggatgaccagtctcaggatgttctgaggttacatcaggatattaatgattataaccggaggtttagcggccagccgcggtcgattatggagcggataatggatctgcccacccttttgaggcacgcctttcgggagatgttcagtgtgggcggcttattttggatgttccgtatccggattattctatgcttaatgggggccttcttttatctgatctcacctctggacttcgtgcccgaagcgctcttcggtatcctaggattcctggacgacttctttgtgatttttctgctcctcatctatatctccattatgtaccgagaagtgattacccaaagactcacccggtag

SEQ ID NO: 60882 - DNA, 525 bp, Artificial Sequence
  derived and/or modified sequence
atgtattgtcctatctgcttgcaccaagcatccttccccgtagagacaaattgtgggcacctcttttgtggtgcttgcattatcgcttattggaggtatggaagctggctgggcgcaattagctgtccaatctgccggcaaaccgtaactctgctcctcaccgtctttggggaggacgaccagtcccaagacgtacttagactgcaccaggacataaatgactataacaggcggttctcagggcagcctaggtcaattatggagcgtataatggatctaccaactctgctgagacatgcctttagggagatgttctcagtcggaggcctgttctggatgttccgaatacgcattatcctgtgtctaatgggcgcatttttttatctcatcagtccgttagactttgttcctgaggccctgttcggcatcttagggttcttggatgacttttttgtaatctttctgttgctgatttacatctcaatcatgtacagagaggtgattacacaacggctgacccgctag

SEQ ID NO: 60883 - protein, 2330 aa, Artificial Sequence
  derived and/or modified sequence
MAAEEGVASAASAGGSWGTAAMGRVLPMLLVPVPAEAMGQLGSRAQLRTQPEALGSLTAAGSLQVLSLTPGSRGGGRCCLEGPFWHFLWEDSRNSSTPTEKPKLLALGENYELLIYEFNLKDGRCDATILYSCSREALQKLIDDQDISISLLSLRILSFHNNTSLLFINKCVILHIIFPERDAAIRVLNCFTLPLPAQAVDMIIDTQLCRGILFVLSSLGWIYIFDVVDGTYVAHVDLALHKEDMCNEQQQEPAKISSFTSLKVSQDLDVAVIVSSSNSAVALNLNLYFRQHPGHLLCERILEDLPIQGPKGVDEDDPVNSAYNMKLAKFSFQIDRSWKAQLSSLNETIKNSKLEVSCCAPWFQDILHLESPESGNHSTSVQSWAFIPQDIMHGQYNVLQKDHAKTSDPGRSWKIMHISEQEEPIELKCVSVTGFTALFTWEVERMGYTITLWDLETQGMQCFSLGTKCIPVDSSGDQQLCFVLTENGLSLILFGLTQEEFLNRLMIHGSASTVDTLCHLNGWGRCSIPIHALEAGIENRQLDTVNFFLKSKENLFNPSSKSSVSDQFDHLSSHLYLRNVEELIPALDLLCSAIRESYSEPQSKHFSEQLLNLTLSFLNNQIKELFIHTEELDEHLQKGVNILTSYINELRTFMIKFPWKLTDAIDEYDVHENVPKVKESNIWKKLSFEEVIASAILNNKIPEAQTFFRIDSHSAQKLEELIGIGLNLVFDNLKKNNIKEASELLKNMGFDVKGQLLKICFYTTNKNIRDFLVEILKEKNYFSEKEKRTIDFVHQVEKLYLGHFQENMQIQSFPRYWIKEQDFFKHKSVLDSFLKYDCKDEFNKQDHRIVLNWALWWDQLTQESILLPRISPEEYKSYSPEALWRYLTARHDWLNIILWIGEFQTQHSYASLQQNKWPLLTVDVINQNTSCNNYMRNEILDKLARNGVFLASELEDFECFLLRLSRIGGVIQDTLPVQNYKTKEGWDFHSQFILYCLEHSLQHLLYVYLDCYKLSPENCPFLEKKELHEAHPWFEFLVQCRQVASNLTDPKLIFQASLANAQILIPTNQASVSSMLLEGHTLLALATTMYSPGGVSQVVQNEENENCLKKVDPQLLKMALTPYPKLKTALFPQCTPPSVLPSDITIYHLIQSLSPFDPSRLFGWQSANTLAIGDAWSHLPHFSSPDLVNKYAIVERLNFAYYLHNGRPSFAFGTFLVQELIKSKTPKQLIQQVGNEAYVIGLSSFHIPSIGAACVCFLELLGLDSLKLRVDMKVANIILSYKCRNEDAQYSFIRESVAEKLSKLADGEKTTTEELLVLLEEGTWNSIQQQEIKRLSSESSSQWALVVQFCRLHNMKLSISYLRECAKANDWLQFIIHSQLHNYHPAEVKSLIQYFSPVIQDHLRLAFENLPSVPTSKMDSDQVCNKCPQELQGSKQEMTDLFEILLQCSEEPDSWHWLLVEAVKQQAPILSVLASCLQGASAISCLCVWIITSVEDNVATEAMGHIQDSTEDHTWNLEDLSVIWRTLLTRQKSKTLIRGFQLFFKDSPLLLVMEMYELCMFFRNYKEAEAKLLEFQKSLETLNTAATKVHPVIPAMWLEDQVCFLLKLMLQQCKTQYELGKLLQLFVEREHLFSDGPDVKKLCILCQILKDTSIAINHTIITSYSIENLQHECRSILERLQTDGQFALARRVAELAELPVDNLVIKEITQEMQTLKHIEQWSLKQARIDFWKKCHENFKKNSISSKAASSFFSTQAHVACEHPTGWSSMEERHLLLTLAGHWLAQEDVVPLDKLEELEKQIWLCRITQHTLGRNQEETEPRFSRQISTSGELSFDSLASEFSFSKLAALNTSKYLELNSLPSKETCENRLDWKEQESLNFLIGRLLDDGCVHEASRVCRYFHFYNPDVALVLHCRALASGEASMEDLHPEIHALLQSAELLEEEAPDIPLRRVHSRHKQMFNPTEESQTFLQLTTLCQDRTLVGMKLLDKISSVPHGELSCTTELLILAHHCFTLTCHMEGIIRVLQAAHMLTDNHLAPSEEYGLVVRLLTGIGRYNEMTYIFDLLHKKHYFEVLMRKKLDPSGTLKTALLDYIKRCRPGDSEKHNMIALCFSMCREIGENHEAAARIQLKLIESQPWEDSLKDGHQLKQLLLKALTLMLDAAESYAKDSCVRQAQHCQRLTKLITLQIHFLNTGQNTMLINLGRHKLMDCILALPRFYQASIVAEAYDFVPDWAEILYQQVILKGDFNYLEEFKQQRLLKSSIFEEISKKYKQHQPTDMVMENLKKLLTYCEDVYLYYKLAYEHKFYEIVNVLLKDPQTGCCLKDMLAG

SEQ ID NO: 60884 - DNA, 6993 bp, Artificial Sequence
  derived and/or modified sequence
atggccgccgaggagggcgtggccagcgccgccagcgccggcggcagctggggcaccgccgccatgggcagagtgctgcccatgctgctggtgcccgtgcccgccgaggccatgggccagctgggcagcagagcccagctgagaacccagcccgaggccctgggcagcctgaccgccgccggcagcctgcaggtgctgagcctgacccccggcagcagaggcggcggcagatgctgcctggagggccccttctggcacttcctgtgggaggacagcagaaacagcagcacccccaccgagaagcccaagctgctggccctgggcgagaactacgagctgctgatctacgagttcaacctgaaggacggcagatgcgacgccaccatcctgtacagctgcagcagagaggccctgcagaagctgatcgacgaccaggacatcagcatcagcctgctgagcctgagaatcctgagcttccacaacaacaccagcctgctgttcatcaacaagtgcgtgatcctgcacatcatcttccccgagagagacgccgccatcagagtgctgaactgcttcaccctgcccctgcccgcccaggccgtggacatgatcatcgacacccagctgtgcagaggcatcctgttcgtgctgagcagcctgggctggatctacatcttcgacgtggtggacggcacctacgtggcccacgtggacctggccctgcacaaggaggacatgtgcaacgagcagcagcaggagcccgccaagatcagcagcttcaccagcctgaaggtgagccaggacctggacgtggccgtgatcgtgagcagcagcaacagcgccgtggccctgaacctgaacctgtacttcagacagcaccccggccacctgctgtgcgagagaatcctggaggacctgcccatccagggccccaagggcgtggacgaggacgaccccgtgaacagcgcctacaacatgaagctggccaagttcagcttccagatcgacagaagctggaaggcccagctgagcagcctgaacgagaccatcaagaacagcaagctggaggtgagctgctgcgccccctggttccaggacatcctgcacctggagagccccgagagcggcaaccacagcaccagcgtgcagagctgggccttcatcccccaggacatcatgcacggccagtacaacgtgctgcagaaggaccacgccaagaccagcgaccccggcagaagctggaagatcatgcacatcagcgagcaggaggagcccatcgagctgaagtgcgtgagcgtgaccggcttcaccgccctgttcacctgggaggtggagagaatgggctacaccatcaccctgtgggacctggagacccagggcatgcagtgcttcagcctgggcaccaagtgcatccccgtggacagcagcggcgaccagcagctgtgcttcgtgctgaccgagaacggcctgagcctgatcctgttcggcctgacccaggaggagttcctgaacagactgatgatccacggcagcgccagcaccgtggacaccctgtgccacctgaacggctggggcagatgcagcatccccatccacgccctggaggccggcatcgagaacagacagctggacaccgtgaacttcttcctgaagagcaaggagaacctgttcaaccccagcagcaagagcagcgtgagcgaccagttcgaccacctgagcagccacctgtacctgagaaacgtggaggagctgatccccgccctggacctgctgtgcagcgccatcagagagagctacagcgagccccagagcaagcacttcagcgagcagctgctgaacctgaccctgagcttcctgaacaaccagatcaaggagctgttcatccacaccgaggagctggacgagcacctgcagaagggcgtgaacatcctgaccagctacatcaacgagctgagaaccttcatgatcaagttcccctggaagctgaccgacgccatcgacgagtacgacgtgcacgagaacgtgcccaaggtgaaggagagcaacatctggaagaagctgagcttcgaggaggtgatcgccagcgccatcctgaacaacaagatccccgaggcccagaccttcttcagaatcgacagccacagcgcccagaagctggaggagctgatcggcatcggcctgaacctggtgttcgacaacctgaagaagaacaacatcaaggaggccagcgagctgctgaagaacatgggcttcgacgtgaagggccagctgctgaagatctgcttctacaccaccaacaagaacatcagagacttcctggtggagatcctgaaggagaagaactacttcagcgagaaggagaagagaaccatcgacttcgtgcaccaggtggagaagctgtacctgggccacttccaggagaacatgcagatccagagcttccccagatactggatcaaggagcaggacttcttcaagcacaagagcgtgctggacagcttcctgaagtacgactgcaaggacgagttcaacaagcaggaccacagaatcgtgctgaactgggccctgtggtgggaccagctgacccaggagagcatcctgctgcccagaatcagccccgaggagtacaagagctacagccccgaggccctgtggagatacctgaccgccagacacgactggctgaacatcatcctgtggatcggcgagttccagacccagcacagctacgccagcctgcagcagaacaagtggcccctgctgaccgtggacgtgatcaaccagaacaccagctgcaacaactacatgagaaacgagatcctggacaagctggccagaaacggcgtgttcctggccagcgagctggaggacttcgagtgcttcctgctgagactgagcagaatcggcggcgtgatccaggacaccctgcccgtgcagaactacaagaccaaggagggctgggacttccacagccagttcatcctgtactgcctggagcacagcctgcagcacctgctgtacgtgtacctggactgctacaagctgagccccgagaactgccccttcctggagaagaaggagctgcacgaggcccacccctggttcgagttcctggtgcagtgcagacaggtggccagcaacctgaccgaccccaagctgatcttccaggccagcctggccaacgcccagatcctgatccccaccaaccaggccagcgtgagcagcatgctgctggagggccacaccctgctggccctggccaccaccatgtacagccccggcggcgtgagccaggtggtgcagaacgaggagaacgagaactgcctgaagaaggtggacccccagctgctgaagatggccctgaccccctaccccaagctgaagaccgccctgttcccccagtgcaccccccccagcgtgctgcccagcgacatcaccatctaccacctgatccagagcctgagccccttcgaccccagcagactgttcggctggcagagcgccaacaccctggccatcggcgacgcctggagccacctgccccacttcagcagccccgacctggtgaacaagtacgccatcgtggagagactgaacttcgcctactacctgcacaacggcagacccagcttcgccttcggcaccttcctggtgcaggagctgatcaagagcaagacccccaagcagctgatccagcaggtgggcaacgaggcctacgtgatcggcctgagcagcttccacatccccagcatcggcgccgcctgcgtgtgcttcctggagctgctgggcctggacagcctgaagctgagagtggacatgaaggtggccaacatcatcctgagctacaagtgcagaaacgaggacgcccagtacagcttcatcagagagagcgtggccgagaagctgagcaagctggccgacggcgagaagaccaccaccgaggagctgctggtgctgctggaggagggcacctggaacagcatccagcagcaggagatcaagagactgagcagcgagagcagcagccagtgggccctggtggtgcagttctgcagactgcacaacatgaagctgagcatcagctacctgagagagtgcgccaaggccaacgactggctgcagttcatcatccacagccagctgcacaactaccaccccgccgaggtgaagagcctgatccagtacttcagccccgtgatccaggaccacctgagactggccttcgagaacctgcccagcgtgcccaccagcaagatggacagcgaccaggtgtgcaacaagtgcccccaggagctgcagggcagcaagcaggagatgaccgacctgttcgagatcctgctgcagtgcagcgaggagcccgacagctggcactggctgctggtggaggccgtgaagcagcaggcccccatcctgagcgtgctggccagctgcctgcagggcgccagcgccatcagctgcctgtgcgtgtggatcatcaccagcgtggaggacaacgtggccaccgaggccatgggccacatccaggacagcaccgaggaccacacctggaacctggaggacctgagcgtgatctggagaaccctgctgaccagacagaagagcaagaccctgatcagaggcttccagctgttcttcaaggacagccccctgctgctggtgatggagatgtacgagctgtgcatgttcttcagaaactacaaggaggccgaggccaagctgctggagttccagaagagcctggagaccctgaacaccgccgccaccaaggtgcaccccgtgatccccgccatgtggctggaggaccaggtgtgcttcctgctgaagctgatgctgcagcagtgcaagacccagtacgagctgggcaagctgctgcagctgttcgtggagagagagcacctgttcagcgacggccccgacgtgaagaagctgtgcatcctgtgccagatcctgaaggacaccagcatcgccatcaaccacaccatcatcaccagctacagcatcgagaacctgcagcacgagtgcagaagcatcctggagagactgcagaccgacggccagttcgccctggccagaagagtggccgagctggccgagctgcccgtggacaacctggtgatcaaggagatcacccaggagatgcagaccctgaagcacatcgagcagtggagcctgaagcaggccagaatcgacttctggaagaagtgccacgagaacttcaagaagaacagcatcagcagcaaggccgccagcagcttcttcagcacccaggcccacgtggcctgcgagcaccccaccggctggagcagcatggaggagagacacctgctgctgaccctggccggccactggctggcccaggaggacgtggtgcccctggacaagctggaggagctggagaagcagatctggctgtgcagaatcacccagcacaccctgggcagaaaccaggaggagaccgagcccagattcagcagacagatcagcaccagcggcgagctgagcttcgacagcctggccagcgagttcagcttcagcaagctggccgccctgaacaccagcaagtacctggagctgaacagcctgcccagcaaggagacctgcgagaacagactggactggaaggagcaggagagcctgaacttcctgatcggcagactgctggacgacggctgcgtgcacgaggccagcagagtgtgcagatacttccacttctacaaccccgacgtggccctggtgctgcactgcagagccctggccagcggcgaggccagcatggaggacctgcaccccgagatccacgccctgctgcagagcgccgagctgctggaggaggaggcccccgacatccccctgagaagagtgcacagcagacacaagcagatgttcaaccccaccgaggagagccagaccttcctgcagctgaccaccctgtgccaggacagaaccctggtgggcatgaagctgctggacaagatcagcagcgtgccccacggcgagctgagctgcaccaccgagctgctgatcctggcccaccactgcttcaccctgacctgccacatggagggcatcatcagagtgctgcaggccgcccacatgctgaccgacaaccacctggcccccagcgaggagtacggcctggtggtgagactgctgaccggcatcggcagatacaacgagatgacctacatcttcgacctgctgcacaagaagcactacttcgaggtgctgatgagaaagaagctggaccccagcggcaccctgaagaccgccctgctggactacatcaagagatgcagacccggcgacagcgagaagcacaacatgatcgccctgtgcttcagcatgtgcagagagatcggcgagaaccacgaggccgccgccagaatccagctgaagctgatcgagagccagccctgggaggacagcctgaaggacggccaccagctgaagcagctgctgctgaaggccctgaccctgatgctggacgccgccgagagctacgccaaggacagctgcgtgagacaggcccagcactgccagagactgaccaagctgatcaccctgcagatccacttcctgaacaccggccagaacaccatgctgatcaacctgggcagacacaagctgatggactgcatcctggccctgcccagattctaccaggccagcatcgtggccgaggcctacgacttcgtgcccgactgggccgagatcctgtaccagcaggtgatcctgaagggcgacttcaactacctggaggagttcaagcagcagagactgctgaagagcagcatcttcgaggagatcagcaagaagtacaagcagcaccagcccaccgacatggtgatggagaacctgaagaagctgctgacctactgcgaggacgtgtacctgtactacaagctggcctacgagcacaagttctacgagatcgtgaacgtgctgctgaaggacccccagaccggctgctgcctgaaggacatgctggccggctag

SEQ ID NO: 60885 - DNA, 6993 bp, Artificial Sequence
  derived and/or modified sequence
atggcagccgaggaaggcgttgcgtctgcggctagcgcaggcgggtcctgggggacggcagccatgggaagggtgttgccaatgttgctggtgcccgtgcccgcagaagcaatggggcagcttgggagccgcgcgcaactaaggactcaaccagaggccctaggctcattgaccgccgccgggtcactacaggtgttgagtcttaccccgggctccagagggggcggcagatgttgcctggagggccccttctggcacttcttgtgggaggattccagaaatagcagcactcctaccgaaaaacccaagctgctggcattaggggagaactacgagttgctgatatatgaatttaacctgaaggatgggaggtgtgacgccacaatcttgtacagctgttcccgtgaggccctgcagaagcttatcgacgaccaagacatctccatatccctgctttccctccgaatcttgagttttcacaataatacgagtttgctgttcattaacaagtgcgtcattctacatatcatatttcccgagcgggatgcggccatccgggtcctgaattgcttcacactgccattgccggcacaggccgtcgacatgataattgatacacagctttgcagaggcatcctcttcgttctgtcctccctcggctggatctatatcttcgacgtggttgatgggacatatgtggcccacgtggacctggcattgcataaagaggacatgtgcaatgagcaacagcaggagccagcaaaaatcagctcgttcacctcactgaaggtgagccaagacttggatgtggccgtgatagtgtccagctccaatagcgcggtggcactcaacctgaacctctatttcaggcaacacccagggcatttgctgtgtgaacgcattctcgaagatctgccaattcagggccctaagggcgtggatgaagatgatcccgttaattctgcttacaatatgaaactggcgaaattctcattccaaatcgaccggtcatggaaggcacagctgtcttcactgaacgagaccattaaaaacagcaagctggaggtcagctgctgcgccccctggtttcaagatatcctccatttagaaagtcccgagagcggaaaccactcaacaagcgtgcagtcctgggcttttatacctcaggacataatgcacggccaatataatgtgctacagaaagatcatgctaagacttccgaccctgggcgctcctggaaaatcatgcacatcagtgagcaggaggagcccattgaactcaagtgcgtttccgtcaccggttttaccgccctgttcacctgggaggtagagcggatgggctacactattacgctttgggacctggagactcagggaatgcagtgtttctcactgggcacaaaatgcatacctgtggactcatccggagaccagcaactgtgttttgtgttaaccgagaatgggctgagtctgatcctgttcggtctgacccaggaagagtttttgaaccgcttgatgattcacggatccgcatcgaccgtcgacaccctctgtcatcttaacggatggggccgctgctccattcccattcacgccctggaagctggaatcgagaaccgccagcttgacacggtgaacttcttccttaagagcaaggagaatttgtttaacccgtcatccaagtcttcagtgtcagaccaattcgatcacttaagttcacatctgtacctacgcaacgttgaagagctgatccccgccctagatctgctctgctctgccatcagagaatcttactctgagccacagtccaagcacttctcagagcagttacttaatcttacactgtcttttctgaataaccagattaaggagctcttcattcacaccgaagagcttgacgaacaccttcagaaaggggttaacattttaaccagttatattaatgaactcaggacgttcatgattaaattcccctggaaacttactgatgcaatagatgagtacgatgtgcatgagaatgtacccaaagtgaaggagtctaatatctggaagaagctctcctttgaggaagtgatcgcttccgcgattctgaataacaagattccagaggcccagactttcttccgtattgattctcatagtgcgcaaaagctggaggagctgattggcattggactgaacttggtgttcgataacctcaaaaagaacaacataaaggaggcctcggaactcctgaagaatatgggtttcgacgtcaaaggtcaactcctgaagatctgtttttacactaccaataagaacatccgggactttctcgtggagatcctgaaagagaaaaactatttcagcgagaaggagaagcgcacaatcgacttcgtccaccaggtggaaaagctgtacctgggccattttcaagagaacatgcaaatccagagtttcccacgctactggatcaaggagcaagatttttttaagcataagtctgtcctggattcctttctaaagtatgactgcaaggacgaattcaataagcaagatcataggatcgtgttgaactgggcgttgtggtgggatcagctgacccaggaaagcattctcctgcctaggatctctcccgaggagtataagtcatattctccagaggccctgtggcgctacctcaccgcgcgacacgactggctgaatattatactatggatcggtgagtttcagactcaacactcctacgcatccctccagcagaataaatggccgttgctaacagtagatgttattaaccagaacaccagctgcaataactatatgaggaatgagatcctggataagctcgccagaaacggggtcttcctggcctctgagctggaggacttcgagtgctttctgttgaggcttagccgcattggcggcgtcatccaggacactctgcccgttcaaaattacaagaccaaggagggatgggacttccattctcagtttattctctactgtctggagcattctcttcagcatctgctctacgtgtacctcgactgttacaagctgtcacctgagaactgtccttttttggagaaaaaggagctccacgaggctcatccatggttcgaatttctggtccagtgcagacaagttgcaagtaatctgacagacccaaagctgatcttccaggcgtctctagcaaacgctcagatcctcattccgacgaaccaggcaagcgtcagcagtatgctgttggagggacacacgcttctcgcattagcaaccacgatgtattcccccggaggcgtaagtcaggtggtgcagaacgaagaaaatgaaaactgcctgaaaaaggtggacccccagttacttaagatggctctcactccttacccaaagctgaaaacagctctgtttccccagtgcacccctcccagcgtcctgcccagcgatattacaatatatcacctgatacagagcctgtctcctttcgatccgtccaggctgttcggatggcagtcggccaacacacttgcaattggggatgcctggagtcacctgccccacttttcatccccagatctggtgaacaagtacgccatcgtcgaaaggctgaatttcgcttactatctgcacaatggccggccgtctttcgcctttggcacattcctggttcaagaactgatcaagtccaagacaccaaaacagctgatacaacaagtaggaaacgaagcctacgtgattggtctctcttcttttcatattccctctatcggagcagcttgcgtttgcttcctcgagctgctgggtttagactcactgaaactgcgggtggatatgaaggtcgccaatatcatcctgtcttacaaatgtcgcaacgaggacgcgcagtacagtttcatccgagagtcagtggctgagaagttatccaagctggcggacggcgaaaagacgactaccgaagaactcctggtgctcctggaagagggcacctggaactccatccagcagcaggagatcaagagattgagttcagagagctcctcacagtgggcgctagtagtgcagttttgccggctgcataacatgaagttgagcataagttaccttagagagtgcgccaaggccaatgactggttgcagttcatcattcactcccagctgcacaactatcaccccgccgaagtgaaatcgctgatacagtatttctcgcccgtgatccaagaccatttgagattagcgtttgaaaatctcccttccgtcccaacatccaagatggatagcgaccaagtgtgtaacaaatgtccacaggaactccaaggcagcaaacaggagatgactgatcttttcgaaatcctgctccagtgcagtgaggagcccgactcatggcattggctactggtggaagctgttaagcaacaggccccaatactaagtgtattagcttcctgtctgcagggagcgtctgccatatcgtgtctgtgcgtctggataatcacctcggtggaggataatgtggccacggaagctatgggtcacatccaagactccactgaagaccacacgtggaatctcgaagatttaagtgttatttggcggacgttacttactaggcagaagagcaagacacttatccgagggtttcaactgttttttaaagacagccccttacttctcgtgatggagatgtacgaactgtgcatgtttttcagaaattataaggaggctgaggcaaagttgcttgagtttcagaagagtctcgaaactctgaataccgccgctaccaaagttcaccccgttattcctgccatgtggttggaggaccaggtgtgctttctgttgaaattgatgctgcagcagtgtaaaacgcaatatgagcttggcaagcttctgcagctctttgttgagcgcgaacatctcttcagtgatggaccagatgttaagaaactctgtatcctctgtcagatattaaaagatacatctattgccatcaaccataccataatcacatcttattcaatcgagaacctgcagcacgagtgcaggagcattctcgagagacttcagacggacggtcagttcgccttggccaggagagtggcagaattggcggagctccccgtcgacaacttagtcattaaagagataacgcaggagatgcagacactgaagcacatagaacagtggtccctgaagcaggctaggatagacttttggaagaaatgtcacgaaaattttaagaagaactccattagctcgaaagccgcttcttcatttttcagcacccaggcccacgtagcctgtgagcacccaacaggatggtcttcaatggaggaacgccaccttctactgacactggcaggccactggttggcgcaggaagacgttgtgcccctggacaagctggaagagttagaaaaacaaatttggctgtgcaggatcacgcaacacactttaggtcgcaatcaagaagagacagaaccgagattttcccgccagatctcaacctctggtgaactgtcattcgattctcttgcaagcgagttcagtttttctaagctggcagccttaaataccagtaagtacctggagctgaacagcctccctagcaaagagacctgtgaaaacagactcgactggaaggaacaggagtccctgaacttcctgattggccgcctcttggatgatggatgcgtgcacgaggcaagccgcgtctgtcggtattttcacttctacaaccccgacgtcgccctggttcttcactgtcgggctctcgctagcggagaggcctccatggaagacctgcaccccgagatccatgcgctgttgcagtcagccgagcttctggaagaagaagccccggacataccattgagacgcgtgcattcccggcacaagcagatgttcaaccctacagaggagtctcaaaccttcctgcaactgactaccctatgtcaggataggaccctggttgggatgaagctcctggacaaaatttcatccgtccctcatggcgaactgtcctgtaccactgagctccttatcctggcacaccattgctttaccctgacctgccacatggagggaattatacgagtgcttcaggccgcccatatgctcaccgacaaccatctagccccgtccgaggagtacggcctcgtggtgcgtctcctcaccggtattggcaggtacaatgagatgacttacatctttgaccttctgcacaaaaagcattatttcgaagtccttatgagaaaaaaattagatccatcgggaactctcaagacagcccttctagattatattaagaggtgtcggcccggggattcggaaaaacacaacatgattgcactgtgcttttccatgtgtcgggagatcggggagaatcacgaagccgcagcccgtattcagcttaaattgatcgaatctcaaccttgggaggacagtttgaaagatggtcatcagctcaaacagctcctcctgaaggcccttactcttatgctggatgccgctgaatcatatgccaaggattcctgtgtcagacaggcccagcactgccagcgcctcaccaagctaatcacgctgcagatccatttcttgaatacaggccagaatacaatgttgataaatttgggacggcacaaactgatggactgcattctggccctccctaggttctaccaggcctctatcgtcgctgaagcgtacgacttcgtacctgattgggcggagatcctctatcagcaggtgatcttaaaaggggatttcaattatttggaggaatttaaacagcagaggctactaaaaagctcaattttcgaagaaatctcaaagaagtataaacagcaccaacctacagatatggtcatggaaaatctgaagaagctgttgacatactgcgaggacgtttacttatactataaattagcatacgagcacaagttctatgagatagtaaacgtgctgttgaaagacccccagacaggctgttgcctgaaggacatgctagccgggtag

SEQ ID NO: 60886 - DNA, 6993 bp, Artificial Sequence
  derived and/or modified sequence
atggctgctgaggagggcgtggccagcgctgccagcgctgggggctcctggggcacagctgccatgggccgggtgctgcccatgctgctggtgcctgtgcctgctgaggccatgggccagctgggcagccgggcccagctgcggacccagcctgaggccctgggcagcctgacagctgctggcagcctgcaggtgctgagcctgaccccaggcagccggggcggcggccgctgctgcctggagggccccttctggcacttcctgtgggaggacagcaggaacagcagcacccccacagagaagcccaagctgctggccctgggagaaaattatgagctgctgatctatgagttcaacctgaaggatggccgctgtgatgccaccatcctgtacagctgcagccgggaggccctgcagaagctgattgatgaccaggacatcagcatcagcctgctgagcctgcgcatcctgtccttccacaacaacaccagcctgctcttcatcaacaagtgtgtgatcctgcacatcatcttccctgagagagatgctgccatccgggtgctgaactgcttcaccctgcccctgcctgcccaggccgtggacatgatcatcgacacccagctgtgccggggcatcctgtttgtgctgagcagcctgggctggatctacatctttgatgtggtggatggcacctacgtggcccacgtggacctggccctgcacaaggaggacatgtgcaatgagcagcagcaggagcccgccaagatcagcagcttcaccagcctgaaggtgtcccaggacctggatgtggccgtgattgtgagcagcagcaacagcgctgtggccctgaacctgaacctgtacttccggcagcaccctggccacctgctgtgtgagcgcatcctggaggacctgcccatccagggccccaagggcgtggatgaagatgatcctgtgaacagcgcctacaacatgaagctggccaagttctccttccagattgaccgctcctggaaggcccagctgagcagcctgaatgagaccatcaagaacagcaagctggaggtgtcctgctgtgccccctggttccaggacatcctgcacctggagagccctgagagcggcaaccacagcacctctgtgcagagctgggccttcatcccccaggacatcatgcacggccagtacaacgtgctgcagaaggaccacgccaagaccagtgaccccggccgctcctggaagatcatgcacatcagcgagcaggaggagcccatcgagctgaagtgtgtgtctgtgacaggcttcaccgccctcttcacctgggaggtggagaggatgggctacaccatcaccctgtgggacctggagacccagggcatgcagtgcttcagcctgggcaccaagtgcatccctgtggacagcagcggggaccagcagctgtgctttgtgctgacagaaaatggcctgagcctcatcctgtttggcctgacccaggaggagttcctgaaccggctgatgatccacggcagcgccagcacagtggacaccctgtgccacctgaatggctggggccgctgcagcatccccatccacgccctggaggccggcatcgagaaccggcagctggacacagtgaacttcttcctgaagagcaaagaaaatctcttcaaccccagcagcaagagctctgtgtctgaccagtttgaccacctgagcagccacctgtacctgagaaatgtggaggagctgatcccagccctggacctgctgtgcagcgccatccgggagagctacagcgagccccagagcaagcacttcagcgagcagctgctgaacctgaccctgtccttcctgaacaaccagatcaaggagctgttcatccacacagaggagctggatgagcacctgcagaagggcgtgaacatcctgaccagctacatcaatgagctgcggaccttcatgatcaagttcccctggaagctgacagatgccattgatgaatatgatgtgcatgaaaatgtgcccaaggtgaaggagagcaacatctggaagaagctgagctttgaggaggtgattgccagcgccatcctgaacaacaagatccctgaggcccagaccttcttcagaattgacagccacagcgcccagaagctggaggagctgattggcatcggcctgaacctggtgtttgacaacctgaagaagaacaacatcaaggaggccagcgagctgctgaagaacatgggctttgatgtgaagggccagctgctgaagatctgcttctacaccaccaacaagaacatccgggacttcctggtggagatcctgaaggagaagaactacttcagcgagaaggagaagaggaccatcgactttgtgcaccaggtggagaagctgtacctgggccacttccaggagaacatgcagatccagagcttcccccgctactggatcaaggagcaggacttcttcaagcacaagtctgtgctggacagcttcctgaagtatgactgcaaggatgagttcaacaagcaggaccacagaattgtgctgaactgggccctgtggtgggaccagctgacccaggagagcatcctgctgccccgcatcagccctgaggagtacaagagctacagccctgaggccctgtggagatacctgacagcccggcatgactggctgaacatcatcctgtggattggagagttccagacccagcacagctatgccagcctgcagcagaacaagtggcccctgctgactgtggatgtgatcaaccagaacaccagctgcaacaactacatgagaaatgagatcctggacaagctggccagaaatggagtcttcctggccagcgagctggaggactttgagtgcttcctgctgcggctgagcagaattggaggagtcatccaggacaccctgcctgtgcagaactacaagaccaaggagggctgggacttccacagccagttcatcctgtactgcctggagcacagcctgcagcacctgctgtatgtgtacctggactgctacaagctgagccctgagaactgccccttcctggagaagaaggagctgcacgaggcccacccctggtttgagttcctggtgcagtgccggcaggtggccagcaacctgacagaccccaagctgatcttccaggccagcctggccaatgcccagatcctgatccccaccaaccaggcctctgtgtcctccatgctgctggagggccacaccctgctggccctggccaccaccatgtacagccctgggggcgtgtcccaggtggtgcagaatgaagaaaatgaaaactgcctgaagaaggtggacccccagctgctgaagatggccctgaccccctaccccaagctgaagacagccctcttcccccagtgcaccccacccagcgtgctgcccagcgacatcaccatctaccacctgatccagagcctgagcccctttgaccccagccggctgtttggctggcagagcgccaacaccctggccatcggagatgcctggagccacctgccccacttcagcagcccagacctggtgaacaagtatgccatcgtggagcggctgaactttgcctactacctgcacaacggccggcccagctttgccttcggcaccttcctggtgcaggagctgatcaagagcaagacccccaagcagctgatccagcaggtgggcaatgaggcctacgtgattggcctgagcagcttccacatccccagcatcggggccgcctgtgtgtgcttcctggagctgctgggcctggacagcctgaagctgcgggtggacatgaaggtggccaacatcatcctgagctacaagtgcagaaatgaagatgcccagtacagcttcatccgggagagcgtggccgagaagctgagcaagctggctgatggagagaagaccaccacagaggagctgctggtgctgctggaggagggcacctggaacagcatccagcagcaggagatcaagaggctgagcagcgagagcagcagccagtgggccctggtggtgcagttctgccgcctgcacaacatgaagctgagcatctcctacctgcgggagtgtgccaaggccaatgactggctgcagttcatcatccacagccagctgcacaactaccaccctgctgaggtgaagagcctcatccagtacttcagccctgtgatccaggaccacctgcggctggcctttgagaacctgcccagcgtgcccaccagcaagatggacagcgaccaggtgtgcaacaagtgcccccaggagctgcagggcagcaagcaggagatgacagacctgtttgagatcctgctgcagtgcagcgaggagccagacagctggcactggctgctggtggaggccgtgaagcagcaggcccccatcctgtctgtgctggccagctgcctgcagggcgccagcgccatcagctgcctgtgtgtgtggatcatcacctctgtggaggacaacgtggccacagaggccatgggccacatccaggacagcacagaggaccacacctggaacctggaggacctgagcgtcatctggaggaccctgctgacccggcagaagagcaagaccctcatccggggcttccagctgttcttcaaggacagccccctgctgctggtgatggagatgtatgagctgtgcatgttcttcaggaactacaaggaggccgaggccaagctgctggagttccagaagagcctggagaccctgaacacagctgccaccaaggtgcaccctgtgatcccagccatgtggctggaggaccaggtgtgcttcctgctgaagctgatgctgcagcagtgcaagacccagtatgagctgggcaagctgctgcagctgtttgtggagcgggagcacctgttcagtgatggcccagatgtgaagaagctgtgcatcctgtgccagatcctgaaggacaccagcatcgccatcaaccacaccatcatcaccagctacagcattgagaacctgcagcacgagtgccgcagcatcctggagcggctgcagacagatggccagtttgccctggcccggcgggtggccgagctggccgagctgcctgtggacaacctggtgatcaaggagatcacccaggagatgcagaccctgaagcacatcgagcagtggagcctgaagcaggccagaattgacttctggaagaagtgccacgagaacttcaagaagaacagcatcagcagcaaggccgccagcagcttcttcagcacccaggcccacgtggcctgtgagcaccccaccggctggagctccatggaggagcggcacctgctgctgaccctggccggccactggctggcccaggaggatgtggtgcccctggacaagctggaggagctggagaagcagatctggctgtgccgcatcacccagcacaccctgggcaggaaccaggaggagacagagccccgcttcagccggcagatcagcaccagcggggagctgagctttgacagcctggccagcgagttctccttcagcaagctggccgccctgaacaccagcaagtacctggagctgaacagcctgcccagcaaggagacctgtgaaaatcggctggactggaaggagcaggagagcctgaacttcctgattggccgcctgctggatgatggctgtgtgcatgaggccagccgggtgtgccgctacttccacttctacaacccagatgtggccctggtgctgcactgccgggccctggccagcggggaggcctccatggaggacctgcaccctgagatccacgccctgctgcagagcgctgagctgctggaggaggaggccccagacatccccctgcggcgggtgcacagccgccacaagcagatgttcaaccccacagaggagagccagaccttcctgcagctgaccaccctgtgccaggacaggaccctggtgggcatgaagctgctggacaagatcagctctgtgccccacggggagctgagctgcaccacagagctgctgatcctggcccaccactgcttcaccctgacctgccacatggagggcatcatccgggtgctgcaggccgcccacatgctgacagacaaccacctggcccccagcgaggagtatggcctggtggtgcggctgctgactggaattggccgctacaatgagatgacctacatctttgacctgctgcacaagaagcactactttgaggtgctgatgaggaagaagctggaccccagcggcaccctgaagacagccctgctggactacatcaagcgctgcaggcctggggacagcgagaagcacaacatgattgccctgtgcttctccatgtgccgggagatcggggagaaccacgaggccgccgcccgcatccagctgaagctgattgagagccagccctgggaggacagcctgaaggatggccaccagctgaagcagctgctgctgaaggccctgaccctgatgctggatgctgctgagagctatgccaaggacagctgtgtgcggcaggcccagcactgccagaggctgaccaagctgatcaccctgcagatccacttcctgaacacaggccagaacaccatgctgatcaacctgggccgccacaagctgatggactgcatcctggccctgccccgcttctaccaggccagcatcgtggccgaggcctatgactttgtgcctgactgggccgagatcctgtaccagcaggtgatcctgaagggggacttcaactacctggaggagttcaagcagcagaggctgctgaagagcagcatctttgaggagatcagcaagaagtacaagcagcaccagcccacagacatggtgatggagaacctgaagaagctgctgacctactgtgaagatgtgtacctgtactacaagctggcctatgagcacaagttctatgagatcgtgaatgtgctgctgaaggacccccagacaggctgctgcctgaaggacatgctggccggctag

SEQ ID NO: 60887 - DNA, 6993 bp, Artificial Sequence
  derived and/or modified sequence
atggccgccgaggagggcgtggccagcgccgccagcgccggcggctcctggggaaccgcggcaatgggtcgcgtgcttcctatgctgctcgtgcctgtccccgccgaggcgatgggccaactgggaagtcgggctcagctccgtactcagcccgaggctctggggagtctcacagccgcagggtcgctccaagtgctctccctgacacccggtagtcgggggggagggcggtgttgtctcgaaggacccttctggcactttctgtgggaagatagccgcaattccagcactcctacagaaaagcccaagctactcgcgctgggagagaactatgaactcctgatctacgaattcaacctgaaggacgggcggtgcgatgcaaccatcttatattcttgtagccgggaggcgcttcagaaactgatcgacgaccaggacatcagcatctcgctcctgagccttcgaatattatcttttcacaacaataccagtctcctcttcattaacaagtgtgtgatcctccacattatttttcccgaacgtgatgcggccatcagggttctaaactgctttactctcccactcccggctcaagccgtggatatgatcattgacacgcagctgtgcagaggcattcttttcgtactcagtagcctcgggtggatttatatatttgatgtggtggacggcacatacgtcgcacacgttgacctggcactccacaaggaggacatgtgcaatgagcagcagcaagagcctgctaagatctcctccttcacaagccttaaggtctcccaggacctggatgtggccgtcatcgtaagtagtagcaatagcgctgtcgctctgaaccttaatctctatttccgacagcatcctggacacttactctgtgagcgtattctggaggacctgccaatacagggccccaaaggagtagacgaagacgatcctgtgaatagtgcgtataacatgaagctggccaagttctcttttcaaatcgatcgctcttggaaggcccagctctcgtctctgaacgagaccattaaaaattccaaactggaggtgtcctgttgtgctccttggtttcaggatatcctacacttggagtcacctgagtccgggaatcatagtacaagtgtccagtcttgggcttttattccccaagatattatgcatgggcagtataatgtcctacagaaggaccacgccaagacatctgatccaggaaggtcttggaagattatgcacatcagtgagcaggaggaaccgattgaactcaagtgtgtcagtgtcactgggtttaccgctttattcacctgggaagtcgaacgaatgggttataccattacattgtgggatcttgaaacacaaggaatgcagtgcttctctctcgggactaaatgcatacctgtggactcttcaggcgatcagcagttatgctttgtcctaactgaaaacggtttgagcctcattctgttcggcctcacacaggaggagtttctcaatcgactgatgattcatggatctgccagcactgtggatacattgtgccacctcaacggatggggacggtgcagtatacctatacatgctctcgaagccggcattgaaaaccgccagcttgacacagttaattttttcctaaaaagtaaggagaatctgtttaatccctctagtaagagctcagtcagtgatcagttcgaccatctctcgtctcacttatacctgaggaacgtcgaggagcttatacctgctctcgaccttctctgctctgctatcagagagtcctattctgaacctcagagcaagcactttagtgaacagctcctgaacttgacacttagctttctcaacaatcagattaaggagctttttatccacaccgaagaactcgatgaacatctccaaaagggagttaacattttgacctcctatattaacgagcttcgcacgtttatgataaagtttccctggaagctcacagacgcaatcgatgaatatgatgttcacgagaacgttcctaaagtcaaggaaagcaacatctggaagaaactgagttttgaggaagtgatcgcctcagcaattttaaacaacaaaatacccgaggcacagacatttttccgaattgactctcatagtgcccaaaaactcgaggaacttatcggcattggactgaacctcgtgtttgacaacctaaagaaaaacaatatcaaggaggcctcggagctgctcaagaacatgggattcgatgtgaaaggccaattgctgaaaatttgtttctatacaaccaacaaaaacatccgcgactttttggtggaaattcttaaagagaagaactattttagcgagaaagagaaacggaccattgactttgttcaccaggtggaaaaactctatcttggtcattttcaggaaaacatgcagatccagtctttccctagatactggattaaagagcaggactttttcaagcataagtccgtgcttgattcgtttctgaagtatgattgtaaggatgagtttaataagcaggatcatcgcatagtcctgaactgggcactttggtgggatcagcttacacaagagagcattctgctgcctcgtatatcccccgaagagtataagtcctattcccccgaggcattgtggaggtacttgaccgccaggcatgattggttgaatatcatcctgtggataggcgagttccagacgcaacactcatacgccagcctgcagcaaaataaatggccgctgctcaccgtcgacgttatcaaccagaatacctcatgcaacaattacatgcgcaacgagatactggataagctcgcccggaacggcgtcttcctggcctcagagcttgaagactttgagtgtttcctgctccgtttatccaggataggtggtgtcattcaggacaccctgcccgtgcagaactacaaaaccaaagaagggtgggatttccatagccagtttatattgtattgtctggaacacagcctgcaacatctgctgtatgtatatctggattgctacaagttgagcccagagaactgtcctttcctggaaaaaaaagagcttcatgaagcacacccatggttcgaatttctggtgcaatgtcgccaagtagcctcaaatttgacagaccccaagttgatcttccaagccagtctcgctaatgcacaaattttgatcccaacaaaccaggcttccgtgtctagtatgctattagaaggccacaccctgttagccctggccaccacgatgtatagccctggtggagttagccaagtcgtgcaaaatgaagagaacgaaaactgccttaagaaagtggatccacagctgctcaaaatggcactaactccctatccaaaactgaagacagctctctttcctcaatgcaccccgccttctgtgctgccatcggatataaccatttaccatttgatccagagcctctccccattcgatccaagcagacttttcggctggcaaagcgccaacactttggccatcggagacgcttggagtcatctcccgcattttagtagccccgatctggttaataagtacgccattgtcgaaagacttaacttcgcttactacttacataatggtagacctagcttcgctttcgggacttttctggtgcaggaactgattaagtctaaaacacctaagcagttaattcaacaggtcggaaacgaggcttatgtgatcggtttgagcagttttcatatcccgagtatcggagctgcctgtgtttgttttctcgaattgctcggactggactccctgaagctgcgggtcgacatgaaagttgccaatattatcttgtcgtacaagtgcagaaacgaagacgcacagtactcatttatccgagagtctgtcgccgaaaaactgtccaagctggccgatggggagaaaactacaactgaggagttgctggtcctgctggaagagggaacgtggaattcaatccagcagcaggaaatcaaacgtcttagcagcgaatcgtcaagtcaatgggcccttgttgtgcaattttgccgtctccataatatgaaactctccatctcttacctccgagagtgcgccaaggccaatgattggttgcaatttataatccacagtcagcttcacaattatcacccagccgaggtcaaaagcttgatacagtatttttccccagtgatccaggaccacctccgcctcgcctttgagaacttgccctctgtgccgacctcaaagatggactctgaccaggtgtgcaacaagtgcccgcaggagctgcagggatcaaagcaggagatgactgacctctttgagattctcctccaatgtagcgaagagcccgattcttggcactggctgttagtagaggcagtgaagcaacaggccccaattctctccgttctggcatcgtgtctgcaaggagcttcggcaatcagttgcctatgcgtgtggattatcacctctgtcgaagacaacgtcgctaccgaagcaatgggacatattcaagactctactgaagatcatacctggaacttagaggatctcagcgtgatctggcgaacactgcttactcgccagaagagtaagaccctcattcgcggctttcagctatttttcaaggactcacctctcttgctagtgatggagatgtacgaactgtgcatgtttttccgcaactataaggaagccgaggcaaagttgctggagttccagaagtcgttggaaacacttaacacagctgccaccaaggtgcacccagttatcccggccatgtggctggaggaccaggtgtgctttctcttaaagctgatgctacaacagtgcaagacgcaatatgaattgggcaaactgcttcaactcttcgtggaacgggagcaccttttttccgatggaccagatgtgaaaaaattgtgcatcctctgccagatactgaaagacaccagcatcgccataaatcacaccattatcacttcatatagcatcgaaaacctacagcatgagtgccgctctatcctagaaagactgcaaacagatggccagtttgcgctggcaaggcgcgtggccgagctcgctgaactgccagtggataacctcgtgataaaagagatcacacaggagatgcaaacactgaaacacatcgagcagtggtccctcaagcaggcacggatagacttttggaaaaaatgtcacgagaactttaagaaaaacagcatcagtagtaaagcagctagtagtttctttagtactcaggcacacgtggcttgtgagcatcctaccgggtggtcaagcatggaagaaagacatttgctcctcacattagccggacactggctggcgcaagaagacgtcgtgcccctagataaactggaagaactggagaaacagatctggctctgccggataactcagcacaccctgggtcgcaaccaagaggagacagagccccgtttttctcgccaaatatcaacctcaggggagttgagcttcgactcgctcgcctccgaattttctttttccaaattagccgcacttaacacctccaaatatctggagttaaattctttaccgtccaaggagacttgcgagaatcgtctggattggaaggagcaggagagtctgaattttttgattggaaggctcctggatgacggttgtgtgcacgaggctagtagagtttgtagatattttcacttttacaacccggacgttgctctcgtgctgcactgccgagcgttagcctccggcgaggcaagcatggaggatctgcatcccgagattcatgctctcctgcagagtgcggaactgctagaagaagaagcgcccgacatccccctcagacgcgttcactctagacataagcaaatgttcaacccaactgaagagagccagacatttctgcaactgacaaccctctgccaagataggacactggtggggatgaagttattagataagattagttctgtccctcacggagagttgtcgtgtaccacagagttgctgattcttgcgcatcattgctttactctgacctgtcacatggaggggattattagggtcctccaggccgcccatatgttgacagataaccacctagctcccagtgaggagtatgggctggtggtgcgccttctaaccgggattgggcggtacaacgagatgacgtacatattcgaccttctgcataagaaacattactttgaggtgttgatgcgtaaaaagctcgacccctcaggcactctaaagaccgccttactcgattacatcaaacgatgtcggccaggtgattccgagaagcataacatgatcgctttgtgcttctccatgtgcagagagattggggaaaaccacgaggccgccgcaagaattcagcttaaactgatagagtcacaaccgtgggaggatagtcttaaagacggccatcagctcaagcagttgttactgaaggccctgacactcatgcttgacgctgcggaatcgtacgcgaaagactcttgcgtccgccaagcccagcattgccagagactcacgaaactcattacattgcagatccacttcctcaacaccgggcagaatacgatgctgattaaccttgggaggcacaagctgatggactgtatactggccctgcctcgcttctaccaagcatccatagtagccgaggcgtatgatttcgtgcccgactgggcagagatcctgtatcagcaggtaattctgaagggagacttcaattatctggaggagtttaagcagcaacggctgctgaaaagtagcatctttgaagaaatctcgaaaaagtacaaacagcaccagccaaccgacatggtgatggaaaatttgaagaagcttttgacttattgcgaagatgtatacctatactacaagctggcctacgagcacaagttctatgaaatagtcaatgtcttactgaaggatccacagaccgggtgttgtctgaaagatatgctagctgggtag

SEQ ID NO: 60888 - DNA, 6992 bp, Artificial Sequence
  derived and/or modified sequence
atggcggcagaggagggggtagccagtgccgcatctgctggcggtagctggggtacggcggctatgggccgtgttctgcccatgctgctcgtgccggtccccgctgaagccatggggcaactgggatccagggcgcaactgaggacgcagcctgaagctctgggcagccttacagccgctggaagccttcaggtgcttagtctgacaccgggaagtagagggggagggaggtgctgtctcgaaggacctttttggcactttctctgggaggattccaggaatagctcaacacctacggagaagcccaagttgctagctttaggcgagaactacgagctcctgatatacgaattcaacctgaaggacggcagatgcgatgctacaattctgtacagttgtagcagagaagctttgcagaaactgatcgacgaccaggacattagtatcagtctcctgtcgctgaggatcctcagtttccataataacacttccctgctgttcattaacaagtgcgtgatcctgcacatcatcttcccagaacgggatgctgccattcgagtgttgaattgcttcaccttgcccctcccagctcaggcagttgatatgattattgatacacagctctgccggggtatcctgttcgtactgtcaagtctaggatggatctatatttttgatgtggtggatgggacctatgtcgctcatgtcgatctggccctccacaaggaagacatgtgtaatgagcagcagcaagaacctgcaaagatctccagtttcacatcactgaaagtgtcacaggacttggacgtcgccgtgattgttagcagctcgaactctgctgtcgcactaaatctgaatctatatttccgccagcaccccggtcacctattatgcgagcgaattctcgaggacctgcccatccagggaccaaaaggagtggacgaggacgaccccgtgaattctgcgtataacatgaaacttgcgaaatttagtttccagattgaccggagctggaaggcccagctgtcaagtcttaacgagacaattaaaaacagcaagctcgaagtgagttgttgcgccccttggttccaggatatccttcatctagagagtccagaaagcggtaatcacagtacatcagtgcagtcctgggcctttattccacaggatataatgcatgggcaatacaacgtacttcagaaagaccatgccaagacctctgaccctggcaggtcgtggaaaataatgcacatctcagaacaggaagagccaatcgagcttaaatgtgtgagtgtgactggattcaccgccctgttcacatgggaggttgaacggatgggttacacaataaccctttgggatctggaaacgcagggcatgcagtgcttcagcctaggcactaagtgtattcctgtggattcctcaggcgaccagcagctttgtttcgtgctgacggaaaatggactgtctttgatcctttttggactgacacaggaggaatttttgaaccgccttatgatacacgggagtgccagcactgtcgatacactctgtcacctgaatggctggggcaggtgttcaataccaatccacgccctggaagctggtatcgaaaacaggcagctggacacagtaaacttcttcttgaaatctaaagagaatctgttcaatccgagttccaaaagctccgtctccgaccagtttgaccatctgagctcccacctctacctgcggaacgttgaagagctgatcccggcactggacctgttgtgttccgccattcgtgagtcgtattcagagccacagtccaaacatttttctgagcagctgcttaatctgacgctgagtttcctgaataatcagattaaagaactgtttatacacaccgaggaactggatgaacacctccagaaaggagtgaacattctcacctcctatattaacgagctgagaacgtttatgatcaagtttccctggaagctcaccgacgctattgacgagtatgatgtgcacgaaaacgttcccaaagtgaaggaaagcaatatctggaagaaactgtcattcgaggaggtgattgcctcagctatcctgaataacaagatacctgaggcacaaacattctttcgcatagactcccacagcgcccaaaaactcgaggagctcattgggattggactgaatctggtatttgataatcttaagaagaacaatataaaggaagcctctgagctcttaaagaatatgggatttgacgtcaagggacagctgcttaagatatgcttctatactaccaataagaatattagagatttcctggtcgagatcctcaaagaaaaaaactatttcagcgagaaagaaaagaggaccattgactttgtgcatcaggtggaaaaattatacctcggtcactttcaggagaatatgcagatacagagcttccccaggtactggattaaagaacaggatttctttaagcacaagagcgtgcttgactcgtttttaaaatacgattgtaaggatgagttcaataagcaggatcaccgcattgttcttaattgggcgttgtggtgggatcagctgacgcaggagagtatcctgctgcctcgcatctctccagaggaatacaaatcttactccccagaggctctgtggaggtatttgaccgcgagacatgactggctaaacatcattctgtggatcggcgaattccagacccagcactcctacgcttccctgcagcagaacaaatggcccctgctgacagtcgatgtcatcaatcagaatacgtcctgtaacaattacatgaggaatgaaatccttgacaaactggccaggaatggggtgttcctggcttccgaactagaagacttcgaatgcttcctgcttagactgagtaggattggtggagtaattcaggatacgctgccagtgcaaaactacaaaaccaaagaggggtgggattttcactcccagtttattctctattgtcttgagcatagcctgcagcatcttctgtacgtttacttggactgctataaactgagccccgaaaactgcccattcctagagaaaaaggagctacatgaagcgcatccatggttcgagtttctagttcagtgtaggcaagttgcgagcaatcttacagaccccaaactcatatttcaggcttccctggcaaatgcccaaatcttgatcccaaccaaccaggccagcgtgagttcaatgctgttagaggggcatacattactcgctctggccactaccatgtactctccgggtggcgtgtcccaggttgtgcagaacgaagagaatgagaactgcctgaaaaaagtcgacccccaactattgaaaatggccctaacaccttatccaaagctaaagaccgcactatttcctcagtgcaccccacccagcgtgctgccttcagatataaccatctatcaccttatacagtcgctgtccccatttgaccccagccgcctgttcggctggcaatcagccaatactctcgcgatcggagatgcttggtcacaccttcctcatttctcttcccccgacttagtaaataagtacgcaatcgttgagaggctcaattttgcatactacctgcacaacgggagaccatcttttgccttcggcacgttcttggtacaggagcttatcaagtcaaaaaccccgaaacaactgatccagcaagtaggcaatgaggcatacgtaattggcctcagttcattccatattcctagtatcggagcagcatgcgtgtgttttctggaactccttggactcgattctcttaagttgcgcgttgacatgaaggtggcaaatatcatcctctcctataagtgtcgaaacgaggacgctcaatactcattcataagagagtctgtggcagagaaactttcaaagcttgcagatggcgaaaagacaaccacagaggagctgctggtattgttggaggagggcacatggaattccattcaacagcaagaaatcaaaagattgagcagtgagtcttcgtcccagtgggccctggtcgtgcagttttgtcggctgcataacatgaaactgtcaatctcttatctcagggaatgtgcgaaagctaacgactggctgcagtttatcatccatagtcagctgcacaattaccacccagctgaggtgaagagtttgattcagtacttcagtccagtgatacaggaccacctccggctggcgttcgagaacctgccatcagtgccgacgagcaagatggactccgaccaggtctgcaacaagtgcccccaagaactccaagggtccaagcaggaaatgacagacttgtttgagatccttcttcagtgtagtgaagagcctgactcctggcattggctccttgtggaagctgtgaagcagcaagcccctatcttatctgtgctggcttcctgtcttcagggggcatccgcgatctcctgcctttgtgtttggattattacttctgtggaggataatgtcgctaccgaggcgatgggccatattcaggatagcacagaggatcatacatggaatctcgaagacttgagcgtcatttggcggacgcttttgaccagacagaaatcgaagaccctgattcggggatttcaactattctttaaggacagtccgttgcttctggtgatggaaatgtatgagctgtgtatgtttttcaggaattacaaagaggcagaggcaaagcttctggagtttcaaaaatccctggaaactctgaatacagctgctactaaggtgcacccagtaatccccgcaatgtggttagaagaccaggtatgttttctactgaagctgatgctgcaacagtgcaaaacccagtatgaattggggaagctgctccagttgtttgtagaacgtgagcatttattttctgacggacccgatgtgaagaagctctgcattctgtgccagatactgaaggacactagcatcgcgatcaatcacactatcattactagttactccattgagaacctgcaacacgagtgtcggtccatcctggaaaggcttcaaactgacggccagttcgccctcgctcgcagagtcgcggagctggcagagcttcctgtagacaatctagttataaaggagatcacacaggagatgcagacgctgaaacatattgaacagtggtccctcaagcaggccaggatcgatttctggaaaaagtgccatgagaattttaaaaagaatagcatcagcagtaaggcagcatcttctttcttttctacgcaagctcatgtagcctgtgaacacccaaccggatggtcatccatggaggaacgccacctcctcctgaccctggccggacactggttggctcaggaagacgtggtgccattagacaagcttgaagagctagagaaacaaatctggctctgcaggattacccagcacacccttggccgtaaccaggaagaaactgaaccacggttcagtagacagatttccacttctggagagctgtcattcgactccctcgcttccgagttctcctttagcaaactagcagctctcaacactagtaagtacctggaattgaacagccttccaagcaaggagacctgcgagaaccggttggattggaaggaacaggaaagtttaaattttttaattgggcgtttgctggatgacgggtgcgtccatgaggcttcgcgggtctgtcggtactttcatttctataaccccgacgtggccctagtgttgcattgccgcgcattggcctcaggagaagcttccatggaggacctgcaccctgagatccatgccttgttgcagtccgcggaactgctggaggaggaagcaccggatattcccctgaggcgcgttcactctagacataaacagatgttcaatccaactgaggaaagccagacctttctgcagctcactactctgtgtcaggaccgaacactcgtggggatgaagctgctcgacaagatctccagtgtgccacatggcgagctctcttgcacaacggaactgctgattctcgcccaccattgctttactctaacatgtcatatggagggaatcatccgcgtgctgcaggctgcgcatatgcttacagacaaccacctggccccttccgaagaatacggcctggtggtccggctccttacgggtatcggccgttacaacgagatgacatacatcttcgatctcctccataagaagcactatttcgaagtgctcatgaggaaaaagttagacccctctggcacccttaagacagcattactggactatattaagcgctgtaggcccggtgattcagaaaaacataacatgatcgccctttgctttagcatgtgtagagaaattggggagaaccacgaagccgctgctcggatacagctgaaactgattgaaagtcagccttgggaggattccttgaaggatgggcaccagcttaagcagttgctcctgaaggcgttgacattaatgctggacgctgcggaaagttacgcaaaagattcttgtgtccgccaggcccagcactgtcagagactgactaaattgattacccttcagattcatttcctgaacactggacaaaacactatgcttatcaaccttggacgtcataagctgatggattgcatactggcccttcccaggttttatcaggcctccatcgtggctgaggcgtatgactttgtcccggattgggctgagatcttgtaccaacaggttattcttaagggtgacttcaactatctagaggagttcaagcagcaaaggctactgaaatccagcatctttgaggagatcagcaagaagtataaacagcaccaaccaacagacatggtaatggaaaacctaaagaagcttctgacttactgcgaagatgtctacctgtactacaagctggcatacgaacataagttttatgagatcgttaacgtgctcctgaaagatccccaaaccgggtgttgcctaaaagacatgttggcgggtta

SEQ ID NO: 60889 - DNA, 7288 bp, Artificial Sequence
  derived and/or modified sequence
agtgaccggaagtaaccgccgggccaagatggctgcagaggaaggggtcgcgagtgctgcttccgccggcggtagctggggcaccgcggccatggggcgggttctaccgatgctgttggtgccagtccccgccgaggcgatggggcagctcggctcccgggcgcagctgcgcacacagccggaggctctggggagcctgacggctgcgggcagcctccaagtgctttctttgacgcctggcagccggggcgggggtcgctgctgcctggagggccccttctggcactttctatgggaggattctcgtaacagcagcacaccaactgaaaagcccaaactgctcgctcttggtgaaaattatgaactgcttatctatgaatttaatttgaaagatggaagatgtgatgcaaccattttgtatagctgtagtagggaggcattgcaaaagctcattgacgatcaagatatcagtatttccttattgtctttgagaatcctgtcatttcacaataacacatcattactgttcatcaacaaatgtgtcatcctacatattatatttcctgaaagagatgctgcaattagagtactcaactgtttcacacttcccttgcctgcacaggcagtggacatgattattgacacgcagctctgcagaggaattctttttgttttgagtagtttaggctggatctacatttttgatgttgtggatggtacatatgtagctcatgtggatttagcacttcacaaagaagacatgtgtaatgagcagcaacaggagccagccaagatttcttcatttacttcactgaaagtttctcaagacctcgatgttgcagtgattgtcagctcctccaactccgcagttgctcttaacttaaatttgtatttcaggcaacacccaggacacctactgtgtgaaagaatactagaagatcttcctattcaaggacctaagggcgtagatgaagatgatcctgttaactctgcctacaacatgaaactggccaagttttccttccaaattgataggtcttggaaagcccagctatcatcattgaatgaaacaataaagaactccaaactggaggtttcctgttgtgctccatggttccaggatattttgcatttggagtcacctgaatctggtaaccacagtacaagtgtgcagagctgggccttcattccacaggacataatgcatgggcaatataatgttctacagaaagatcatgccaagaccagtgatccaggaagatcatggaaaataatgcacatcagtgaacaagaggaacccatagagcttaaatgtgtgtctgtgacaggattcactgcactgtttacttgggaagtggaaaggatgggctataccattaccctctgggatttggagacccagggcatgcagtgtttttcccttggcacaaagtgtattcctgtagacagtagtggagaccagcagctgtgctttgttttgacagagaatggactctctctgattttgtttggtttgactcaagaagagtttttaaacagactcatgatccatggaagtgccagcactgtggacactctttgtcatctcaatggctggggaaggtgctcaattcccatacatgcactagaggccgggatagaaaatcgtcagctggacacagtaaatttctttttgaagagcaaggaaaatctttttaatccatcctcaaaatcttctgtatctgatcagtttgatcacttgtcatcccatttatatttaagaaatgtggaagagctgataccagcattggatttactttgctcggcaattagagaaagttattctgaaccccaaagcaaacacttttcagaacaattgcttaatcttacactgtctttccttaacaaccaaataaaggagcttttcattcacactgaagaactagatgaacatctgcaaaaaggagtgaacattttgactagctacattaatgaacttcgaaccttcatgataaagtttccttggaagctaacagatgctatagatgaatatgatgtacatgaaaatgtccccaaagtaaaggagagcaatatatggaagaaactcagctttgaggaagttattgccagcgccattttaaacaacaaaataccagaggcacagactttcttcaggattgatagtcattctgctcaaaaacttgaggagcttattggcataggcctaaatttggtctttgacaatttaaaaaagaacaatataaaggaagcctctgaacttttgaagaatatggggtttgatgtaaaaggccaattgctcaagatctgcttctatacaactaataaaaatatacgtgactttttggttgaaattttaaaagaaaaaaattatttttctgaaaaagagaaaagaactatagacttcgtgcatcaagttgagaagctttatttgggacatttccaagaaaatatgcaaatccagtcatttcccaggtactggataaaggaacaagattttttcaagcacaagtctgttttggactcattcctgaaatatgattgtaaagatgaatttaacaaacaggaccatagaattgtgttaaattgggctctgtggtgggatcaactaacacaagaatccatccttctccccaggataagtccagaagaatacaaatcatattcccctgaagccctctggagatacctcacagctcgccatgattggttaaacattatcttatggattggagaatttcaaacccagcatagttatgcttcacttcagcagaacaaatggccccttctgactgttgatgttattaaccagaatacttcctgtaacaactacatgaggaatgaaattttagataagctggccaggaatggggtttttttggcatctgaactggaagactttgaatgcttcctcctaagactgagccgtattggaggtgtaatacaggataccctccctgttcaaaactacaagaccaaagaaggttgggatttccattctcaattcattctctattgtttggagcacagtctgcagcatcttctttatgtctaccttgactgttacaaacttagtcctgaaaattgtccctttttggaaaaaaaagagttacatgaagcacacccttggtttgaatttttagttcagtgtcgacaagttgccagtaacttaacagatcccaaactgatcttccaggctagccttgcaaatgctcagattttgattcccaccaatcaggccagtgtaagcagtatgctattggaaggacataccctcctggcccttgctactacaatgtattctcctgggggtgtcagtcaggttgttcagaatgaagaaaatgaaaactgtttgaagaaagtggatccccagctattgaagatggcattaactccttaccccaagctaaaaactgctctcttcccacagtgcactcctcctagtgtcctgccatctgatattacaatctaccaccttattcagtcattatcaccctttgatcctagcagattgtttggctggcagtctgctaacacactagctataggagatgcatggagtcatctcccacatttctctagccctgacctggttaataaatatgctatagtggaacgtctgaattttgcttattatttacataatgggcggccatcatttgcatttggtacttttctggtccaggaattaatcaagagcaagactcccaagcagctgatccagcaagtaggcaatgaagcctatgttatagggctctcctccttccacataccttcaataggagctgcatgtgtttgtttcttagaattgcttggccttgacagcctcaagctcagagttgatatgaaagtggccaatataattttgagctacaagtgcagaaatgaagatgctcagtacagctttatcagagagtctgtagccgaaaaactatctaaactagctgatggtgaaaagacaaccacagaagaattgcttgttctcttagaagaaggtacatggaacagcattcagcaacaggaaataaagaggttatccagtgaatctagcagccaatgggcattagtggtgcagttctgcaggctacacaatatgaaactaagcatatcttaccttagagaatgtgccaaagcaaatgattggctgcagttcattattcacagccaactccacaactaccacccagcagaggtgaaatcccttatccagtacttcagcccagtcattcaagaccacttaaggctggcttttgagaacttgccctcagtgcccacctccaaaatggacagcgatcaagtctgcaataagtgcccccaggaacttcaaggaagcaaacaagagatgaccgatttatttgaaattctgctccaatgctcagaggagccagactcctggcactggcttctggttgaagcagtgaaacaacaggcccctatcctcagtgttctggcctcatgtctccagggtgccagtgccatttcttgtctctgtgtttggatcatcacttctgtggaggacaatgttgcaactgaagcaatgggacacattcaggactcaacagaggaccatacctggaaccttgaggatctttcagtcatctggagaacattattaacaagacaaaagagcaaaactctcatcagaggtttccagcttttctttaaggattccccgttactactggtgatggagatgtatgaactgtgtatgttcttcaggaattataaagaagctgaagctaaacttctggagtttcagaagagccttgaaacgcttaacacagcagccacaaaggtccaccctgtcatccctgccatgtggctggaggatcaggtgtgtttccttttgaagcttatgctacagcagtgtaagacccagtatgagctggggaagcttttacagctctttgttgaaagagagcatctcttctctgatggtccagatgtgaaaaagctttgcatcctttgccagattttgaaggatacatccatagccattaatcatacaattattaccagctacagcattgagaatcttcagcatgaatgtagatctattttggaaagactgcagacagatggacaattcgctttggccaggagggtagcagaattagctgagttacctgtggacaacttggttattaaagagataacacaggaaatgcagaccctaaaacacattgaacagtggtcactaaaacaagcaagaattgacttctggaaaaaatgccatgagaattttaagaaaaattcaatttcaagcaaagcagcttcttcctttttctcaacccaggcccatgtggcatgtgagcacccaactggatggagcagcatggaggagcgccatctgctgctcaccttggcagggcactggcttgcccaggaggacgtggtgcccttggataagctggaggagctggagaagcagatctggctgtgccgcatcacccagcacactcttggaagaaatcaggaggaaacagagcccagattttctcgacagatctcaactagtggtgaactttcctttgatagtttagccagtgagttttccttctccaagttggctgctctgaacacatcaaaatacttagaacttaacagccttccatccaaagagacatgcgagaatagattggattggaaagagcaggagtcactaaactttttgattgggcgcctactggatgatggctgtgtgcatgaagcaagtagagtatgccggtattttcatttttataatccagatgtcgccttggtattgcactgcagagcactggcctcaggggaagctagtatggaggatctgcacccagagatccatgctctcctacaaagtgctgagctgcttgaggaagaagcacccgacattcccctaaggagagtccacagcagacataagcagatgttcaacccaacagaggaaagccagacatttcttcagctgaccactctgtgtcaagaccgcacattggtaggcatgaagttgttggataagatttcctccgttccccatggggaactgtcttgcaccacagagctcctgatcctggcccatcattgcttcaccctgacgtgccacatggagggcatcatccgagtcctacaggccgcccacatgctcacagataaccacctggcccccagtgaggagtatgggctggtggtacggctcctcactggcattggaaggtacaacgagatgacatacatatttgatttgctgcataaaaagcactactttgaagtgctaatgaggaagaagttggatccgagtggtaccctgaaaacagccctgctggactacatcaaacgctgccgtcctggagacagtgaaaagcacaatatgattgccctgtgcttcagcatgtgccgggagattggcgagaaccacgaggcagctgcccgcatccaactgaaattgattgagtctcagccctgggaggacagcctcaaggatgggcaccagctgaaacaactgctgctgaaggccctgactctgatgttggatgcagcagagagttatgccaaggactcctgtgtgcgacaggcccagcactgtcagcggctcaccaagttgataactctgcagattcactttctgaacactggccagaacacaatgctcatcaacttgggccgccacaagctgatggactgtattctggccctacctcggttctaccaggcttctattgtggctgaggcctacgattttgttccagattgggctgaaattttataccagcaagtgattcttaaaggagactttaattacttggaagaatttaagcagcaaaggttattaaagtccagtatatttgaagagatttccaaaaaatataaacaacatcagcctactgacatggtcatggaaaacctgaagaaattactcacatattgtgaagatgtttacctgtattacaagttggcatacgaacacaagttttatgaaattgtaaatgtgcttctgaaggaccctcagacaggttgctgtctaaaggacatgctagcaggttagatgatttcataggtgtctgttttcttgtactgttagcagattctgacagatgtgatgagaagaagaatgcattggagatctttgctaaagttgaacaatcccggtactgtaccatatcagtcctttgtgggtagtaggtagcaagtaagaaacttttcaggaggaaattcctatttaaaatagattgattttagatgattgttcatccacaccattttatatagatactagtattaagatcaaaagcttcctcttcctcaggacagc

SEQ ID NO: 60890 - protein, 231 aa, Artificial Sequence
  derived and/or modified sequence
MAESLRSPRRSLYKLVGSPPWKEAFRQRCLERMRNSRDRLLNRYRQAGSSGPGNSQNSFLVQEVMEEEWNALQSVENCPEDLAQLEELIDMAVLEEIQQELINQEQSIISEYEKSLQFDEKCLSIMLAEWEANPLICPVCTKYNLRITSGVVVCQCGLSIPSHSSELTEQKLRACLEGSINEHSAHCPHTPEFSVTGGTEEKSSLLMSCLVSVSWDPLCGKRDLWLVLFPP

SEQ ID NO: 60891 - DNA, 696 bp, Artificial Sequence
  derived and/or modified sequence
atggccgagagcctgagaagccccagaagaagcctgtacaagctggtgggcagccccccctggaaggaggccttcagacagagatgcctggagagaatgagaaacagcagagacagactgctgaacagatacagacaggccggcagcagcggccccggcaacagccagaacagcttcctggtgcaggaggtgatggaggaggagtggaacgccctgcagagcgtggagaactgccccgaggacctggcccagctggaggagctgatcgacatggccgtgctggaggagatccagcaggagctgatcaaccaggagcagagcatcatcagcgagtacgagaagagcctgcagttcgacgagaagtgcctgagcatcatgctggccgagtgggaggccaaccccctgatctgccccgtgtgcaccaagtacaacctgagaatcaccagcggcgtggtggtgtgccagtgcggcctgagcatccccagccacagcagcgagctgaccgagcagaagctgagagcctgcctggagggcagcatcaacgagcacagcgcccactgcccccacacccccgagttcagcgtgaccggcggcaccgaggagaagagcagcctgctgatgagctgcctggtgagcgtgagctgggaccccctgtgcggcaagagagacctgtggctggtgctgttccccccctag

SEQ ID NO: 60892 - DNA, 696 bp, Artificial Sequence
  derived and/or modified sequence
atggcagagtcactccggagtccaagaagatcactttataaactggtcggaagtcctccgtggaaagaagctttccgccaacgatgcctcgaaagaatgaggaattccagagaccggctgctaaatagatacaggcaggcaggctcctctggacctggaaactcacagaattcatttttagtccaggaggtgatggaggaggaatggaacgccctgcagagcgttgaaaattgcccagaagatttagcacaattggaggaactgattgacatggctgtgctggaggaaatccaacaggagttaattaatcaggagcagagcatcataagcgagtatgaaaaatccctgcagttcgatgaaaagtgtctcagcatcatgctcgcagaatgggaggccaacccgctgatctgtcctgtgtgcactaagtataacctgcggatcacgtctggtgtagttgtttgccagtgtggtctgtcaatccccagtcactcctcagagctgacagagcagaaactgcgcgcgtgcctggagggctctattaacgagcattccgctcattgcccacacacacctgagttcagcgtgacgggtggcaccgaggagaagtcttcactcctgatgagttgcttggtgtctgtgagctgggaccccttatgtggaaagagggatttgtggctggtcctttttccaccttag

SEQ ID NO: 60893 - DNA, 696 bp, Artificial Sequence
  derived and/or modified sequence
atggccgagagcctgcggagccccaggaggagcctgtacaagctggtgggcagccccccctggaaggaggccttccggcagcgctgcctggagaggatgaggaacagccgggaccggctgctgaaccgctaccggcaggccggcagcagcggccctggcaacagccagaacagcttcctggtgcaggaggtgatggaggaggagtggaatgccctgcagagcgtggagaactgcccagaggacctggcccagctggaggagctgattgacatggctgtgctggaggagatccagcaggagctgatcaaccaggagcagagcatcatcagtgaatatgagaagagcctgcagtttgatgagaagtgcctgagcatcatgctggccgagtgggaggccaaccccctcatctgccctgtgtgcaccaagtacaacctgcgcatcaccagcggcgtggtggtgtgccagtgtggcctgagcatccccagccacagcagcgagctgacagagcagaagctgcgggcctgcctggagggcagcatcaatgagcacagcgcccactgcccccacaccccagagttctctgtgactggaggaacagaggagaagagcagcctgctgatgagctgcctggtgtctgtgtcctgggaccccctgtgtgggaagagggacctgtggctggtgctcttccccccatag

SEQ ID NO: 60894 - DNA, 696 bp, Artificial Sequence
  derived and/or modified sequence
atggccgagagcctgcggagcccccggcggagcctgtacaagctggtgggctctcccccttggaaggaggctttcagacagaggtgcctggaacgcatgcgcaattctcgcgatagattgctgaaccgatacagacaggccgggagctctgggcccggtaatagtcagaattccttcctggtccaagaggtgatggaggaggaatggaacgcactacagtcggtggagaactgtcccgaagacctcgctcaactcgaagagttaatcgatatggccgtgcttgaggagattcagcaggagttgataaatcaagagcaaagcattatctccgaatatgagaagagcctgcagtttgacgagaaatgtctgagtataatgcttgcggaatgggaggccaacccgctcatttgtcctgtgtgtaccaagtacaacctgaggattacctcaggtgtggtcgtgtgccagtgcggactgtctatcccgtctcactccagcgagctcacagaacaaaaactgcgggcctgtctggagggttcaattaatgaacatagtgcgcattgtcctcacacccctgagttctcagtcaccgggggcacagaagagaagtcttctctgctgatgagttgtctggtgtctgtatcctgggatccgctttgcggtaaacgcgatctgtggttagtgctttttccaccctag

SEQ ID NO: 60895 - DNA, 696 bp, Artificial Sequence
  derived and/or modified sequence
atggccgaaagcctgcgctcaccgcgtcgctcactatacaagttggtcggtagtccaccctggaaggaggcctttcggcagcgatgcttggaaaggatgagaaacagtcgcgatagattattgaaccgatataggcaggccggttcgagcgggccaggcaactcccagaattccttccttgtgcaggaagtaatggaggaggaatggaacgccctgcagagcgtggaaaattgtccagaagacttggcccagctggaggagcttatagatatggccgtgctggaggaaatacagcaggaactaatcaaccaggagcaaagcattatcagcgaatacgagaaatcccttcaatttgatgagaaatgtttatccattatgctggcagagtgggaagccaaccctctgatatgcccagtgtgcactaaatacaacttgcggattacaagcggcgtggtcgtctgccagtgcgggttatctatccctagccactcttccgagctaaccgagcagaagctgagagcttgcttggaaggttcaattaacgagcacagcgcccactgtccccacacccccgagttctcagtaactggaggcaccgaagaaaagtcatctctgctgatgagctgcctggtttcggttagctgggacccgttatgtggaaaacgagacctgtggttagttctcttcccaccgtag

SEQ ID NO: 60896 - DNA, 2654 bp, Artificial Sequence
  derived and/or modified sequence
cggccgccatcttggcccaactgctcccctcactccagttgctcagcccgccgctgagcacagccaatccgcggccgtccactcactgtttcggccaatcaccgagcagacggcccggaagctcgagaggctcgtgccaggtcggggggcgaaggcgaggccagcccaccaagcaggggcgtcaccaagggaaagccaatcaccattatttctgaagcccaagggggcgggacgagaagtcaacataatggtggtgctgctggaaatctagcacctggggagagcctgagacttgtgtatctaattgcctattggacacctccatctgggtaaacccaggcatccagaactttccctcaagacttacctccctcagtgcaggtcgggctggcctcacgcatttcgcttggatgcctaaatctgtctccacgtggggccggtcgataaaacaacacttcccagaatacgctgcgatccattcgcggtctgcacccggaaagtacacctcccaggggtctgtgcgcgcctccagggaacgggtcttgtggctttgtctcccgcgaagaggagatggcggagtcgttgaggtctccgcgccgctccctgtacaaactggtgggctcgccgccttggaaagaggctttccggcagagatgcctggagagaatgagaaacagccgggacaggctcctaaacaggtaccgccaggctggaagcagtgggccagggaattctcagaacagctttctagttcaagaggtgatggaagaagagtggaatgctttgcagtcagtggagaattgtccagaagacttggctcagctggaggagctgatagacatggctgtgctggaggaaattcaacaggagctgatcaaccaagagcagtccatcatcagcgagtatgagaagagcttgcagtttgatgaaaagtgtctcagcatcatgctggctgagtgggaggcaaacccactcatctgtcctgtatgtacaaagtacaacctgagaatcacaagcggtgtggtggtgtgtcagtgtggcctgtccatcccatctcattcttctgagttgacagagcagaagcttcgtgcctgtttagagggtagtataaatgagcacagtgcacattgtccccacacacctgaattttcagtcactggaggaacagaagaaaagtccagtcttctcatgagctgtctggtaagcgtctcctgggacccactctgtggtaagagggacctgtggttggttttattcccaccttgatagaaataatgacctataaacaggtaaatgtttaatgcagtttattatctgaggaatttacctgcatagaaaagtgaaggtaacaagtcatttagactcaaaggccagtcagaaagaagggaagaggcagcatgggatcacggcaagaggattggtctgggagttaggacgcctggctccacacctgctcttctttgatcagtagtagtggttttggattcagctggtcatttcatagtcataagacccagataggccatgctggcaccacttttgcggaaggaaacagggcagaagcatagcagggcagcattaggtttgtctgtcagtggagtttttacagaggtccaagggctattcgctaacctgagtgacaactgaggtgtgagggccaggaacacaagtgggtaagggaaccacctgtcttagaagcgtgctataggaaccaatatctcttataatccatgtcctttccatatatgtgtatgtatgtatgtacatgtgtatatatatcacacaaacacacataaaaccaatatgatacgtattattattgcttttagatcccaggcagggggagccttgggattaggagcacactgtacttcaggaagttcatagccatggctttctactgggaatttagaattccttcatggccctgtcattccaaatgcagttaacctacagaggtcatttttattataagcagcattgcctggtaacagccatttcacctttatcaagtttcttccataggtattctactcattcattaaaaaaaaaatgaattgaggactcattaacattgagaaatacacatctctcacagagctcaagccttgggttggtaataagagaacagaataaacaggcagtaccctggagagctgtacaaggagggcttatgggagttcagaggagggtgatctcctttatggtgacaccttcctggaggaggcatttaacttggccttgaagcatggaatcgatctggacagacatggagatctggtgagttgtgggggtagagcttaagtggaagatccccacatagaagaacaaggcagagaagcaggaaactggagtatatacaaagagcatcttgttctacttagctggagcattaggttcatgagggagaggatagttcctgttaggaataggaaacagattcagagaagtgatgtaatctggccaaaattttactactaataagcgatagagctggtgttagaccccaggtctttgtggttccagtgcccctgctgtttcctgctccaggctcaggccttggtggaaggatgccattttccatcagcttgtatggaaagagacatagcaggtgaaagtttaaataaaacccctcactacttcctgttgactac

SEQ ID NO: 60897 - protein, 172 aa, Artificial Sequence
  derived and/or modified sequence
MAESLRSPRRSLYKLVGSPPWKEAFRQRCLERMRNSRDRLLNRYRQAGSSGPGNSQNSFLVQEVMEEEWNALQSVENCPEDLAQLEELIDMAVLEEIQQELINQEQSIISEYEKSLQFDEKCLSIMLAEWEANPLICPVCTKYNLRITSGVVVCQCGLSIPSHACDTWAVIL

SEQ ID NO: 60898 - DNA, 519 bp, Artificial Sequence
  derived and/or modified sequence
atggccgagagcctgagaagccccagaagaagcctgtacaagctggtgggcagccccccctggaaggaggccttcagacagagatgcctggagagaatgagaaacagcagagacagactgctgaacagatacagacaggccggcagcagcggccccggcaacagccagaacagcttcctggtgcaggaggtgatggaggaggagtggaacgccctgcagagcgtggagaactgccccgaggacctggcccagctggaggagctgatcgacatggccgtgctggaggagatccagcaggagctgatcaaccaggagcagagcatcatcagcgagtacgagaagagcctgcagttcgacgagaagtgcctgagcatcatgctggccgagtgggaggccaaccccctgatctgccccgtgtgcaccaagtacaacctgagaatcaccagcggcgtggtggtgtgccagtgcggcctgagcatccccagccacgcctgcgacacctgggccgtgatcctgtag

SEQ ID NO: 60899 - DNA, 519 bp, Artificial Sequence
  derived and/or modified sequence
atggcagagtctctcaggtccccaaggagaagcctctacaaactggtcggctcacctccatggaaggaagcctttaggcagcgctgcctggagcggatgcgcaactctcgtgatcgcctcttgaatcgctatcgccaagccggctcctctggacccgggaactcgcaaaactcctttctggtccaggaggtgatggaagaggaatggaacgcgctgcaatctgttgaaaactgcccagaggatctcgctcaattggaggaactgatcgacatggcagttttagaggaaatccagcaggagctgataaaccaggagcaaagcattatttccgaatacgaaaaatctctgcagtttgatgaaaagtgcctgagtataatgctggctgaatgggaagctaatccattaatttgcccggtgtgtacaaagtataacctccggataacttctggtgtcgtggtgtgtcagtgcggcttgagtatcccttcacatgcatgtgatacgtgggcggtgattctatag

SEQ ID NO: 60900 - DNA, 519 bp, Artificial Sequence
  derived and/or modified sequence
atggccgagagcctgcggagccccaggaggagcctgtacaagctggtgggcagccccccctggaaggaggccttccggcagcgctgcctggagaggatgaggaacagccgggaccggctgctgaaccgctaccggcaggccggcagcagcggccctggcaacagccagaacagcttcctggtgcaggaggtgatggaggaggagtggaatgccctgcagagcgtggagaactgcccagaggacctggcccagctggaggagctgattgacatggctgtgctggaggagatccagcaggagctgatcaaccaggagcagagcatcatcagtgaatatgagaagagcctgcagtttgatgagaagtgcctgagcatcatgctggccgagtgggaggccaaccccctcatctgccctgtgtgcaccaagtacaacctgcgcatcaccagcggcgtggtggtgtgccagtgtggcctgagcatccccagccacgcctgtgacacctgggccgtcatcctgtag

SEQ ID NO: 60901 - DNA, 519 bp, Artificial Sequence
  derived and/or modified sequence
atggccgagagcctgcggagcccccggcggagcctgtacaagctggtcggttcaccgccttggaaagaggcattcaggcagcgatgccttgagcgcatgcgaaacagccgggacaggctgctcaatcggtaccgtcaggccggcagtagcggacctggtaacagtcagaactcttttctcgtgcaggaggtaatggaggaagagtggaatgcacttcagagtgtcgaaaattgtcctgaagacctggcccagcttgaggagctgatcgatatggcagttctggaagaaatacagcaggaactgataaaccaagaacagagcattatttctgagtatgagaaatcacttcagttcgacgaaaaatgcctctccatcatgttggccgagtgggaggctaaccctctgatttgcccagtgtgtaccaagtacaaccttaggatcacttccggagttgtcgtctgccagtgcgggttaagcatcccttcccacgcttgtgacacctgggcggtgatactgtag

SEQ ID NO: 60902 - DNA, 519 bp, Artificial Sequence
  derived and/or modified sequence
atggcggaaagccttaggtcccctcggaggtcgttgtataaactcgtcggctctccaccatggaaggaagctttcagacagaggtgtcttgagagaatgagaaacagtagggatcggctactaaacagatacaggcaggctggatcatccggaccgggaaacagccagaatagctttcttgtccaggaggtcatggaagaggaatggaacgcgctgcagagtgtggaaaactgtccggaagatctggcacagctcgaagaactaatcgatatggcagtactggaggagatccagcaggagttgatcaaccaagaacagtcaattattagtgaatatgagaagtctctgcagttcgatgagaaatgcctcagcatcatgctcgccgagtgggaagctaaccctctgatttgcccagtctgtaccaaatacaatctcagaattacgtccggggtcgtcgtatgtcagtgcggtttgagtatcccatcacatgcctgtgatacctgggctgtgatcctctag

SEQ ID NO: 60903 - DNA, 1538 bp, Artificial Sequence
  derived and/or modified sequence
cggccgccatcttggcccaactgctcccctcactccagttgctcagcccgccgctgagcacagccaatccgcggccgtccactcactgtttcggccaatcaccgagcagacggcccggaagctcgagaggctcgtgccaggtcggggggcgaaggcgaggccagcccaccaagcaggggcgtcaccaagggaaagccaatcaccattatttctgaagcccaagggggcgggacgagaagtcaacataatggtggtgctgctggaaatctagcacctggggagagcctgagacttgtgtatctaattgcctattggacacctccatctgggtaaacccaggcatccagaactttccctcaagacttacctccctcagtgcaggtcgggctggcctcacgcatttcgcttggatgcctaaatctgtctccacgtggggccggtcgataaaacaacacttcccagaatacgctgcgatccattcgcggtctgcacccggaaagtacacctcccaggggtctgtgcgcgcctccagggaacgggtcttgtggctttgtctcccgcgaagaggagatggcggagtcgttgaggtctccgcgccgctccctgtacaaactggtgggctcgccgccttggaaagaggctttccggcagagatgcctggagagaatgagaaacagccgggacaggctcctaaacaggtaccgccaggctggaagcagtgggccagggaattctcagaacagctttctagttcaagaggtgatggaagaagagtggaatgctttgcagtcagtggagaattgtccagaagacttggctcagctggaggagctgatagacatggctgtgctggaggaaattcaacaggagctgatcaaccaagagcagtccatcatcagcgagtatgagaagagcttgcagtttgatgaaaagtgtctcagcatcatgctggctgagtgggaggcaaacccactcatctgtcctgtatgtacaaagtacaacctgagaatcacaagcggtgtggtggtgtgtcagtgtggcctgtccatcccatctcatgcctgtgatacttgggctgtgatcctctagagccagcttggactcacatcattctatggggttgaagacaactcattccctctgaggagccttgtacatacaagccttttatttataacttattttgtattgaaacttttaaacaatactgaagaaaaaaaaacttttccgacatctgttcttggtcttttgtgacgcaggttgaagggggaggaatagaaaaagacaaactgccttggaggagataaaccaattttatgtctatcatgttatacaaaaatctagaaataatagatttgtacagaaaaaaatgataataaatgagaacacaaaacatataatttaaatttggtattttttcccccatgatattaggatgataatcatttcaaagcacatgtctagcttcagagtaggatttgttcactggccaaagcctgccatgaaactatggctttcagcatctgtctgctctactg

SEQ ID NO: 60904 - protein, 106 aa, Artificial Sequence
  derived and/or modified sequence
MAESLRSPRRSLYKLVGSPPWKEAFRQRCLERMRNSRDRLLNRYRQAGSSGPGNSQNSFLVQEVMEEEWNALQSVENCPEDLAQLEELIDMAVLEEIQQELINQGL

SEQ ID NO: 60905 - DNA, 321 bp, Artificial Sequence
  derived and/or modified sequence
atggccgagagcctgagaagccccagaagaagcctgtacaagctggtgggcagccccccctggaaggaggccttcagacagagatgcctggagagaatgagaaacagcagagacagactgctgaacagatacagacaggccggcagcagcggccccggcaacagccagaacagcttcctggtgcaggaggtgatggaggaggagtggaacgccctgcagagcgtggagaactgccccgaggacctggcccagctggaggagctgatcgacatggccgtgctggaggagatccagcaggagctgatcaaccagggcctgtag

SEQ ID NO: 60906 - DNA, 321 bp, Artificial Sequence
  derived and/or modified sequence
atggccgagagcctgagaagccccagaagaagcctgtacaagctggtgggcagccccccctggaaggaggccttcagacagagatgcctggagagaatgagaaacagcagagacagactgctgaacagatacagacaggccggcagcagcggccccggcaacagccagaacagcttcctggtgcaggaggtgatggaggaggagtggaacgccctgcagagcgtggagaactgccccgaggacctggcccagctggaggagctgatcgacatggccgtgctggaggagatccagcaggagctgatcaaccaggtgttctag

SEQ ID NO: 60907 - DNA, 321 bp, Artificial Sequence
  derived and/or modified sequence
atggcagagagtctccggagcccgcgcagatcactgtacaagcttgtgggatcacctccctggaaagaagcctttcgccagcggtgcctggagagaatgagaaactcacgcgaccggctcctaaacagataccgtcaggctgggtcttccgggccaggtaattcccaaaattcttttctagtccaagaggtcatggaagaagaatggaacgcccttcagagtgtcgaaaactgcccagaagatctggcgcaactcgaagaactgatcgacatggccgtgcttgaggagattcagcaagaactcataaaccagggcctgtag

SEQ ID NO: 60908 - DNA, 321 bp, Artificial Sequence
  derived and/or modified sequence
atggctgagagcctacgctctccacgacgatcattgtataagctggtgggctctcctccatggaaagaggctttccgccagcggtgcctcgaaaggatgcgcaacagtagggaccgcttattaaaccgataccggcaggctggcagtagtggcccaggaaacagccagaactcttttttagtccaggaagtgatggaggaggaatggaacgccctccagagcgttgaaaactgcccggaagaccttgcacaactggaggaactaattgacatggctgtgcttgaagagattcagcaggaactgataaatcaggtattttag

SEQ ID NO: 60909 - DNA, 321 bp, Artificial Sequence
  derived and/or modified sequence
atggccgagagcctgcggagccccaggaggagcctgtacaagctggtgggcagccccccctggaaggaggccttccggcagcgctgcctggagaggatgaggaacagccgggaccggctgctgaaccgctaccggcaggccggcagcagcggccctggcaacagccagaacagcttcctggtgcaggaggtgatggaggaggagtggaatgccctgcagagcgtggagaactgcccagaggacctggcccagctggaggagctgattgacatggctgtgctggaggagatccagcaggagctgatcaaccagggcctgtag

SEQ ID NO: 60910 - DNA, 321 bp, Artificial Sequence
  derived and/or modified sequence
atggccgagagcctgcggagccccaggaggagcctgtacaagctggtgggcagccccccctggaaggaggccttccggcagcgctgcctggagaggatgaggaacagccgggaccggctgctgaaccgctaccggcaggccggcagcagcggccctggcaacagccagaacagcttcctggtgcaggaggtgatggaggaggagtggaatgccctgcagagcgtggagaactgcccagaggacctggcccagctggaggagctgattgacatggctgtgctggaggagatccagcaggagctgatcaaccaggtgttctag

SEQ ID NO: 60911 - DNA, 321 bp, Artificial Sequence
  derived and/or modified sequence
atggccgagagcctgcggagcccccggcggagcctgtacaagctggtcggtagtcccccgtggaaggaagctttccggcagcggtgtcttgagagaatgcggaactcgcgcgatagactccttaatcgctatcgacaggccgggtcatctgggcctggcaattcacaaaacagctttcttgtccaggaagtgatggaggaggagtggaacgctctgcaaagtgtggagaactgccccgaggatctagcccagctggaggaactcatcgacatggctgtgctcgaggagatacagcaggagctgatcaaccaggggctgtag

SEQ ID NO: 60912 - DNA, 321 bp, Artificial Sequence
  derived and/or modified sequence
atggccgagagcctgcggagcccccggcggagcctgtacaagctggttgggtctcccccctggaaggaagcatttcgtcagagatgtcttgagcgcatgagaaactctcgcgatcggctcctaaacaggtatcgacaggctggctcttcaggccctgggaattcccagaactcgttcctcgtccaggaggtgatggaggaagagtggaacgccctgcagtcagtggagaattgccctgaagacctcgcccagttagaagaactcattgacatggccgtactggaagagattcagcaggaactgataaaccaggtcttctag

SEQ ID NO: 60913 - DNA, 321 bp, Artificial Sequence
  derived and/or modified sequence
atggccgagtctctgaggagtccgaggaggagtttgtataagctagtgggatctcccccttggaaggaggccttcaggcagagatgcttggagcgcatgcggaacagcagggatcggctgctgaatagataccggcaggccggtagctcaggccctgggaatagtcagaactcatttttggtgcaggaggtcatggaggaggaatggaacgctctgcagagcgtcgaaaattgtccagaggacctggcccagctcgaggaattgattgacatggccgttttggaagaaatccagcaagagttaattaaccaaggattgtag

SEQ ID NO: 60914 - DNA, 321 bp, Artificial Sequence
  derived and/or modified sequence
atggccgaatcccttcggagccccaggcgctcgctctacaaacttgtgggtagtccgccttggaaagaggcattccggcagaggtgcttagagaggatgagaaacagccgcgataggttgttgaataggtaccgacaggccggaagctctggccctggcaatagccagaacagtttcctggtgcaggaggtcatggaggaagaatggaacgccctacagtctgtagagaattgcccggaagatttggcacaacttgaagaactgattgacatggccgtgctagaagaaattcagcaagagctgatcaatcaggtcttttag

SEQ ID NO: 60915 - DNA, 1362 bp, Artificial Sequence
  derived and/or modified sequence
cggccgccatcttggcccaactgctcccctcactccagttgctcagcccgccgctgagcacagccaatccgcggccgtccactcactgtttcggccaatcaccgagcagacggcccggaagctcgagaggctcgtgccaggtcggggggcgaaggcgaggccagcccaccaagcaggggcgtcaccaagggaaagccaatcaccattatttctgaagcccaagggggcgggacgagaagtcaacataatggtggtgctgctggaaatctagcacctggggagagcctgagacttgtgtatctaattgcctattggacacctccatctgggtaaacccaggcatccagaactttccctcaagacttacctccctcagtgcaggtcgggctggcctcacgcatttcgcttggatgcctaaatctgtctccacgtggggccggtcgataaaacaacacttcccagaatacgctgcgatccattcgcggtctgcacccggaaagtacacctcccaggggtctgtgcgcgcctccagggaacgggtcttgtggctttgtctcccgcgaagaggagatggcggagtcgttgaggtctccgcgccgctccctgtacaaactggtgggctcgccgccttggaaagaggctttccggcagagatgcctggagagaatgagaaacagccgggacaggctcctaaacaggtaccgccaggctggaagcagtgggccagggaattctcagaacagctttctagttcaagaggtgatggaagaagagtggaatgctttgcagtcagtggagaattgtccagaagacttggctcagctggaggagctgatagacatggctgtgctggaggaaattcaacaggagctgatcaaccaaggcctgtgatacttgggctgtgatcctctagagccagcttggactcacatcattctatggggttgaagacaactcattccctctgaggagccttgtacatacaagccttttatttataacttattttgtattgaaacttttaaacaatactgaagaaaaaaaaacttttccgacatctgttcttggtcttttgtgacgcaggttgaagggggaggaatagaaaaagacaaactgccttggaggagataaaccaattttatgtctatcatgttatacaaaaatctagaaataatagatttgtacagaaaaaaatgataataaatgagaacacaaaacatataatttaaatttggtattttttcccccatgatattaggatgataatcatttcaaagcacatgtctagcttcagagtaggatttgttcactggccaaagcctgccatgaaactatggctttcagcatctgtctgctctactg

SEQ ID NO: 60916 - DNA, 2478 bp, Artificial Sequence
  derived and/or modified sequence
cggccgccatcttggcccaactgctcccctcactccagttgctcagcccgccgctgagcacagccaatccgcggccgtccactcactgtttcggccaatcaccgagcagacggcccggaagctcgagaggctcgtgccaggtcggggggcgaaggcgaggccagcccaccaagcaggggcgtcaccaagggaaagccaatcaccattatttctgaagcccaagggggcgggacgagaagtcaacataatggtggtgctgctggaaatctagcacctggggagagcctgagacttgtgtatctaattgcctattggacacctccatctgggtaaacccaggcatccagaactttccctcaagacttacctccctcagtgcaggtcgggctggcctcacgcatttcgcttggatgcctaaatctgtctccacgtggggccggtcgataaaacaacacttcccagaatacgctgcgatccattcgcggtctgcacccggaaagtacacctcccaggggtctgtgcgcgcctccagggaacgggtcttgtggctttgtctcccgcgaagaggagatggcggagtcgttgaggtctccgcgccgctccctgtacaaactggtgggctcgccgccttggaaagaggctttccggcagagatgcctggagagaatgagaaacagccgggacaggctcctaaacaggtaccgccaggctggaagcagtgggccagggaattctcagaacagctttctagttcaagaggtgatggaagaagagtggaatgctttgcagtcagtggagaattgtccagaagacttggctcagctggaggagctgatagacatggctgtgctggaggaaattcaacaggagctgatcaaccaagtcttctgagttgacagagcagaagcttcgtgcctgtttagagggtagtataaatgagcacagtgcacattgtccccacacacctgaattttcagtcactggaggaacagaagaaaagtccagtcttctcatgagctgtctggtaagcgtctcctgggacccactctgtggtaagagggacctgtggttggttttattcccaccttgatagaaataatgacctataaacaggtaaatgtttaatgcagtttattatctgaggaatttacctgcatagaaaagtgaaggtaacaagtcatttagactcaaaggccagtcagaaagaagggaagaggcagcatgggatcacggcaagaggattggtctgggagttaggacgcctggctccacacctgctcttctttgatcagtagtagtggttttggattcagctggtcatttcatagtcataagacccagataggccatgctggcaccacttttgcggaaggaaacagggcagaagcatagcagggcagcattaggtttgtctgtcagtggagtttttacagaggtccaagggctattcgctaacctgagtgacaactgaggtgtgagggccaggaacacaagtgggtaagggaaccacctgtcttagaagcgtgctataggaaccaatatctcttataatccatgtcctttccatatatgtgtatgtatgtatgtacatgtgtatatatatcacacaaacacacataaaaccaatatgatacgtattattattgcttttagatcccaggcagggggagccttgggattaggagcacactgtacttcaggaagttcatagccatggctttctactgggaatttagaattccttcatggccctgtcattccaaatgcagttaacctacagaggtcatttttattataagcagcattgcctggtaacagccatttcacctttatcaagtttcttccataggtattctactcattcattaaaaaaaaaatgaattgaggactcattaacattgagaaatacacatctctcacagagctcaagccttgggttggtaataagagaacagaataaacaggcagtaccctggagagctgtacaaggagggcttatgggagttcagaggagggtgatctcctttatggtgacaccttcctggaggaggcatttaacttggccttgaagcatggaatcgatctggacagacatggagatctggtgagttgtgggggtagagcttaagtggaagatccccacatagaagaacaaggcagagaagcaggaaactggagtatatacaaagagcatcttgttctacttagctggagcattaggttcatgagggagaggatagttcctgttaggaataggaaacagattcagagaagtgatgtaatctggccaaaattttactactaataagcgatagagctggtgttagaccccaggtctttgtggttccagtgcccctgctgtttcctgctccaggctcaggccttggtggaaggatgccattttccatcagcttgtatggaaagagacatagcaggtgaaagtttaaataaaacccctcactacttcctgttgactac

SEQ ID NO: 60917 - protein, 472 aa, Artificial Sequence
  derived and/or modified sequence
MKSILDGLADTTFRTITTDLLYVGSNDIQYEDIKGDMASKLGYFPQKFPLTSFRGSPFQEKMTAGDNPQLVPADQVNITEFYNKSLSSFKENEENIQCGENFMDIECFMVLNPSQQLAIAVLSLTLGTFTVLENLLVLCVILHSRSLRCRPSYHFIGSLAVADLLGSVIFVYSFIDFHVFHRKDSRNVFLFKLGGVTASFTASVGSLFLTAIDRYISIHRPLAYKRIVTRPKAVVAFCLMWTIAIVIAVLPLLGWNCEKLQSVCSDIFPHIDETYLMFWIGVTSVLLLFIVYAYMYILWKAHSHAVRMIQRGTQKSIIIHTSEDGKVQVTRPDQARMDIRLAKTLVLILVVLIICWGPLLAIMVYDVFGKMNKLIKTVFAFCSMLCLLNSTVNPIIYALRSKDLRHAFRSMFPSCEGTAQPLDNSMGDSDCLHKHANNAASVHRAAESCIKSTVKIAKVTMSVSTDTSAEAL

SEQ ID NO: 60918 - protein, 78 aa, Artificial Sequence
  derived and/or modified sequence
MKSILDGLADTTFRTITTDLLYVGSNDIQYEDIKGDMASKLGYFPQKFPLTSFRGSPFQEKMTAGDNPQLVPADQVNI

SEQ ID NO: 60919 - DNA, 1419 bp, Artificial Sequence
  derived and/or modified sequence
atgaagtctatcctcgatggcctggccgatactacctttaggactataacaaccgacttgctgtacgtcggatctaatgatatccaatatgaagacatcaagggggatatggcaagcaaactaggatacttcccccagaaatttccactgacatcctttagaggatctccgttccaggaaaagatgactgctggcgataaccctcagctcgtgcctgctgaccaggtgaatatcaccgaattttataataagagcctgtcctcttttaaagagaacgaagagaatattcaatgcggggagaattttatggacattgagtgcttcatggtgctaaacccctcacaacagctcgctatcgccgtgctaagtctgacactgggtacattcacagtgctggagaacctgctggtgttgtgcgtgatccttcactctcgaagtctgcggtgccgaccgtcttatcacttcatcggctccttggcggttgcggatttattggggtcggtaatttttgtctattcctttatcgatttccatgtcttccaccgcaaggactcccggaatgtgttcctcttcaaactgggaggcgtgaccgcctctttcacagcctcagtaggcagcctttttcttacggctatcgaccgctatatttcaatccaccggccgcttgcctataagaggatcgtgacccggccaaaagctgtggtagcattttgcctcatgtggaccattgctatcgtgattgccgtcttacccctgctggggtggaattgcgaaaaactacagtcagtctgctcagacatctttcctcacattgatgagacatacctgatgttctggattggcgtgacctctgtgttgctactgtttattgtttacgcttatatgtatatcttgtggaaggctcacagccatgcagtgaggatgattcagcgtggaacccagaagtccatcatcattcatacgagcgaagatggaaaggtccaggtgactaggccggaccaggcaaggatggatatccgactcgccaaaacactagtactgattctggtcgtgctaatcatatgttggggaccactgctggcgatcatggtctatgatgtgtttggtaaaatgaataagttgatcaagaccgtctttgccttctgtagcatgctgtgcctgctgaacagcacagtcaatcccatcatctatgcccttaggtcaaaagacctgagacacgcatttcgctctatgtttccatcatgcgaagggactgctcagccgcttgacaattctatgggcgactccgattgtctgcacaagcatgctaataatgccgcatctgtgcatagggctgcggagagctgcatcaagagcaccgtcaagatcgcaaaggtgaccatgtccgttagcaccgacacctccgctgaagctctgtag

SEQ ID NO: 60920 - DNA, 1419 bp, Artificial Sequence
  derived and/or modified sequence
atgaaatcaattctggacggccttgctgatacaacttttcgcacaattaccaccgacctgttgtacgtgggcagtaacgatattcaatacgaggatatcaaaggcgatatggctagcaagctgggctatttccctcaaaagtttcctctgacctcctttcgcggatcaccatttcaagaaaagatgactgctggtgacaacccacagctggtgccagctgaccaagtgaatatcacggaattctataataagtcgctgtctagtttcaaggagaatgaggaaaacattcagtgtggagagaactttatggatattgaatgctttatggttctgaaccccagccagcagctagccatcgctgtcctgtctcttacgctggggacctttactgtactggagaatctcttggtcctctgtgtgatcctccattcacgctcactccggtgcagaccttcataccactttattgggagcctggctgtggctgacttattgggaagcgtaatcttcgtgtactcatttatagattttcacgtgtttcacaggaaagactccagaaatgtgtttctgttcaaactgggtggtgttacggcgtcattcaccgcaagtgtgggtagcctgtttctcacggccatcgaccgctatatctctatacacaggcccctcgcatataaacggatagttaccagaccaaaggccgttgtagcgttttgcctgatgtggacaatcgcaatagtgattgcggtgctgcctttgctcggctggaactgcgagaagctccaatccgtgtgtagcgatatcttcccccatatagatgagacttacctcatgttttggataggcgtgaccagtgtgcttctcttatttattgtctacgcttacatgtacatactatggaaggctcattcccatgccgtgagaatgatccaacggggaacacaaaagtcaatcatcattcacacctctgaggatggcaaagtgcaagtcacccggcctgaccaggccaggatggacatcaggctcgccaagacgctcgtgctgatcctcgttgtcctgattatttgttggggacctcttctggccatcatggtgtatgacgtcttcgggaaaatgaataaactgatcaagacggtgttcgccttttgctcaatgctgtgcctgttaaactcgacggtcaaccccatcatatatgccttgagatctaaagacctacgccacgcatttcggagcatgtttccctcttgtgaaggcaccgcccaacctctcgataattccatgggggactccgactgtctgcacaaacacgccaacaatgctgctagcgtgcatcgcgcggcagaatcatgcataaagagcaccgtcaagatcgcaaaggtgaccatgtcagtgagcaccgacacatctgcagaagctttatag

SEQ ID NO: 60921 - DNA, 1419 bp, Artificial Sequence
  derived and/or modified sequence
atgaagagcatccttgatggcctagcagacactactttcagaacaatcacaactgatcttctctacgttggttctaatgatattcagtacgaggacattaagggggacatggcctcaaagcttggctatttcccccaaaagttccccctgacgtctttccgcgggtctcctttccaggaaaagatgacagcaggggacaacccacaactcgtcccggcagaccaagttaatatcactgagttctacaataagagcctctcttcattcaaagagaacgaagaaaatattcagtgcggagagaactttatggacatagagtgtttcatggtcctcaatccttcacagcaattggctattgccgtgctttcattgactctgggtacgtttacagtgttagagaatttgctggtgctgtgtgttatactacactccagaagtttgcgatgtcgaccctcttatcactttattggctctctcgctgtggccgacttattgggcagtgttatttttgtatattcattcattgatttccacgtgttccacaggaaggattcccgaaacgtgtttctgtttaagctgggaggagtgacggcatccttcacagctagcgtgggctctttgttcctaaccgccatcgaccggtatattagcatacaccggcctctggcctataagaggatcgttacacggcccaaggcagttgtcgccttctgtttgatgtggaccatagcgattgtgattgccgtgctgcctcttctggggtggaattgcgaaaaactacagagcgtgtgcagcgatatcttcccccacatcgatgaaacttatctaatgttttggatcggcgtgacatccgtgttgctgctgttcattgtgtacgcgtacatgtatattttgtggaaggctcatagccacgctgtacggatgatccagcgcgggactcagaaatctatcatcattcatacttctgaagacgggaaagtgcaggttacgagacctgatcaggctcggatggatatacgcctggccaagactcttgtcttgattcttgttgtgctgatcatctgctggggacccctgttggctatcatggtctacgatgtgttcgggaagatgaacaagctcattaagaccgtttttgcattctgtagtatgctatgcctgctgaattcaacagtcaatccaattatctacgctctacgaagcaaggatctgaggcacgccttccgatctatgtttcccagctgcgagggcacggcacagcccctcgacaacagtatgggtgactcagattgcctgcataaacacgcaaataatgccgcaagcgtgcatagagcagccgagtcatgcattaagtccaccgtcaagatcgctaaagtcactatgagcgtgagcacagacacatcagcagaggcgttgtag

SEQ ID NO: 60922 - DNA, 1419 bp, Artificial Sequence
  derived and/or modified sequence
atgaagtccattctggatggcctcgctgacaccacgtttcggacaattactacggaccttctctatgtgggctccaacgatatccagtatgaggatattaagggcgacatggctagcaagctgggctactttcctcagaaattcccactgaccagttttcggggtagcccatttcaggagaagatgacggctggcgataatcctcaactagtaccagctgaccaagtgaatatcactgaattttacaataaatctcttagcagctttaaggagaatgaagaaaacatacagtgcggggaaaattttatggacattgagtgtttcatggttttgaacccttcacagcagcttgcaatcgcagtgttgagcctgaccctcggaactttcacagtgctggagaacttactagtgctatgcgttattctgcattcaaggtccctgcgctgcagaccctcctaccatttcattggcagcctggcagttgcagatctcctgggtagcgtaatttttgtgtactcttttatcgatttccatgtctttcacaggaaagattccaggaatgtattcctgtttaagctgggtggagtaaccgcttcttttaccgcttccgttggttctctatttctaactgccatagacagatacatatctatccaccgcccgctagcctacaagagaattgtcacacggcccaaggctgtcgtggcattttgtcttatgtggacgattgccattgtgatagccgtcctccctctgctgggctggaactgtgaaaagctccagtctgtctgctctgatatctttccacacatagacgagacttatctcatgttctggattggagtgacctccgtcctgctcttgtttattgtgtatgcttatatgtatattctgtggaaggctcactcacacgctgttaggatgattcagagaggcactcagaagtccatcattatacatactagcgaggacggaaaagtccaagtgactaggcctgatcaggcccgcatggacattcggctggcgaagacgctggtccttatcctggtagtattgataatctgctgggggccccttttggcgatcatggtctatgatgtgtttgggaaaatgaacaaactaatcaagacagtgtttgctttctgtagtatgctatgtctgcttaactccacagtcaatcccatcatttacgctctgcgcagcaaagatttgagacacgctttccgttcaatgttcccgtcgtgtgagggcacggcccagcctttagacaattcaatgggggacagtgactgtttgcataaacatgccaataacgcagcgtcagtgcatagagcggccgaatcctgtatcaagagcactgtgaagatcgctaaggtgacaatgtctgttagtaccgatacctcggctgaagccctgtag

SEQ ID NO: 60923 - DNA, 1419 bp, Artificial Sequence
  derived and/or modified sequence
atgaaatccatcttggatggccttgctgatacaaccttcaggaccatcacaaccgacctgctatatgtgggatctaacgatatccagtatgaagatattaagggggacatggcctctaaactaggatattttccccaaaaattcccgcttacctccttccgcgggagtccatttcaagaaaaaatgactgctggcgacaaccctcagctggtgccggctgatcaggtcaacatcacagagttttataataaaagcctgtccagctttaaggagaacgaggaaaacatccagtgcggcgagaacttcatggatatcgaatgcttcatggtgttgaacccatcacaacagctggcaatcgccgttctttcccttacgctgggcaccttcactgtgttggagaacttgctggtcctctgtgtgatcctgcacagtcgtagccttcgctgtcgaccttcctatcattttatcggcagcctagcagtagcagatctgctgggctccgtgatattcgtctactcatttatcgacttccatgtattccatcggaaggacagccgaaacgtgttcctctttaaactgggaggagtgactgcctctttcacagcaagcgtcggctcactctttctcaccgcgatagacagatatatcagcatccaccggcctctggcttacaagcgtattgtgaccagacccaaggctgtggtcgctttttgccttatgtggactatcgctattgtgattgccgtactaccactcctgggatggaattgtgagaagctgcaaagcgtttgcagtgatatatttccccatattgatgaaacttatctcatgttctggatcggagtgacctccgttctgctgctgttcatcgtttatgcctacatgtacattctctggaaggcccattcccacgccgtacggatgatccaacggggtacccagaagtccattattatccacactagcgaagatggaaaagtccaggtgacacgccctgaccaggcgcgaatggatatccgtctggcaaagactcttgtgcttatcctagtggtgcttattatttgttgggggcctttgttggccataatggtgtacgatgtcttcgggaagatgaataagctgatcaagacagtgttcgctttctgttcaatgctctgtctcctgaatagcacggtgaatcccataatttatgcgctcagaagcaaggatctgcggcacgcttttaggtcaatgtttccaagctgcgagggcaccgcccagccactcgataatagcatgggcgactccgactgcctccacaaacatgcaaataatgccgccagcgttcaccgagcagctgagagttgtattaagtcgactgtgaagattgcaaaggtcacaatgtctgtgagtacggacacctccgcagaagcgctgtag

SEQ ID NO: 60924 - DNA, 1419 bp, Artificial Sequence
  derived and/or modified sequence
atgaagagcatcctggacgggctcgcggatacaacctttagaactatcaccacagatcttctctatgtcggatcaaacgacattcaatacgaagacatcaagggtgacatggcaagcaaactgggctacttcccccagaaattcccgctcacctctttccgcgggtccccatttcaggagaaaatgaccgccggcgacaacccacagctggttcccgcagatcaggtgaatattactgagttttacaataaatccctcagttcctttaaagagaatgaggaaaatatccagtgcggtgaaaactttatggacattgaatgttttatggtgcttaatccatcacaacagctggctatagctgtgctttcactaaccctcggcactttcacggtgctggaaaacctcctagttctctgtgtcatcttacactcacggagtctgaggtgcagaccctcttaccattttattggctccctcgcagttgctgatctgctaggatctgtgatctttgtttactcattcatcgatttccacgtctttcatagaaaggactcacgaaacgtgtttctgttcaagctaggcggcgtgacggcttcgttcaccgcaagtgttggctcactcttcctgaccgcaatagaccggtatattagtatccacaggccccttgcatacaaacgcattgtgactcggccaaaggcggtggttgcattttgccttatgtggaccatagctattgttattgccgtattgcccttgttgggttggaattgtgagaagcttcaatccgtttgcagcgacatattcccgcacatcgacgaaacatatcttatgttctggatcggcgtcacctctgttcttttactatttattgtgtatgcatacatgtatattctgtggaaggcacatagtcacgccgtgcgaatgattcaacgaggtacccagaaatcaatcatcatacatacttcggaggacggaaaggttcaagtgactaggccagatcaagcgcggatggacatacgattggcgaaaacactggtgctcattttggtggtcctcataatatgttgggggccattactcgccatcatggtgtatgacgtcttcggtaagatgaacaaactgataaagactgtgttcgctttctgctccatgctgtgcctgctcaattccacagtgaatccgattatatacgccctgaggtcaaaggatctacgccacgcttttcgttctatgttcccttcttgtgaaggaacggcgcagcccctggacaattcaatgggcgattctgattgtctacataagcacgccaataatgcagcttcagtccatagagccgctgagagttgtatcaagtccacggtcaagattgccaaggtcaccatgagcgtaagcacggacacaagtgcagaggccttgtag

SEQ ID NO: 60925 - DNA, 237 bp, Artificial Sequence
  derived and/or modified sequence
atgaagtcgatcctcgatggactggctgacacaaccttccgtaccatcaccactgatctgctgtacgtgggcagcaacgacatccaatacgaggacattaagggcgatatggccagcaagctgggttactttcctcagaaatttcctttaacaagcttccggggaagtccttttcaggagaaaatgacagctggcgacaacccacagttagtcccagctgatcaggtgaacatctag

SEQ ID NO: 60926 - DNA, 1419 bp, Artificial Sequence
  derived and/or modified sequence
atgaagagcatcctggatggcctggccgacaccaccttccgcaccatcaccacagacctgctgtatgtgggcagcaatgacatccagtatgaggacatcaagggggacatggccagcaagctgggctacttcccccagaagttccccctgaccagcttccggggcagccccttccaggagaagatgacagctggggacaacccccagctggtgcctgctgaccaggtgaacatcacagagttctacaacaagagcctgagcagcttcaaggaaaatgaggagaacatccagtgtggggagaacttcatggacatcgagtgcttcatggtgctgaaccccagccagcagctggccatcgctgtgctgagcctgaccctgggcaccttcaccgtgctggagaacctgctggtgctgtgtgtgatcctgcacagccgcagcctgcgctgccggcccagctaccacttcatcggcagcctggccgtggccgacctgctgggcagcgtcatctttgtgtacagcttcatcgacttccacgtgttccacaggaaggacagcagaaatgtgttcctgttcaagctgggcggcgtgacagccagcttcaccgcctctgtgggcagcctcttcctgacagccatcgaccgctacatcagcatccaccggcccctggcctacaagagaattgtgacccggcccaaggctgtggtggccttctgcctgatgtggaccatcgccatcgtgattgctgtgctgcccctgctgggctggaactgtgagaagctgcagagcgtgtgcagcgacatcttcccccacattgatgagacctacctgatgttctggattggagtgacctctgtgctgctgctcttcatcgtgtatgcctacatgtacatcctgtggaaggcccacagccatgctgtgaggatgatccagaggggcacccagaagagcatcatcatccacaccagtgaagatggcaaggtgcaggtgaccaggccagaccaggccaggatggacatccggctggccaagaccctggtgctgatcctggtggtgctgatcatctgctggggccccctgctggccatcatggtgtatgatgtgtttgggaagatgaacaagctgatcaagacagtgtttgccttctgcagcatgctgtgcctgctgaacagcacagtgaaccccatcatctatgccctgcggagcaaggacctgcggcatgccttccgctccatgttccccagctgtgagggcacagcccagcccctggacaacagcatgggagacagcgactgcctgcacaagcacgccaacaatgctgcctctgtgcacagagctgctgagagctgcatcaagagcacagtgaagatcgccaaggtgaccatgtctgtgtccacagacaccagcgctgaggccctgtag

SEQ ID NO: 60927 - DNA, 237 bp, Artificial Sequence
  derived and/or modified sequence
atgaagagcatcctggatggcctggccgacaccaccttccgcaccatcaccacagacctgctgtatgtgggcagcaatgacatccagtatgaggacatcaagggggacatggccagcaagctgggctacttcccccagaagttccccctgaccagcttccggggcagccccttccaggagaagatgacagctggggacaacccccagctggtgcctgctgaccaggtgaacatctag

SEQ ID NO: 60928 - DNA, 1419 bp, Artificial Sequence
  derived and/or modified sequence
atgaagagcatcctggacggcctggccgacaccaccttccggaccattactactgatctgttgtatgttggtagtaacgacattcagtatgaagatataaagggagacatggcctctaagcttggctactttccacagaaattccccttaaccagttttcgcggaagccccttccaggagaagatgaccgccggcgacaaccctcagctggtgcccgcagaccaggtcaacatcaccgagttctataacaagagcctgtcatctttcaaggagaatgaggaaaacattcagtgcggagagaactttatggacatagagtgtttcatggtactaaatcccagccagcagctggccatcgccgtattgtcactcaccttgggaaccttcaccgtgctggaaaacttactagtgctctgtgtcatcctgcactccaggtctctgcgctgtagaccctcgtatcatttcatcggctcactggccgtagccgacctgcttggaagtgtgatttttgtatattccttcattgacttccatgtcttccacagaaaagactcacggaacgtgtttttgttcaaattagggggcgtcaccgcaagctttactgcaagtgtggggtctctgttccttactgctatcgaccggtatataagcatacaccgccctttggcctataagcgtatcgtgacccgacctaaagctgttgtggctttctgcctcatgtggactatcgccattgttatcgccgtattacccctcctgggatggaattgtgaaaagttgcagtctgtgtgctccgacatctttccccacatagatgaaacctacctcatgttctggattggtgttacaagtgtgctcctgctgttcatcgtctacgcctacatgtacatattatggaaggctcactctcacgccgtccggatgatccaaagaggtacacagaaatccatcattattcatacgagcgaagacggaaaggtacaagtcaccagaccggatcaggcccggatggatatccgcctcgccaagaccttggtgcttatattagtcgttctgattatctgctggggccccttgctggctatcatggtatacgatgtctttggaaagatgaataaactgattaagaccgtttttgccttctgctccatgctgtgcctgttgaactctacggtgaatccaataatctacgctttgcgctccaaggatctcaggcacgcgttcaggagtatgtttccttcatgcgagggaaccgcacaacctctcgataattcaatgggcgattccgactgtttgcataaacacgccaacaatgcggctagcgtgcaccgcgccgctgaaagctgtatcaagagcactgtgaagatcgccaaagtcaccatgtctgtttccaccgacacatccgcggaagctctttag

SEQ ID NO: 60929 - DNA, 1419 bp, Artificial Sequence
  derived and/or modified sequence
atgaagagcatcctggacggcctggccgacaccaccttccggaccattactaccgatctgctgtatgtgggcagcaacgatatccagtatgaggatattaagggagacatggcctccaaactggggtacttcccacaaaagttcccactgaccagcttccgaggcagtccatttcaggagaaaatgactgccggagataatcctcaactggtgccagcagatcaggtcaacatcaccgaattctacaacaagtcactgtctagttttaaggaaaacgaagagaatatccagtgtggtgagaatttcatggacatagaatgttttatggttctcaatccgagccagcagctggcaattgccgtactttcacttactctgggcacttttaccgtcctcgagaatctcctggtgctgtgcgtgattctccactcacggtccctgaggtgcagaccttcataccatttcattggcagcctggccgtagccgacctactcggtagtgtcatctttgtgtattcttttattgacttccatgtgttccacaggaaagactctagaaatgtgtttctgtttaaactggggggagttacagcctcgttcactgcctccgtgggaagcctcttcctgactgccattgataggtacatcagcatccacaggccccttgcgtataaaaggatcgtgactcgacctaaagccgtggtcgctttctgtcttatgtggacgatcgccatcgttattgccgtcctccctctgttggggtggaattgtgagaaattgcagtccgtttgctccgacatctttccccacatcgacgagacttacctcatgttctggataggcgtcacctctgtcctgcttttgttcattgtttatgcctatatgtatatcctatggaaggcacacagccacgccgttaggatgattcagcggggaacacagaagtccattattatacacacctccgaggatggaaaagtacaggtgactcgaccggatcaggctcggatggatatcagattggccaagactctcgtgctgatcttagtcgtgcttattatctgttggggccctctgcttgcaattatggtgtatgacgtcttcggcaaaatgaataagctcatcaaaacagtattcgctttctgttctatgctttgtctcctgaactccaccgtaaatccgatcatctacgccttacggagcaaagacctcagacatgcctttcgatctatgtttcccagttgcgaggggaccgctcaacctctggataacagtatgggcgattctgattgcttgcacaagcacgctaataatgctgccagcgtacaccgcgccgccgaatcatgtataaaatctacagtgaaaattgcaaaggtcactatgtctgtctcgactgatacctccgctgaagctttatag

SEQ ID NO: 60930 - DNA, 1419 bp, Artificial Sequence
  derived and/or modified sequence
atgaagagcatcctggacggcctggccgacaccaccttccggaccatcaccaccgatcttttatatgtggggtccaatgacatccagtatgaagatatcaaaggcgacatggcaagcaaattggggtacttcccgcagaagtttcctcttaccagcttccggggaagtccctttcaggagaaaatgaccgcaggcgacaacccacagctggtacccgccgaccaggtcaacataactgaattttataacaaaagcttgtcttccttcaaagagaatgaggagaacattcaatgtggagaaaatttcatggatattgagtgctttatggtcctcaacccttcccagcagcttgcgatagctgtgctgtccttgactctcgggacctttacggtattagaaaatctgttggtcctctgtgtgatcctgcattcccgttcacttcgctgcagaccaagctatcacttcataggttctcttgccgtcgcggaccttttgggctctgtaatatttgtctattcattcatcgattttcatgttttccaccgtaaggattcccgaaacgtgttcctgttcaagctgggtggcgttactgcttcatttactgctagcgttggtagcttatttctcacggcaatcgacaggtatatttcaatacaccgtcctctggcctataaaaggatcgtgacgcggccgaaggcagtggtggctttctgtttaatgtggacgatcgcaatcgtcatagcagttctgcccctgctcggctggaattgcgagaagcttcagtccgtttgttctgatatctttccacatatcgatgagacttatctcatgttttggatcggagtaacctccgtcctgttactgttcattgtctacgcctacatgtacattttgtggaaggcgcacagccatgctgtccggatgatccaaagaggaacacagaaatcaattatcatccacactagcgaagatggcaaagtgcaggtgactagaccagatcaggccagaatggacattaggcttgctaagaccctcgttctgatcctggttgttctgataatatgctggggaccgctcctggcaatcatggtctatgatgtcttcgggaagatgaataagctgatcaaaactgtttttgcgttctgctccatgctatgcttgttgaacagtacagtgaatcccatcatctacgccctccgcagcaaggacctgcgccacgcttttcggtctatgttcccaagttgcgaaggaacggcccaacctctggacaacagcatgggcgactctgactgcttgcacaaacacgcaaataacgctgcgtctgttcatcgtgctgccgagagctgcatcaaatcaactgtcaaaattgcaaaggtgacaatgtccgtgagtaccgacaccagcgctgaggctctgtag

SEQ ID NO: 60931 - DNA, 1419 bp, Artificial Sequence
  derived and/or modified sequence
atgaagagcatcctggacggcctggccgacaccaccttccggaccatcaccacagatctgctgtatgttgggtccaatgatattcaatacgaagacattaagggtgacatggcttcaaaacttggatactttccccagaaatttcctctgacttccttcagaggaagcccatttcaggaaaagatgacagccggcgacaatcctcagctggtacctgccgaccaggtcaacattaccgaattttacaataaatccttgagttctttcaaggaaaatgaagagaatattcagtgcggcgaaaattttatggatattgaatgctttatggtcttaaaccccagccagcagctggcgattgctgtgctaagcctgaccctcggtacatttactgtgttagagaatcttctggtgctgtgtgttatcctccactcacgatcactgagatgccggccttcctatcattttatcggaagtctagccgtcgctgacctcttgggcagcgtaatattcgtttacagttttatcgatttccatgtgtttcatcgcaaagattcaagaaacgttttcctatttaagctggggggagttactgcatcctttacggcctctgtcggaagcttattcctgacagcgatcgatagatacatctccatccaccgccctctcgcctacaagcggattgttactagaccgaaagccgttgtggccttttgtctcatgtggacaatagcaattgtcatcgcagttttgccactgctcggatggaactgtgaaaagctgcagtctgtgtgttctgatattttcccccacatagatgaaacatacctgatgttctggataggagtgacgagcgtgctactcctttttatcgtgtacgcttacatgtacatactatggaaggcccacagccatgctgttcgtatgattcagagaggaactcagaagtccatcattattcacacttccgaagatggaaaggtgcaagtgacccggccggatcaggcaaggatggacatccgtctcgctaaaaccctggttctgattttggtggtgctgatcatctgctggggccctctgctggcaattatggtttatgacgtattcgggaaaatgaacaagttgattaaaaccgtatttgctttttgctccatgctgtgcctacttaattccacggtcaacccaattatttatgccttgcgtagcaaagacctccgtcacgcgttccggtcaatgtttccgagctgtgagggaacagcccaacccctggacaacagtatgggtgatagtgactgcctgcacaagcacgccaataatgcagcgtccgtgcaccgtgcggctgaatcttgtattaagtcaacagtcaagatcgccaaggtgactatgtctgttagcactgacacatccgccgaagctctgtag

SEQ ID NO: 60932 - DNA, 1419 bp, Artificial Sequence
  derived and/or modified sequence
atgaagagcatcctggacggcctggccgacaccaccttccggaccattaccactgatctactgtatgtgggaagcaatgatattcaatacgaggacataaaaggcgacatggcttccaagcttggctactttccccagaagttccccctgaccagtttcaggggatccccttttcaagaaaagatgacagccggagacaatcctcagttggtgcccgctgaccaggttaacattactgaattttacaacaaatcactcagtagcttcaaggagaacgaagagaacatacaatgcggggagaacttcatggatattgaatgcttcatggtgctcaatccatctcaacaactggctatcgcagtgctttccctgacactgggtacattcaccgtgttggagaacctgctggtgctgtgcgtgattttgcatagtagaagcttaagatgccgcccatcctaccacttcattggctctctggccgtcgctgacctcctagggtccgttatttttgtttactcattcatcgattttcacgtattccaccggaaagatagccgcaatgtgttccttttcaagctgggaggggtgactgcatcgttcaccgcatccgtgggttccctctttttgacagcaattgatagatatatctccattcatagacccttggcatataaaaggattgtgacaagacctaaagctgtcgtggccttctgcctgatgtggactattgctattgttatagccgtgcttcctctgttgggatggaactgtgaaaagcttcagtccgtttgctcagacatcttcccacatattgacgaaacatatctaatgttctggattggagttacaagcgtgctgctgctgttcattgtttacgcctacatgtatattctctggaaagcccacagccacgccgtgaggatgattcagcgcggtacccagaagagtatcataattcatacaagcgaggacggaaaagtgcaagtcactaggccagaccaggcaagaatggacatccgcttagcaaagactctagtcctgattttggtagtgttgatcatctgctgggggccactgcttgcaatcatggtgtatgacgtattcggaaaaatgaacaaactgatcaaaactgttttcgccttttgctcgatgctgtgcctcctgaatagcacggtcaaccctattatttacgctcttagatcaaaagatctgagacacgccttcagatctatgttcccatcttgcgaaggtactgcccagcctctggacaatagcatgggagacagcgattgtttgcataagcacgctaacaatgcggccagtgtccatagggcagccgagtcatgtatcaagtccaccgtgaaaattgctaaggtcacaatgtcagtaagcacagacacgtcagccgaggccctatag

SEQ ID NO: 60933 - DNA, 1419 bp, Artificial Sequence
  derived and/or modified sequence
atgaagagcatcctggacggcctggccgacaccaccttccggaccatcactacggatctcctgtacgttgggagcaatgacatccagtatgaagatatcaagggggatatggcaagtaaactcgggtattttccacagaagtttccattaactagcttcagaggaagccccttccaggagaaaatgaccgcaggcgacaacccccagctggtgcccgctgatcaggttaacattaccgaattctacaataagtcactctccagttttaaggaaaacgaagaaaacatccagtgcggagagaactttatggacattgaatgttttatggtcttaaatcccagccagcagctagccatcgctgtgttgagccttaccctgggcaccttcacggtgcttgagaacctacttgtcttgtgtgttattctacacagcaggagcctgcggtgtagaccctcttaccactttatcgggtctttagcggtggctgatttgctgggatctgttattttcgtgtatagctttattgatttccacgtctttcaccgcaaagacagtcgcaacgtcttcttgttcaagctgggtggcgtgactgcctcattcactgcctccgttggttccctattcctcaccgccatcgatagatatattagcattcatagacccctggcctacaagcggatcgtgacccgcccaaaagcagtcgtggcattctgcctgatgtggacaattgcgattgtcatagcggtgctgcccctgctgggatggaactgtgagaaactccagtcagtctgttctgacatttttccccacatagacgaaacatatctcatgttctggattggtgttaccagcgtcctgttgttgttcatcgtgtatgcatacatgtatatactgtggaaggctcactcccatgccgtcagaatgattcagcggggcacacagaagtcaattatcatacacacctccgaggatggcaaagtgcaggtcacaaggcccgaccaggccagaatggatatcagactcgcaaagactctcgtgttgatcttggtcgtcctaatcatttgctggggccctcttcttgccattatggtttatgacgtcttcggaaaaatgaacaagttgataaagaccgtttttgctttttgtagcatgctctgcctcctaaacagcactgtcaatcctataatatacgcgctccggagcaaggacttgcggcacgcgtttaggagcatgtttccttcatgtgaggggaccgcccaaccactggataacagtatgggagactctgattgcctgcacaagcatgctaacaacgctgctagcgtgcaccgcgctgcagagagctgcattaaaagtacagtcaagatcgccaaggtgaccatgtccgtgagcactgacacatccgccgaagcgctctag

SEQ ID NO: 60934 - DNA, 237 bp, Artificial Sequence
  derived and/or modified sequence
atgaagagcatcctggacggcctggccgacaccaccttccggaccatcactacagaccttctctacgtcggttcaaacgatatccagtacgaagatataaagggtgacatggcaagtaagcttggatacttccctcagaagttccctttaacttcttttcgggggtctccttttcaggagaaaatgaccgccggcgacaatcctcaactcgtgccagctgaccaggtcaatatctag

SEQ ID NO: 60935 - DNA, 1419 bp, Artificial Sequence
  derived and/or modified sequence
atgaagtccatcttggacggcctggcagataccaccttcaggacaattaccacagatctcctttacgtaggcagtaacgatatccagtatgaggacatcaaaggagacatggcttctaaactagggtacttcccacagaagttccctttgacttcattccggggtagtccattccaagagaaaatgactgcaggggacaatccccagctcgtacccgcagaccaagtgaatattactgagttttataataagagcctatcatcatttaaggaaaacgaggagaacatccagtgtggagagaatttcatggacatcgagtgcttcatggttctaaatccctcccaacaattggctattgctgttttatctctgacacttgggaccttcacagtcctcgagaatctgctggtgctctgtgtcatcctgcacagcaggtcactgcggtgccggccatcctaccacttcattggctccctggccgtggcggacttgcttggcagtgtgatctttgtgtactcattcatcgacttccatgtgttccaccggaaagatagcagaaatgtgttcctgtttaaacttggtggcgtcaccgcatcatttaccgcatccgttggtagcctctttcttacggctatcgacagatacatatccattcaccggcctctggcctataaacggattgtcacccgaccaaaagctgtggtggccttctgcctcatgtggacaattgctatagtgatcgccgttttacccctgttgggttggaattgcgagaaattacagtccgtgtgtagtgacatcttcccacacatagatgagacatacctaatgttttggatcggcgtgaccagtgtgctccttctgtttattgtctatgcttatatgtacatcttgtggaaagcccacagtcacgcggtaagaatgatccagagaggtacacaaaagtccataatcatccatacctcagaagacgggaaggtgcaagttacaagaccagatcaggccagaatggacatcagacttgcgaagactctcgtactgatactggttgttctcatcatttgctggggccctcttttagccatcatggtctacgatgtgttcggcaagatgaataaactgataaagaccgtgtttgctttctgttcaatgctatgtctgctgaattcaactgttaatccaatcatctatgctctgcgcagcaaggatctcaggcatgcctttcgctcgatgtttccaagctgcgagggtacagcacaacccctggataatagtatgggagatagcgactgcctgcataaacacgccaataacgccgcatctgtgcatcgggcagcagagagctgtatcaagtccacagtgaagattgcaaaggtgacaatgtctgtgagtaccgacacctctgcggaagcgttgtag

SEQ ID NO: 60936 - DNA, 1419 bp, Artificial Sequence
  derived and/or modified sequence
atgaagtcgattctcgacggactcgcggatacaacatttcgcactattacgaccgatttgctctacgtaggttctaatgacattcagtatgaggacataaaaggcgatatggcctctaagctggggtatttccctcaaaaatttcctcttacctcatttcgagggagcccttttcaggagaaaatgaccgccggagataaccctcagctggtcccagccgatcaggtaaatatcacggagttttacaataaaagtctgagttcttttaaggagaacgaggagaacatccagtgcggagagaattttatggacatcgagtgcttcatggtattaaatccatcgcagcaattagctatcgccgtcctgtctctgacacttggaaccttcaccgtgctggagaacttgttggtactctgcgtgatcctccacagcagatcactgcgctgcaggccatcttaccacttcatcggctcacttgccgtggccgacctgctgggcagcgttatcttcgtatacagcttcatagactttcacgttttccatcggaaagacagtaggaatgtgttcttgtttaaacttggaggcgttaccgcatcatttacagcctctgttggatccctgtttctgaccgcaatcgaccgctatatctccattcaccgcccactcgcatataagaggatagtgactcgcccaaaggctgtagtggccttctgcctgatgtggaccatcgctattgtgatcgccgtacttccactgctcggatggaactgtgagaaactgcaatcagtgtgttccgacatcttcccacacattgacgagacttacctgatgttctggataggcgtgaccagcgtactcctgcttttcattgtgtatgcctatatgtatattctgtggaaggcacacagtcacgccgtgaggatgatccagaggggcacacaaaagagtatcatcattcacacatcggaggatggtaaagtccaagtcactcgtccggaccaggccaggatggacattcgccttgccaagacactagtgctgatcctagtcgtgcttatcatctgctggggaccccttctagcaatcatggtgtacgatgttttcgggaagatgaataaactcatcaagacggtttttgcgttctgttccatgttgtgtctgctgaatagtaccgttaatccaattatctacgctctgaggtctaaggatctgaggcatgcctttcgtagcatgttcccatcatgcgagggaactgctcagccactggataactccatgggggattctgattgcctgcataagcatgccaataatgccgctagtgtacaccgggctgcggaatcatgcatcaaatccaccgtgaaaattgccaaggtcacaatgtcagtgtctactgatacatccgccgaggctctctag

SEQ ID NO: 60937 - DNA, 1419 bp, Artificial Sequence
  derived and/or modified sequence
atgaaaagtatcttagatggcctggccgacacaacatttaggactattaccaccgaccttctgtacgtgggatccaatgatatccaatacgaggacatcaagggtgacatggctagtaagctgggttattttccacagaagttccctctgacgtctttccggggttcacctttccaggagaagatgacagctggggataatccacagctggttccagcagatcaggtgaatatcactgagttctataataaaagcctcagctctttcaaagaaaacgaggaaaacatccaatgtggggagaacttcatggatatcgagtgttttatggttctgaacccctcacaacagctagcaatcgcggttctttccctgaccctcgggacctttacagtgctggaaaatctgttggtgctctgtgtgatcctccactctcggtcccttcggtgtcggccaagctaccattttatcgggtcattagccgtggctgacctgttaggatcagtcattttcgtttactctttcatagattttcatgtgttccaccggaaagactccagaaatgtatttcttttcaaactgggcggtgtgaccgcttcctttacagcctcggtcggctctctctttttaacggctattgaccggtacatctctatccatcgcccattagcctacaagcgaattgtgacacgtcctaaagcagtggttgcattttgcctgatgtggaccatcgcgattgtgatcgctgtgctccctttgcttggctggaactgcgagaagcttcagtcagtgtgttctgacatctttccacacatagacgagacctacctgatgttctggataggcgtcacaagtgtcctactgctgtttatcgtttatgcttatatgtatattctctggaaagcacactcacatgcagtgcgaatgattcagagaggaacccagaaaagcattattatacacacaagcgaggacggcaaggtccaggtcaccaggccagatcaggcgcgaatggatattagactggcaaaaaccctcgtccttattcttgttgtgttgatcatttgttggggcccactgctggctattatggtgtacgacgtgttcggcaagatgaataaattgataaaaaccgtattcgccttttgcagtatgctttgtctgctgaacagcacagtcaaccccatcatctacgcgttaagaagcaaagatttgagacacgcctttaggagtatgtttcccagttgtgagggaaccgcacaacccctcgataacagtatgggtgacagtgactgtctgcataagcacgctaacaacgccgcttcagtgcacagggctgccgagagctgcatcaaatctaccgtaaagatcgcgaaggtaactatgtcagtgtccacagatacgtcggccgaagctctctag

SEQ ID NO: 60938 - DNA, 1419 bp, Artificial Sequence
  derived and/or modified sequence
atgaagagcattctggacggtctggctgacactaccttcagaaccatcacgaccgacctgctttacgttgggagcaacgatatacagtacgaagatattaagggagacatggcctcaaaactcggttatttcccccagaagttccccctgacctcattccgcggaagtccgttccaggaaaagatgacagccggagataacccccagcttgtccctgcggatcaggtcaatatcacggaattttataataagagtttatctagttttaaagagaacgaagagaatatccaatgcggcgagaattttatggatattgagtgcttcatggtgctgaacccgagtcaacagttggctatcgcagtgcttagcctgactctgggtactttcacggtgctggaaaacctgctagtcctgtgtgtgattctccatagcagaagtctgcggtgcaggcccagctaccattttataggaagcttggctgttgcagacctgcttggctcagtcatcttcgtatactctttcatcgacttccacgtattccatcgcaaggacagtaggaacgtgttcctgtttaagctaggcggtgtcacagcgtcattcactgcgagcgtgggttctttattccttacggctatcgaccgctatatctcaatccatcgacctttggcctacaaacgcatagtaactcggcctaaagccgtggtagccttttgtttgatgtggacaattgctatcgtgattgctgtgcttcctctcctcggatggaattgcgaaaagctgcagtccgtgtgctcagatatctttccccacatcgacgagacctacctgatgttttggatcggagttacttccgtgctgctcctgtttattgtgtacgcctacatgtacatcttatggaaagcacactcacacgcagtgcgcatgatccagcggggaacccagaaaagcataattatccacacatccgaggatggcaaggtacaggtgacccggcctgatcaggctagaatggacatcaggctggctaaaacgctcgtgctcatcctcgttgttctgattatctgttggggccctttgctcgctatcatggtgtacgacgtcttcggaaaaatgaacaagcttattaaaactgtgttcgccttttgtagtatgctgtgcttgttaaacagcacagtcaatcccataatctacgcccttagaagcaaggatctgcgccatgcctttcgtagtatgtttccaagctgcgaaggaaccgctcagcctctggataatagcatgggcgacagcgactgtcttcacaagcacgcaaataacgctgctagtgttcaccgggctgcagagtcttgcattaagtcaaccgtcaagattgcaaaggttactatgagcgtctcaacagatacctcagccgaggctctgtag

SEQ ID NO: 60939 - DNA, 1419 bp, Artificial Sequence
  derived and/or modified sequence
atgaaatcaatcttggacggcctggccgacactactttcagaaccatcacaaccgatctcctctacgtcggctctaatgatatacagtacgaggatataaaaggagatatggcctcgaaactcggctacttcccccagaaatttccacttacaagctttcgtggtagcccatttcaggaaaaaatgaccgccggagacaacccgcagcttgtgccagcagatcaggtgaacatcacggaattctacaacaaaagcctctcttccttcaaggagaatgaggagaacatccagtgcggagagaacttcatggacattgaatgcttcatggtgctcaacccatcccaacagcttgctatcgccgtcctcagcttaacgctcggcaccttcactgtgctggaaaatctccttgtgttgtgcgtcatacttcattctaggtctctacggtgtaggcccagctaccatttcatcggctcccttgctgtggctgacttactcggctccgtcatctttgtgtacagtttcattgattttcatgttttccaccggaaggacagtagaaatgtgtttctctttaagctggggggtgtcactgccagtttcactgcaagtgtcgggtcactgttcctgactgccatagacaggtacatttctatccatcgaccattggcgtacaaacggatagtcaccaggcctaaggcggtcgttgccttttgtctgatgtggaccattgcgattgtcattgccgtgttgccactgctagggtggaattgcgaaaagctccagagtgtgtgcagtgacatattcccacacatcgatgaaacgtatttgatgttttggattggtgtaacatcagtgctcctgcttttcatcgtgtatgcttacatgtatatcttgtggaaggcccatagtcatgcggtgcgtatgatccagagagggactcaaaagtctataattatacatacaagtgaagatgggaaggtccaggtgaccagaccagaccaagctcgcatggacattaggctggctaaaactctggtcctgattctggtcgttctgattatctgctggggacccctgttggccattatggtgtacgacgtatttggaaaaatgaataaactaattaagaccgtgttcgctttctgcagtatgctttgtttgctaaattctactgttaaccctattatttacgccctgcgatccaaggacctgagacacgcctttcgatccatgtttccaagctgcgagggcacagcacagcctctagacaattccatgggtgatagtgattgtctccacaaacacgccaacaatgccgcttccgttcatcgcgctgccgagtcttgtatcaaatctactgtcaagattgccaaggtgacaatgagtgtgagcactgacacctcagctgaggcgctgtag

SEQ ID NO: 60940 - DNA, 1419 bp, Artificial Sequence
  derived and/or modified sequence
atgaagtccatcctggatggactggctgacaccacatttagaaccattaccaccgacctgctttatgttgggtcgaatgatattcagtacgaagacattaagggggacatggcttcaaagctgggttattttccccagaaattccccttaacaagctttcgcggttcacccttccaggaaaagatgactgcaggcgataacccccagctggtccctgccgaccaggtcaatatcaccgaattctacaacaagtcactcagtagcttcaaagaaaacgaagagaatatccagtgcggggagaatttcatggacatcgaatgcttcatggtgctcaacccttcgcagcaactggcaattgcggtgttatcactgacccttgggacctttacggtgctagaaaatttgctcgtgttgtgcgtgatcctgcatagtcggtccttgcgttgcaggccaagttatcacttcattggatcgctcgccgttgcagatctcctgggctctgtcatattcgtgtacagcttcattgacttccacgtatttcatcggaaggactcgcgcaacgtgttcctgttcaagctaggcggtgttaccgcatctttcacggcctccgtggggtccctctttctgaccgccattgatcgttacatctcaatccacaggcctctcgcatacaaacgcattgtgaccagaccgaaggccgtcgttgctttttgtctaatgtggaccatcgccattgttatcgctgttttgcctttactgggctggaattgcgaaaaactgcagtctgtgtgttcagatatctttcctcatattgacgaaacctatctcatgttttggatcggcgtaacaagtgttttactcttattcatcgtgtatgcctacatgtatatcttgtggaaagcgcactcacatgctgtcagaatgatccagcggggtacacagaaatccatcatcatccatacctctgaagatggtaaggtgcaagtgacacggcctgaccaagcgaggatggatattcgattggcgaagaccctggttctgatcttggtggtgctgatcatctgttggggcccactgctagccataatggtgtacgatgtgtttggaaaaatgaataagctaattaaaacagtgtttgcattttgtagcatgctgtgtctgttaaacagtacggtaaaccccataatatacgcattaaggagcaaagatctgaggcacgcttttaggtccatgtttccttcctgtgaagggacagctcagccactcgacaacagcatgggagactccgattgcctccacaagcacgcgaacaatgctgcctccgtgcatagagccgctgagtcctgcatcaagagcactgtcaagatcgctaaggtgacaatgtccgtgagtactgacactagtgcggaagccctgtag

SEQ ID NO: 60941 - DNA, 237 bp, Artificial Sequence
  derived and/or modified sequence
atgaagagtatactggatgggctagccgacaccacattccggacgatcacaaccgatttattatacgttggaagcaatgacatccagtacgaggacatcaagggtgatatggcttccaaattaggctactttcctcaaaagttccccctaacttcttttagaggaagtccttttcaggaaaaaatgaccgctggggataacccccagctcgtgcctgcagaccaggttaatatctag

SEQ ID NO: 60942 - DNA, 5549 bp, Artificial Sequence
  derived and/or modified sequence
ttagcttatcaggagaacttactgtaaaccgactctttttgtttcaaagatgtctcccactccaggcgaggagcgctcttggctgaggattgccccctgtgggtcactttctcagtcattttgagctcagcctaatcaaagactgaggttatgaagtcgatcctagatggccttgcagataccaccttccgcaccatcaccactgacctcctgtacgtgggctcaaatgacattcagtacgaagacatcaaaggtgacatggcatccaaattagggtacttcccacagaaattccctttaacttcctttaggggaagtcccttccaagagaagatgactgcgggagacaacccccagctagtcccagcagaccaggtgaacattacagaattttacaacaagtctctctcgtccttcaaggagaatgaggagaacatccagtgtggggagaacttcatggacatagagtgtttcatggtcctgaaccccagccagcagctggccattgcagtcctgtccctcacgctgggcaccttcacggtcctggagaacctcctggtgctgtgcgtcatcctccactcccgcagcctccgctgcaggccttcctaccacttcatcggcagcctggcggtggcagacctcctggggagtgtcatttttgtctacagcttcattgacttccacgtgttccaccgcaaagatagccgcaacgtgtttctgttcaaactgggtggggtcacggcctccttcactgcctccgtgggcagcctgttcctcacagccatcgacaggtacatatccattcacaggcccctggcctataagaggattgtcaccaggcccaaggccgtggtggcgttttgcctgatgtggaccatagccattgtgatcgccgtgctgcctctcctgggctggaactgcgagaaactgcaatctgtttgctcagacattttcccacacattgatgaaacctacctgatgttctggatcggggtcaccagcgtactgcttctgttcatcgtgtatgcgtacatgtatattctctggaaggctcacagccacgccgtccgcatgattcagcgtggcacccagaagagcatcatcatccacacgtctgaggatgggaaggtacaggtgacccggccagaccaagcccgcatggacattaggttagccaagaccctggtcctgatcctggtggtgttgatcatctgctggggccctctgcttgcaatcatggtgtatgatgtctttgggaagatgaacaagctcattaagacggtgtttgcattctgcagtatgctctgcctgctgaactccaccgtgaaccccatcatctatgctctgaggagtaaggacctgcgacacgctttccggagcatgtttccctcttgtgaaggcactgcgcagcctctggataacagcatgggggactcggactgcctgcacaaacacgcaaacaatgcagccagtgttcacagggccgcagaaagctgcatcaagagcacggtcaagattgccaaggtaaccatgtctgtgtccacagacacgtctgccgaggctctgtgagcctgatgcctccctggcagcacaggaaaagaatttttttttttaagctcaaaatctagaagagtctattgtctccttggttatatttttttaactttaccatgctcaatgaaaaggtgattgtcaccatgatcacttatcagtttgctaatgtttccatagtttaggtactcaaactccattctccaggggtttacagtgaagaaagcctgttgtttaagtgactgaacgatccttcaaagtctcaatgaaataggagggaaacctttggctacacaattggaagtctaagaacccatggaaaaatgccatcaaatgaataatgcctttgtaaccacaactttcactataatgtgaaatgtaactgtccgtagtatcagagatgtccatttttacaagttatagtactagagatattttgtaaaatgtattatgtcctgtgagatgtgtatcagtgtttatgtgctattaatatttgtttagttcagcaaaactgaaaggtagacttttatgagaacaatggacaagcagtggatacgtgtcaatgtgtgcactttttttctatattattgcccatgatataactttagaaataaaccttaatatttcttcaaatatctctatttaattttgacactgaaataaccgtaaaggtttatttttctgttacctcaacaagaagaatttgaagacttcaaaatattgagcagaattcattcatacttaaaaatttattagccctgcattttcataggaagacacattatcttctggactatagctgttctaatggattataatcagaatggaagagagaaagcatattgactttttttgagcgacatctctgactttctttagtctttagctattactggatctcttaagacagcatgtgttaatcttaatgtatatcgttatcactgtgcagttgctgtttacttgaatagtattgtgttcctatattccaggtttaagtagatttcatgcctgggtggccaaacaacagtcttcattttttttaattgaaaagaagtagtgtctggatcagtaaaattatactgtgtgtgagtgtgaatataaatgtgtgtatgtgtgtttctgtcctgtaactgttacagtaatgtcataaagtgagaaaactgtgaccaagtataaacttttaccacttgctgcactcttgcacatggattcagtttctaaaattgagttcttcctgtaatcttgttgataaaaatactgactccaaccattcaaaaatttcaccccatccctccttaagagattggatcaagtattactaaattgacctttaggtattacacaagaccagtgcttagcaaaaaataatgacaggcatccaaggaagggatgtatttgtagtgttattgccaggaaaggagagtactttggtttctgagcaccgaatattgagcaatatgtcagtcactaaaaggaagacagttctacagaaaaacaatggtaacatttttcaatagcgtgtgtagatagtatgcactatatacatcacgttaaagtaggactatcacacccagcccatgtggctaaaaaagctgaatcagacagtggatgagacacacaacggcagtgaagaaccgatacacttggcattgacgtctagctatgctgtatctgtgctttgcccacatgcccttggtgacagctgagcacccagctctgtcttggtaggtttgggctaaggaacaaatctctcctttgctcgtggttagcaagatacactcaagcatgaagataaacacagctgctttcttcttacaccccggtctcatgctccttaatggcgccatgggtgcttgttgggcctttttccagtaaggaatgatattgctgaagaatctacttaaccctgacaaattttaattataatctcttcttatacagataaaacatgactcctacaaggccccaaggtttacatagtctgaagtgaagtacagagctggcatctatctggtgatttctagctctcgagatacccaagcagcctgatggggcagttccccttcttacggttcacgctctaaggcaggatgtggcttatgagatactttgcattgtctgtctgcacaccttgaatctgcctgctggctcccttactttacctctctgtcatgtgcagatgaaggctcagggtgctagaggattagtaagatctctttctaaagacaggagagattatttacaagaagaactcaccagggtttagtttgcatttaagaattgccagtcttttgtcctgcatcatcttgaacattaatccacatgtttcagagctcaccaggcagtaccaatgctcttttcacagctatgaagagctagagaaattcttgttatggtagaaaaatttcacgattcatttttgaaactgcatttgtgcgtatgcagtgtagattttatagtgtgttgtgctttcaagatctaaatcatatataataaattaagggacaatggggctgacagcactaaacttggtgcttattgatattctaagaaatatctgtgaaatatcatcacgtatgttatacaaccttcatttaaaaaggtttaaaactagttagattcactttgacacttttcatatcatttcttaacccaagtgacgaaaacattgtccccaatgaatatactcattagaattaccatttgttaatatcactcattaattaaccccataattagatccattaatttaaatgatttaaatttaagtaagttttataaggtctgacatcagaggtatcttactttcctctgaggatgatgtacttgccctgaccatgcattttaccatcacacatgttcagaaagggccaaattcccaacctgctcattttttttttatcagagtcatgatgaatcagtcctagaatgtttcatttgcacaagtagggctgcctccaagaggaacctctgatttattttgtatgaaatatatgtgaaaggatatgaatctgagagatgctgtagacatctgtcctacacttgagatgatttccaagcctctctggcactttgagttaagtctatctggtattaaatgccaaggaccttttgctgcctaaatccactctgcaggaaataggcccaaccaccagatgagaattaggccctggatgagtagcgctatagttactgtcctgttgattaatttctgccatttcatgtccataaaagagaccacccatatcatgcacacaattagatttctcacactctaactgtatatttgtatgatattttaaaatctcctaaatgctgggcaatggctattaacaattaattgtcttgcactggccttctgatgaaatgttaacaatgcctattgtaatatagaaaaaaacattctatctactgatttgggctgaatgtatgtaaataggtttctaaaaagtcagatgtttgagcagtggcctacaaatcagtaattttcggatgggagagtttctttacattgccgtggcatcttaaaagctatcttcatgtaaattgactgtactaggcctactggggatcagagttcccaagaaaggaaaccttttcttgtatctggattcaaatttatttccaatgtttcaagcgggaaacatgactctttattgtctgtaaatctaacattattacttttcctcttagaagaatattgtattgttagatgtttgttgagctggtaacatcgttgcaaccactgcaatatcttcgttagtaatctgtataatactttgtatacaagtactggtaagattgttattaaatgtagcttcagtcattaaattactatagcaaagtagtacttcttctgtaatatttacaatgtattaagcccacagtatattttatttcaatgtaattaaactgttaacttattcaaagagaaaacatctcatcatgtctattgtccaaagttacctggaatcaaataaaaattctagattaccatg

SEQ ID NO: 60943 - DNA, 6031 bp, Artificial Sequence
  derived and/or modified sequence
cgagagggagccagagacagcgcgagcggagggagcggcagggactgcgcgagcgggacgaggcgacgggcgcccgggctggcggagacgggcggccccacgccgggccaggcggggctcgcgggaggacccagtgaagagcctgggaaggggcgaggctcgccggcggtcggagcagcggggcgccagtcccggtcgctgtcgcgggcgggcgctggagaccgggacgccggcgctcggacggactgacttgctgaccgcccgccggaggcacaccccactccaccccaccccgcctcgccagcagcccggcgccggcgccgcctcccgcacgctactccctctgccaccccttccttctccacttcttttccgcctccgcctcttcttgtctcccgcggcgccagcgccttcccttggcccgggcgggggcctcggctccctgcagagctctccgtagtcagtgggggatatttcgttctagcggacaaccagcccctgagctgggcgagaggtgccaagggagcttctgtcccgaggaccaggggatgcgaagggattgccccctgtgggtcactttctcagtcattttgagctcagcctaatcaaagactgaggttatgaagtcgatcctagatggccttgcagataccaccttccgcaccatcaccactgacctcctgtacgtgggctcaaatgacattcagtacgaagacatcaaaggtgacatggcatccaaattagggtacttcccacagaaattccctttaacttcctttaggggaagtcccttccaagagaagatgactgcgggagacaacccccagctagtcccagcagaccaggtgaacattacagaattttacaacaagtctctctcgtccttcaaggagaatgaggagaacatccagtgtggggagaacttcatggacatagagtgtttcatggtcctgaaccccagccagcagctggccattgcagtcctgtccctcacgctgggcaccttcacggtcctggagaacctcctggtgctgtgcgtcatcctccactcccgcagcctccgctgcaggccttcctaccacttcatcggcagcctggcggtggcagacctcctggggagtgtcatttttgtctacagcttcattgacttccacgtgttccaccgcaaagatagccgcaacgtgtttctgttcaaactgggtggggtcacggcctccttcactgcctccgtgggcagcctgttcctcacagccatcgacaggtacatatccattcacaggcccctggcctataagaggattgtcaccaggcccaaggccgtggtggcgttttgcctgatgtggaccatagccattgtgatcgccgtgctgcctctcctgggctggaactgcgagaaactgcaatctgtttgctcagacattttcccacacattgatgaaacctacctgatgttctggatcggggtcaccagcgtactgcttctgttcatcgtgtatgcgtacatgtatattctctggaaggctcacagccacgccgtccgcatgattcagcgtggcacccagaagagcatcatcatccacacgtctgaggatgggaaggtacaggtgacccggccagaccaagcccgcatggacattaggttagccaagaccctggtcctgatcctggtggtgttgatcatctgctggggccctctgcttgcaatcatggtgtatgatgtctttgggaagatgaacaagctcattaagacggtgtttgcattctgcagtatgctctgcctgctgaactccaccgtgaaccccatcatctatgctctgaggagtaaggacctgcgacacgctttccggagcatgtttccctcttgtgaaggcactgcgcagcctctggataacagcatgggggactcggactgcctgcacaaacacgcaaacaatgcagccagtgttcacagggccgcagaaagctgcatcaagagcacggtcaagattgccaaggtaaccatgtctgtgtccacagacacgtctgccgaggctctgtgagcctgatgcctccctggcagcacaggaaaagaatttttttttttaagctcaaaatctagaagagtctattgtctccttggttatatttttttaactttaccatgctcaatgaaaaggtgattgtcaccatgatcacttatcagtttgctaatgtttccatagtttaggtactcaaactccattctccaggggtttacagtgaagaaagcctgttgtttaagtgactgaacgatccttcaaagtctcaatgaaataggagggaaacctttggctacacaattggaagtctaagaacccatggaaaaatgccatcaaatgaataatgcctttgtaaccacaactttcactataatgtgaaatgtaactgtccgtagtatcagagatgtccatttttacaagttatagtactagagatattttgtaaaatgtattatgtcctgtgagatgtgtatcagtgtttatgtgctattaatatttgtttagttcagcaaaactgaaaggtagacttttatgagaacaatggacaagcagtggatacgtgtcaatgtgtgcactttttttctatattattgcccatgatataactttagaaataaaccttaatatttcttcaaatatctctatttaattttgacactgaaataaccgtaaaggtttatttttctgttacctcaacaagaagaatttgaagacttcaaaatattgagcagaattcattcatacttaaaaatttattagccctgcattttcataggaagacacattatcttctggactatagctgttctaatggattataatcagaatggaagagagaaagcatattgactttttttgagcgacatctctgactttctttagtctttagctattactggatctcttaagacagcatgtgttaatcttaatgtatatcgttatcactgtgcagttgctgtttacttgaatagtattgtgttcctatattccaggtttaagtagatttcatgcctgggtggccaaacaacagtcttcattttttttaattgaaaagaagtagtgtctggatcagtaaaattatactgtgtgtgagtgtgaatataaatgtgtgtatgtgtgtttctgtcctgtaactgttacagtaatgtcataaagtgagaaaactgtgaccaagtataaacttttaccacttgctgcactcttgcacatggattcagtttctaaaattgagttcttcctgtaatcttgttgataaaaatactgactccaaccattcaaaaatttcaccccatccctccttaagagattggatcaagtattactaaattgacctttaggtattacacaagaccagtgcttagcaaaaaataatgacaggcatccaaggaagggatgtatttgtagtgttattgccaggaaaggagagtactttggtttctgagcaccgaatattgagcaatatgtcagtcactaaaaggaagacagttctacagaaaaacaatggtaacatttttcaatagcgtgtgtagatagtatgcactatatacatcacgttaaagtaggactatcacacccagcccatgtggctaaaaaagctgaatcagacagtggatgagacacacaacggcagtgaagaaccgatacacttggcattgacgtctagctatgctgtatctgtgctttgcccacatgcccttggtgacagctgagcacccagctctgtcttggtaggtttgggctaaggaacaaatctctcctttgctcgtggttagcaagatacactcaagcatgaagataaacacagctgctttcttcttacaccccggtctcatgctccttaatggcgccatgggtgcttgttgggcctttttccagtaaggaatgatattgctgaagaatctacttaaccctgacaaattttaattataatctcttcttatacagataaaacatgactcctacaaggccccaaggtttacatagtctgaagtgaagtacagagctggcatctatctggtgatttctagctctcgagatacccaagcagcctgatggggcagttccccttcttacggttcacgctctaaggcaggatgtggcttatgagatactttgcattgtctgtctgcacaccttgaatctgcctgctggctcccttactttacctctctgtcatgtgcagatgaaggctcagggtgctagaggattagtaagatctctttctaaagacaggagagattatttacaagaagaactcaccagggtttagtttgcatttaagaattgccagtcttttgtcctgcatcatcttgaacattaatccacatgtttcagagctcaccaggcagtaccaatgctcttttcacagctatgaagagctagagaaattcttgttatggtagaaaaatttcacgattcatttttgaaactgcatttgtgcgtatgcagtgtagattttatagtgtgttgtgctttcaagatctaaatcatatataataaattaagggacaatggggctgacagcactaaacttggtgcttattgatattctaagaaatatctgtgaaatatcatcacgtatgttatacaaccttcatttaaaaaggtttaaaactagttagattcactttgacacttttcatatcatttcttaacccaagtgacgaaaacattgtccccaatgaatatactcattagaattaccatttgttaatatcactcattaattaaccccataattagatccattaatttaaatgatttaaatttaagtaagttttataaggtctgacatcagaggtatcttactttcctctgaggatgatgtacttgccctgaccatgcattttaccatcacacatgttcagaaagggccaaattcccaacctgctcattttttttttatcagagtcatgatgaatcagtcctagaatgtttcatttgcacaagtagggctgcctccaagaggaacctctgatttattttgtatgaaatatatgtgaaaggatatgaatctgagagatgctgtagacatctgtcctacacttgagatgatttccaagcctctctggcactttgagttaagtctatctggtattaaatgccaaggaccttttgctgcctaaatccactctgcaggaaataggcccaaccaccagatgagaattaggccctggatgagtagcgctatagttactgtcctgttgattaatttctgccatttcatgtccataaaagagaccacccatatcatgcacacaattagatttctcacactctaactgtatatttgtatgatattttaaaatctcctaaatgctgggcaatggctattaacaattaattgtcttgcactggccttctgatgaaatgttaacaatgcctattgtaatatagaaaaaaacattctatctactgatttgggctgaatgtatgtaaataggtttctaaaaagtcagatgtttgagcagtggcctacaaatcagtaattttcggatgggagagtttctttacattgccgtggcatcttaaaagctatcttcatgtaaattgactgtactaggcctactggggatcagagttcccaagaaaggaaaccttttcttgtatctggattcaaatttatttccaatgtttcaagcgggaaacatgactctttattgtctgtaaatctaacattattacttttcctcttagaagaatattgtattgttagatgtttgttgagctggtaacatcgttgcaaccactgcaatatcttcgttagtaatctgtataatactttgtatacaagtactggtaagattgttattaaatgtagcttcagtcattaaattactatagcaaagtagtacttcttctgtaatatttacaatgtattaagcccacagtatattttatttcaatgtaattaaactgttaacttattcaaagagaaaacatctcatcatgtctattgtccaaagttacctggaatcaaataaaaattctagattaccatgaagaacataaaa

SEQ ID NO: 60944 - DNA, 1550 bp, Artificial Sequence
  derived and/or modified sequence
cagttgcataaagaacatagatgagagctttcattccctgctgaaaaggatgccatgcctccaccagtgattgccccctgtgggtcactttctcagtcattttgagctcagcctaatcaaagactgaggttatgaagtcgatcctagatggccttgcagataccaccttccgcaccatcaccactgacctcctgtacgtgggctcaaatgacattcagtacgaagacatcaaaggtgacatggcatccaaattagggtacttcccacagaaattccctttaacttcctttaggggaagtcccttccaagagaagatgactgcgggagacaacccccagctagtcccagcagaccaggtgaacattacagaattttacaacaagtctctctcgtccttcaaggagaatgaggagaacatccagtgtggggagaacttcatggacatagagtgtttcatggtcctgaaccccagccagcagctggccattgcagtcctgtccctcacgctgggcaccttcacggtcctggagaacctcctggtgctgtgcgtcatcctccactcccgcagcctccgctgcaggccttcctaccacttcatcggcagcctggcggtggcagacctcctggggagtgtcatttttgtctacagcttcattgacttccacgtgttccaccgcaaagatagccgcaacgtgtttctgttcaaactgggtggggtcacggcctccttcactgcctccgtgggcagcctgttcctcacagccatcgacaggtacatatccattcacaggcccctggcctataagaggattgtcaccaggcccaaggccgtggtggcgttttgcctgatgtggaccatagccattgtgatcgccgtgctgcctctcctgggctggaactgcgagaaactgcaatctgtttgctcagacattttcccacacattgatgaaacctacctgatgttctggatcggggtcaccagcgtactgcttctgttcatcgtgtatgcgtacatgtatattctctggaaggctcacagccacgccgtccgcatgattcagcgtggcacccagaagagcatcatcatccacacgtctgaggatgggaaggtacaggtgacccggccagaccaagcccgcatggacattaggttagccaagaccctggtcctgatcctggtggtgttgatcatctgctggggccctctgcttgcaatcatggtgtatgatgtctttgggaagatgaacaagctcattaagacggtgtttgcattctgcagtatgctctgcctgctgaactccaccgtgaaccccatcatctatgctctgaggagtaaggacctgcgacacgctttccggagcatgtttccctcttgtgaaggcactgcgcagcctctggataacagcatgggggactcggactgcctgcacaaacacgcaaacaatgcagccagtgttcacagggccgcagaaagctgcatcaagagcacggtcaagattgccaaggtaaccatgtctgtgtccacagacacgtctgccgaggctctgtga

SEQ ID NO: 60945 - DNA, 5776 bp, Artificial Sequence
  derived and/or modified sequence
gcgccggcgccgcctcccgcacgctactccctctgccaccccttccttctccacttcttttccgcctccgcctcttcttgtctcccgcggcgccagcgccttcccttggcccgggcgggggcctcggctccctgcagagctctccgtagtcagtgggggatatttcgttctagcggacaaccagcccctgagctgggcgagaggtgccaagggagcttctgtcccgaggaccaggggatgcgaagggtaagacctggcagagttgcgtttggaaatactttttccgcctcccgccccctcgggattgccccctgtgggtcactttctcagtcattttgagctcagcctaatcaaagactgaggttatgaagtcgatcctagatggccttgcagataccaccttccgcaccatcaccactgacctcctgtacgtgggctcaaatgacattcagtacgaagacatcaaaggtgacatggcatccaaattagggtacttcccacagaaattccctttaacttcctttaggggaagtcccttccaagagaagatgactgcgggagacaacccccagctagtcccagcagaccaggtgaacattacagaattttacaacaagtctctctcgtccttcaaggagaatgaggagaacatccagtgtggggagaacttcatggacatagagtgtttcatggtcctgaaccccagccagcagctggccattgcagtcctgtccctcacgctgggcaccttcacggtcctggagaacctcctggtgctgtgcgtcatcctccactcccgcagcctccgctgcaggccttcctaccacttcatcggcagcctggcggtggcagacctcctggggagtgtcatttttgtctacagcttcattgacttccacgtgttccaccgcaaagatagccgcaacgtgtttctgttcaaactgggtggggtcacggcctccttcactgcctccgtgggcagcctgttcctcacagccatcgacaggtacatatccattcacaggcccctggcctataagaggattgtcaccaggcccaaggccgtggtggcgttttgcctgatgtggaccatagccattgtgatcgccgtgctgcctctcctgggctggaactgcgagaaactgcaatctgtttgctcagacattttcccacacattgatgaaacctacctgatgttctggatcggggtcaccagcgtactgcttctgttcatcgtgtatgcgtacatgtatattctctggaaggctcacagccacgccgtccgcatgattcagcgtggcacccagaagagcatcatcatccacacgtctgaggatgggaaggtacaggtgacccggccagaccaagcccgcatggacattaggttagccaagaccctggtcctgatcctggtggtgttgatcatctgctggggccctctgcttgcaatcatggtgtatgatgtctttgggaagatgaacaagctcattaagacggtgtttgcattctgcagtatgctctgcctgctgaactccaccgtgaaccccatcatctatgctctgaggagtaaggacctgcgacacgctttccggagcatgtttccctcttgtgaaggcactgcgcagcctctggataacagcatgggggactcggactgcctgcacaaacacgcaaacaatgcagccagtgttcacagggccgcagaaagctgcatcaagagcacggtcaagattgccaaggtaaccatgtctgtgtccacagacacgtctgccgaggctctgtgagcctgatgcctccctggcagcacaggaaaagaatttttttttttaagctcaaaatctagaagagtctattgtctccttggttatatttttttaactttaccatgctcaatgaaaaggtgattgtcaccatgatcacttatcagtttgctaatgtttccatagtttaggtactcaaactccattctccaggggtttacagtgaagaaagcctgttgtttaagtgactgaacgatccttcaaagtctcaatgaaataggagggaaacctttggctacacaattggaagtctaagaacccatggaaaaatgccatcaaatgaataatgcctttgtaaccacaactttcactataatgtgaaatgtaactgtccgtagtatcagagatgtccatttttacaagttatagtactagagatattttgtaaaatgtattatgtcctgtgagatgtgtatcagtgtttatgtgctattaatatttgtttagttcagcaaaactgaaaggtagacttttatgagaacaatggacaagcagtggatacgtgtcaatgtgtgcactttttttctatattattgcccatgatataactttagaaataaaccttaatatttcttcaaatatctctatttaattttgacactgaaataaccgtaaaggtttatttttctgttacctcaacaagaagaatttgaagacttcaaaatattgagcagaattcattcatacttaaaaatttattagccctgcattttcataggaagacacattatcttctggactatagctgttctaatggattataatcagaatggaagagagaaagcatattgactttttttgagcgacatctctgactttctttagtctttagctattactggatctcttaagacagcatgtgttaatcttaatgtatatcgttatcactgtgcagttgctgtttacttgaatagtattgtgttcctatattccaggtttaagtagatttcatgcctgggtggccaaacaacagtcttcattttttttaattgaaaagaagtagtgtctggatcagtaaaattatactgtgtgtgagtgtgaatataaatgtgtgtatgtgtgtttctgtcctgtaactgttacagtaatgtcataaagtgagaaaactgtgaccaagtataaacttttaccacttgctgcactcttgcacatggattcagtttctaaaattgagttcttcctgtaatcttgttgataaaaatactgactccaaccattcaaaaatttcaccccatccctccttaagagattggatcaagtattactaaattgacctttaggtattacacaagaccagtgcttagcaaaaaataatgacaggcatccaaggaagggatgtatttgtagtgttattgccaggaaaggagagtactttggtttctgagcaccgaatattgagcaatatgtcagtcactaaaaggaagacagttctacagaaaaacaatggtaacatttttcaatagcgtgtgtagatagtatgcactatatacatcacgttaaagtaggactatcacacccagcccatgtggctaaaaaagctgaatcagacagtggatgagacacacaacggcagtgaagaaccgatacacttggcattgacgtctagctatgctgtatctgtgctttgcccacatgcccttggtgacagctgagcacccagctctgtcttggtaggtttgggctaaggaacaaatctctcctttgctcgtggttagcaagatacactcaagcatgaagataaacacagctgctttcttcttacaccccggtctcatgctccttaatggcgccatgggtgcttgttgggcctttttccagtaaggaatgatattgctgaagaatctacttaaccctgacaaattttaattataatctcttcttatacagataaaacatgactcctacaaggccccaaggtttacatagtctgaagtgaagtacagagctggcatctatctggtgatttctagctctcgagatacccaagcagcctgatggggcagttccccttcttacggttcacgctctaaggcaggatgtggcttatgagatactttgcattgtctgtctgcacaccttgaatctgcctgctggctcccttactttacctctctgtcatgtgcagatgaaggctcagggtgctagaggattagtaagatctctttctaaagacaggagagattatttacaagaagaactcaccagggtttagtttgcatttaagaattgccagtcttttgtcctgcatcatcttgaacattaatccacatgtttcagagctcaccaggcagtaccaatgctcttttcacagctatgaagagctagagaaattcttgttatggtagaaaaatttcacgattcatttttgaaactgcatttgtgcgtatgcagtgtagattttatagtgtgttgtgctttcaagatctaaatcatatataataaattaagggacaatggggctgacagcactaaacttggtgcttattgatattctaagaaatatctgtgaaatatcatcacgtatgttatacaaccttcatttaaaaaggtttaaaactagttagattcactttgacacttttcatatcatttcttaacccaagtgacgaaaacattgtccccaatgaatatactcattagaattaccatttgttaatatcactcattaattaaccccataattagatccattaatttaaatgatttaaatttaagtaagttttataaggtctgacatcagaggtatcttactttcctctgaggatgatgtacttgccctgaccatgcattttaccatcacacatgttcagaaagggccaaattcccaacctgctcattttttttttatcagagtcatgatgaatcagtcctagaatgtttcatttgcacaagtagggctgcctccaagaggaacctctgatttattttgtatgaaatatatgtgaaaggatatgaatctgagagatgctgtagacatctgtcctacacttgagatgatttccaagcctctctggcactttgagttaagtctatctggtattaaatgccaaggaccttttgctgcctaaatccactctgcaggaaataggcccaaccaccagatgagaattaggccctggatgagtagcgctatagttactgtcctgttgattaatttctgccatttcatgtccataaaagagaccacccatatcatgcacacaattagatttctcacactctaactgtatatttgtatgatattttaaaatctcctaaatgctgggcaatggctattaacaattaattgtcttgcactggccttctgatgaaatgttaacaatgcctattgtaatatagaaaaaaacattctatctactgatttgggctgaatgtatgtaaataggtttctaaaaagtcagatgtttgagcagtggcctacaaatcagtaattttcggatgggagagtttctttacattgccgtggcatcttaaaagctatcttcatgtaaattgactgtactaggcctactggggatcagagttcccaagaaaggaaaccttttcttgtatctggattcaaatttatttccaatgtttcaagcgggaaacatgactctttattgtctgtaaatctaacattattacttttcctcttagaagaatattgtattgttagatgtttgttgagctggtaacatcgttgcaaccactgcaatatcttcgttagtaatctgtataatactttgtatacaagtactggtaagattgttattaaatgtagcttcagtcattaaattactatagcaaagtagtacttcttctgtaatatttacaatgtattaagcccacagtatattttatttcaatgtaattaaactgttaacttattcaaagagaaaacatctcatcatgtctattgtccaaagttacctggaatcaaataaaaattctagattaccatgaagaacataaaa

SEQ ID NO: 60946 - DNA, 8974 bp, Artificial Sequence
  derived and/or modified sequence
accctctgtgcctttcttctgaaaatggggataatagcacctacttcatagggccattgtgaaataaaggaattgatatatatgtaataggctcagtgtcaccagtccataagaagctctctctatatgcttaaaagaggaaaatcagcaagacttagtggtctacctgattgtagaggtcaagaaagaggaggtgtcatagtaagtccaagttaggaacttaggtgactagaaagactactcacaatgccataagaaatgtgaaaaagttctcaggagtcaactcttgctccttgcaaacttatgtttgctaaacaactccatttacatatgaaagttttcatccataatcaaagggacacagaagacagtcacaatatatgagagagctgttccttacatggtcctggcacatccacaaacctagcttttgcctttcaactcccacccatacttaaacaccaggcttactggtcctgagtgacttgctgagtgacctgtggttggattcaatttattgcagcatcatttctaatagcaaaagatgataacctaaacctccatcagtaggaggctggtcacattcatctaacagatccttaaggcagctgaatgaagagagaggttttatatacgaatatggaactgttcacaatgtgtacttctaagaagaaaagaaaggtatgtataataatgttaattactgtttgctaaaaagaaaacaaagagggggtaaatacatatatttgtttgaatatgcatggagtatctctggaaggggtaacaagaaacttactccttgcctttgagaaaaaaaactaggtggctgggatatagggatgagagagattgacttttctctgtatgtctttctgtaccttttgaatcttaaatcttgtgaatctaatacataaagataatcaaaatttctgataaactagtttccagttggaaagtgtaaagggggagttagttaattgagggaagatggcataaggaatgggaagatgactggaatggctcacaggagctacttggagatggaggctcaaactctggttttcaggctaaatgtctattgcataaattattttttctgtcctctaattttaagaaaaaggcaaatgcaaatcactgttttaaggtaccacctaataaaaattcaactgccattttattaggttcaggtgaacatttctgtgggaactcagctgtctgctctcctgctatcatgctatcaggctggtaaaccacttaagaaaaaaagatgcctctgtgtttggagatctcattctagttatggaaataaatatgtgaactcctgattatacgacgtgatgaggcctgtaatagagggatgtgctggggaactagttatacctagtgggaggggctggtcaggaaggtctcagacatggaagtagcattggcacagacctggaaagataagtttagtaggcagagagcttctatccagataaaagaagggacaaggtgaaggaggaaggtgtgcaggtatgacggtgtattcaaagagcagcaagtcactcagggccagtaagcctggtgtttaagtatgagtgggagtcgaaaggcaaaagttaggtttgtggatgtgcaaggaccatgtaaggaacagctctcacacattgtggctgtcttctgtgtccctttgattatggatgaaaactttccatatgtaaatggagttgttaagcaaacataagtttgcaaggagcaagagttgactcctgagaaatagccgaatgtgggacatatagagcatgttctagaagaggtgaggatatgagaaaagatatgacagacagacagatgaacagggaacctaaggatactaaggatactcgagagttaacattggagccaggctgagggtaggaactcaggagatattttagataaaggagcccagaagcactgggcaactggcttggctgttggtctttggtcttttatttctgcatcctttatttctatagccactagcctttgcccctgagacactgccttgacttgattggcgttagcagactgtaccagcacactgggtgcctctgtgtggcttgtaccttagagctcctgcctctggtccagtaggtgatggctcccatctgctttattctatgacagttgcaggaaaggtgtgcagaactggttcagaagcccagactaaaaaaaaccctcaattttcttagtgatgatagaagttacccatgggagattcggggccctcagtttggcagtgcctcctactgccatcacaggctacagtgatcttgtaaaagggttacacaaccatggaggagctaagggagccttctggcttacctgtcacattagtgctgagggctctttctctgttcaccatttggtatggcattgccaatattcttgtttgcctctctgtagccaaagttgcttattgcatatagctcattccatgagagtttagactagataattatataggcagcttcatttaaaatgctaataaccttacctaaatagagcatatttctagcacaattggattgggcagctctccaggctagatcccttgattcaagttacatgatcattttttttttttaatcagcattgggagaatccttccccttctttgggtagaaaagagcttcttgtttttgttctattttgaaatacgtatatccaatcaaccagcttatttggagccttcttctgtgtgttaggcattctactaaatgctgagtagatactaagataaagtccccagtaagatcttcagtgaacttactgtctagtgggtgggaggaagtagtggaacagatgcaaacacaaagaagtattagaaaatctggtcagtaccatgatagaactctgtttgggtattctgggagcccagaaagggtgttcatcgccatgggaagcagggagctatggcaagaagtgacatcaaagtgatggggaggagttgaccaggcgggagtgtaaggggcaatgggagcaacagcactgaggtgaggagcagtcaatttgctgtgtttatggaactaaaattcatctggtgtagcccaagtggcaaggccagggctggcaagaagaagattggagaggtgggcgggagctagatcacaggaaactttttactggacttcatcctgcaggtgggagatagaaagccatcctgtttagggagacaggttgtggagagtattaaggacaagagcctgagggtcagaattggaaaggagctcagctggatggaaacatagaaggcagacgagagttgcatacatgtctggagggcctgggcctgaaaaggaaactgcgtgaaagtttatatttggtttttagggcaaagagattgaaagaggggagtcacataatcagcatacgtttatgaagattacccccacagctgtgtggcaagtgatcaaaaaggaacaggaccagagaagagcaggaaaactggtcagaaagcaggcgccctaaccctggattgccccctgtgggtcactttctcagtcattttgagctcagcctaatcaaagactgaggttatgaagtcgatcctagatggccttgcagataccaccttccgcaccatcaccactgacctcctgtacgtgggctcaaatgacattcagtacgaagacatcaaaggtgacatggcatccaaattagggtacttcccacagaaattccctttaacttcctttaggggaagtcccttccaagagaagatgactgcgggagacaacccccagctagtcccagcagaccaggtgaacattacagaattttacaacaagtctctctcgtccttcaaggagaatgaggagaacatccagtgtggggagaacttcatggacatagagtgtttcatggtcctgaaccccagccagcagctggccattgcagtcctgtccctcacgctgggcaccttcacggtcctggagaacctcctggtgctgtgcgtcatcctccactcccgcagcctccgctgcaggccttcctaccacttcatcggcagcctggcggtggcagacctcctggggagtgtcatttttgtctacagcttcattgacttccacgtgttccaccgcaaagatagccgcaacgtgtttctgttcaaactgggtggggtcacggcctccttcactgcctccgtgggcagcctgttcctcacagccatcgacaggtacatatccattcacaggcccctggcctataagaggattgtcaccaggcccaaggccgtggtggcgttttgcctgatgtggaccatagccattgtgatcgccgtgctgcctctcctgggctggaactgcgagaaactgcaatctgtttgctcagacattttcccacacattgatgaaacctacctgatgttctggatcggggtcaccagcgtactgcttctgttcatcgtgtatgcgtacatgtatattctctggaaggctcacagccacgccgtccgcatgattcagcgtggcacccagaagagcatcatcatccacacgtctgaggatgggaaggtacaggtgacccggccagaccaagcccgcatggacattaggttagccaagaccctggtcctgatcctggtggtgttgatcatctgctggggccctctgcttgcaatcatggtgtatgatgtctttgggaagatgaacaagctcattaagacggtgtttgcattctgcagtatgctctgcctgctgaactccaccgtgaaccccatcatctatgctctgaggagtaaggacctgcgacacgctttccggagcatgtttccctcttgtgaaggcactgcgcagcctctggataacagcatgggggactcggactgcctgcacaaacacgcaaacaatgcagccagtgttcacagggccgcagaaagctgcatcaagagcacggtcaagattgccaaggtaaccatgtctgtgtccacagacacgtctgccgaggctctgtgagcctgatgcctccctggcagcacaggaaaagaatttttttttttaagctcaaaatctagaagagtctattgtctccttggttatatttttttaactttaccatgctcaatgaaaaggtgattgtcaccatgatcacttatcagtttgctaatgtttccatagtttaggtactcaaactccattctccaggggtttacagtgaagaaagcctgttgtttaagtgactgaacgatccttcaaagtctcaatgaaataggagggaaacctttggctacacaattggaagtctaagaacccatggaaaaatgccatcaaatgaataatgcctttgtaaccacaactttcactataatgtgaaatgtaactgtccgtagtatcagagatgtccatttttacaagttatagtactagagatattttgtaaaatgtattatgtcctgtgagatgtgtatcagtgtttatgtgctattaatatttgtttagttcagcaaaactgaaaggtagacttttatgagaacaatggacaagcagtggatacgtgtcaatgtgtgcactttttttctatattattgcccatgatataactttagaaataaaccttaatatttcttcaaatatctctatttaattttgacactgaaataaccgtaaaggtttatttttctgttacctcaacaagaagaatttgaagacttcaaaatattgagcagaattcattcatacttaaaaatttattagccctgcattttcataggaagacacattatcttctggactatagctgttctaatggattataatcagaatggaagagagaaagcatattgactttttttgagcgacatctctgactttctttagtctttagctattactggatctcttaagacagcatgtgttaatcttaatgtatatcgttatcactgtgcagttgctgtttacttgaatagtattgtgttcctatattccaggtttaagtagatttcatgcctgggtggccaaacaacagtcttcattttttttaattgaaaagaagtagtgtctggatcagtaaaattatactgtgtgtgagtgtgaatataaatgtgtgtatgtgtgtttctgtcctgtaactgttacagtaatgtcataaagtgagaaaactgtgaccaagtataaacttttaccacttgctgcactcttgcacatggattcagtttctaaaattgagttcttcctgtaatcttgttgataaaaatactgactccaaccattcaaaaatttcaccccatccctccttaagagattggatcaagtattactaaattgacctttaggtattacacaagaccagtgcttagcaaaaaataatgacaggcatccaaggaagggatgtatttgtagtgttattgccaggaaaggagagtactttggtttctgagcaccgaatattgagcaatatgtcagtcactaaaaggaagacagttctacagaaaaacaatggtaacatttttcaatagcgtgtgtagatagtatgcactatatacatcacgttaaagtaggactatcacacccagcccatgtggctaaaaaagctgaatcagacagtggatgagacacacaacggcagtgaagaaccgatacacttggcattgacgtctagctatgctgtatctgtgctttgcccacatgcccttggtgacagctgagcacccagctctgtcttggtaggtttgggctaaggaacaaatctctcctttgctcgtggttagcaagatacactcaagcatgaagataaacacagctgctttcttcttacaccccggtctcatgctccttaatggcgccatgggtgcttgttgggcctttttccagtaaggaatgatattgctgaagaatctacttaaccctgacaaattttaattataatctcttcttatacagataaaacatgactcctacaaggccccaaggtttacatagtctgaagtgaagtacagagctggcatctatctggtgatttctagctctcgagatacccaagcagcctgatggggcagttccccttcttacggttcacgctctaaggcaggatgtggcttatgagatactttgcattgtctgtctgcacaccttgaatctgcctgctggctcccttactttacctctctgtcatgtgcagatgaaggctcagggtgctagaggattagtaagatctctttctaaagacaggagagattatttacaagaagaactcaccagggtttagtttgcatttaagaattgccagtcttttgtcctgcatcatcttgaacattaatccacatgtttcagagctcaccaggcagtaccaatgctcttttcacagctatgaagagctagagaaattcttgttatggtagaaaaatttcacgattcatttttgaaactgcatttgtgcgtatgcagtgtagattttatagtgtgttgtgctttcaagatctaaatcatatataataaattaagggacaatggggctgacagcactaaacttggtgcttattgatattctaagaaatatctgtgaaatatcatcacgtatgttatacaaccttcatttaaaaaggtttaaaactagttagattcactttgacacttttcatatcatttcttaacccaagtgacgaaaacattgtccccaatgaatatactcattagaattaccatttgttaatatcactcattaattaaccccataattagatccattaatttaaatgatttaaatttaagtaagttttataaggtctgacatcagaggtatcttactttcctctgaggatgatgtacttgccctgaccatgcattttaccatcacacatgttcagaaagggccaaattcccaacctgctcattttttttttatcagagtcatgatgaatcagtcctagaatgtttcatttgcacaagtagggctgcctccaagaggaacctctgatttattttgtatgaaatatatgtgaaaggatatgaatctgagagatgctgtagacatctgtcctacacttgagatgatttccaagcctctctggcactttgagttaagtctatctggtattaaatgccaaggaccttttgctgcctaaatccactctgcaggaaataggcccaaccaccagatgagaattaggccctggatgagtagcgctatagttactgtcctgttgattaatttctgccatttcatgtccataaaagagaccacccatatcatgcacacaattagatttctcacactctaactgtatatttgtatgatattttaaaatctcctaaatgctgggcaatggctattaacaattaattgtcttgcactggccttctgatgaaatgttaacaatgcctattgtaatatagaaaaaaacattctatctactgatttgggctgaatgtatgtaaataggtttctaaaaagtcagatgtttgagcagtggcctacaaatcagtaattttcggatgggagagtttctttacattgccgtggcatcttaaaagctatcttcatgtaaattgactgtactaggcctactggggatcagagttcccaagaaaggaaaccttttcttgtatctggattcaaatttatttccaatgtttcaagcgggaaacatgactctttattgtctgtaaatctaacattattacttttcctcttagaagaatattgtattgttagatgtttgttgagctggtaacatcgttgcaaccactgcaatatcttcgttagtaatctgtataatactttgtatacaagtactggtaagattgttattaaatgtagcttcagtcattaaattactatagcaaagtagtacttcttctgtaatatttacaatgtattaagcccacagtatattttatttcaatgtaattaaactgttaacttattcaaagagaaaacatctcatcatgtctattgtccaaagttacctggaatcaaataaaaattctagattaccatgaagaacataaaa

SEQ ID NO: 60947 - DNA, 2122 bp, Artificial Sequence
  derived and/or modified sequence
tcggcttatttgttttccctcctcttaggattgccccctgtgggtcactttctcagtcattttgagctcagcctaatcaaagactgaggttatgaagtcgatcctagatggccttgcagataccaccttccgcaccatcaccactgacctcctgtacgtgggctcaaatgacattcagtacgaagacatcaaaggtgacatggcatccaaattagggtacttcccacagaaattccctttaacttcctttaggggaagtcccttccaagagaagatgactgcgggagacaacccccagctagtcccagcagaccaggtgaacattacagaattttacaacaagtctctctcgtccttcaaggagaatgaggagaacatccagtgtggggagaacttcatggacatagagtgtttcatggtcctgaaccccagccagcagctggccattgcagtcctgtccctcacgctgggcaccttcacggtcctggagaacctcctggtgctgtgcgtcatcctccactcccgcagcctccgctgcaggccttcctaccacttcatcggcagcctggcggtggcagacctcctggggagtgtcatttttgtctacagcttcattgacttccacgtgttccaccgcaaagatagccgcaacgtgtttctgttcaaactgggtggggtcacggcctccttcactgcctccgtgggcagcctgttcctcacagccatcgacaggtacatatccattcacaggcccctggcctataagaggattgtcaccaggcccaaggccgtggtggcgttttgcctgatgtggaccatagccattgtgatcgccgtgctgcctctcctgggctggaactgcgagaaactgcaatctgtttgctcagacattttcccacacattgatgaaacctacctgatgttctggatcggggtcaccagcgtactgcttctgttcatcgtgtatgcgtacatgtatattctctggaaggctcacagccacgccgtccgcatgattcagcgtggcacccagaagagcatcatcatccacacgtctgaggatgggaaggtacaggtgacccggccagaccaagcccgcatggacattaggttagccaagaccctggtcctgatcctggtggtgttgatcatctgctggggccctctgcttgcaatcatggtgtatgatgtctttgggaagatgaacaagctcattaagacggtgtttgcattctgcagtatgctctgcctgctgaactccaccgtgaaccccatcatctatgctctgaggagtaaggacctgcgacacgctttccggagcatgtttccctcttgtgaaggcactgcgcagcctctggataacagcatgggggactcggactgcctgcacaaacacgcaaacaatgcagccagtgttcacagggccgcagaaagctgcatcaagagcacggtcaagattgccaaggtaaccatgtctgtgtccacagacacgtctgccgaggctctgtgagcctgatgcctccctggcagcacaggaaaagaatttttttttttaagctcaaaatctagaagagtctattgtctccttggttatatttttttaactttaccatgctcaatgaaaaggtgattgtcaccatgatcacttatcagtttgctaatgtttccatagtttaggtactcaaactccattctccaggggtttacagtgaagaaagcctgttgtttaagtgactgaacgatccttcaaagtctcaatgaaataggagggaaacctttggctacacaattggaagtctaagaacccatggaaaaatgccatcaaatgaataatgcctttgtaaccacaactttcactataatgtgaaatgtaactgtccgtagtatcagagatgtccatttttacaagttatagtactagagatattttgtaaaatgtattatgtcctgtgagatgtgtatcagtgtttatgtgctattaatatttgtttagttcagcaaaactgaaaggtagacttttatgagaacaatggacaagcagtggatacgtgtcaatgtgtgcactttttttctatattattgcccatgatataactttagaaataaaccttaatatttcttc

SEQ ID NO: 60948 - DNA, 591 bp, Artificial Sequence
  derived and/or modified sequence
gcagagctctccgtagtcagtgggggatatttcgttctagcggacaaccagcccctgagctgggcgagaggtgccaagggagcttctgtcccgaggaccaggggatgcgaaggatgtctcccactccaggcgaggagcgctcttggctgagggcaaagagattgaaagaggggagtcacataatcagcatacgtttatgaagattacccccacagctgtgtggcaagtgatcaaaaaggaacaggaccagagaagagcaggaaaactggtcagaaagcaggcgccctaaccctggattgccccctgtgggtcactttctcagtcattttgagctcagcctaatcaaagactgaggttatgaagtcgatcctagatggccttgcagataccaccttccgcaccatcaccactgacctcctgtacgtgggctcaaatgacattcagtacgaagacatcaaaggtgacatggcatccaaattagggtacttcccacagaaattccctttaacttcctttaggggaagtcccttccaagagaagatgactgcgggagacaacccccagctagtcccagcagaccaggtgaacatt

SEQ ID NO: 60949 - DNA, 1419 bp, Artificial Sequence
  derived and/or modified sequence
atgaagagcatcctggacggcctggccgacaccaccttcagaaccatcaccaccgacctgctgtacgtgggcagcaacgacatccagtacgaggacatcaagggcgacatggccagcaagctgggctacttcccccagaagttccccctgaccagcttcagaggcagccccttccaggagaagatgaccgccggcgacaacccccagctggtgcccgccgaccaggtgaacatcaccgagttctacaacaagagcctgagcagcttcaaggagaacgaggagaacatccagtgcggcgagaacttcatggacatcgagtgcttcatggtgctgaaccccagccagcagctggccatcgccgtgctgagcctgaccctgggcaccttcaccgtgctggagaacctgctggtgctgtgcgtgatcctgcacagcagaagcctgagatgcagacccagctaccacttcatcggcagcctggccgtggccgacctgctgggcagcgtgatcttcgtgtacagcttcatcgacttccacgtgttccacagaaaggacagcagaaacgtgttcctgttcaagctgggcggcgtgaccgccagcttcaccgccagcgtgggcagcctgttcctgaccgccatcgacagatacatcagcatccacagacccctggcctacaagagaatcgtgaccagacccaaggccgtggtggccttctgcctgatgtggaccatcgccatcgtgatcgccgtgctgcccctgctgggctggaactgcgagaagctgcagagcgtgtgcagcgacatcttcccccacatcgacgagacctacctgatgttctggatcggcgtgaccagcgtgctgctgctgttcatcgtgtacgcctacatgtacatcctgtggaaggcccacagccacgccgtgagaatgatccagagaggcacccagaagagcatcatcatccacaccagcgaggacggcaaggtgcaggtgaccagacccgaccaggccagaatggacatcagactggccaagaccctggtgctgatcctggtggtgctgatcatctgctggggccccctgctggccatcatggtgtacgacgtgttcggcaagatgaacaagctgatcaagaccgtgttcgccttctgcagcatgctgtgcctgctgaacagcaccgtgaaccccatcatctacgccctgagaagcaaggacctgagacacgccttcagaagcatgttccccagctgcgagggcaccgcccagcccctggacaacagcatgggcgacagcgactgcctgcacaagcacgccaacaacgccgccagcgtgcacagagccgccgagagctgcatcaagagcaccgtgaagatcgccaaggtgaccatgagcgtgagcaccgacaccagcgccgaggccctgtag

SEQ ID NO: 60950 - DNA, 237 bp, Artificial Sequence
  derived and/or modified sequence
atgaagagcatcctggacggcctggccgacaccaccttcagaaccatcaccaccgacctgctgtacgtgggcagcaacgacatccagtacgaggacatcaagggcgacatggccagcaagctgggctacttcccccagaagttccccctgaccagcttcagaggcagccccttccaggagaagatgaccgccggcgacaacccccagctggtgcccgccgaccaggtgaacatctag

SEQ ID NO: 60951 - protein, 425 aa, Artificial Sequence
  derived and/or modified sequence
MDSSCHNATTKMLATAPARGNMMSTSKPLAFSIERIMARTPEPKALPVPHFLQGALPKGEPKHSLHLNSSIPCMIPFVPVAYDTSPKAGVTGSEPRKASLEAPAAPAAVPSAPAFSCSDLLNCALSLKGDLARDALPLQQYKLPKTYLAERNKLVVPAVEKYPSGVAFKDLSQAQLQHYMKESAQLLSEKIAFKTSDFSRGSPNAKPKVFTCEVCGKVFNAHYNLTRHMPVHTGARPFVCKVCGKGFRQASTLCRHKIIHTQEKPHKCNQCGKAFNRSSTLNTHTRIHAGYKPFVCEFCGKGFHQKGNYKNHKLTHSGEKQFKCNICNKAFHQVYNLTFHMHTHNDKKPFTCPTCGKGFCRNFDLKKHVRKLHDSSLGLARTPAGEPGTEPPPPLPQQPPMTLPPLQPPLPTPGPLQPGLHQGHQ

SEQ ID NO: 60952 - DNA, 688 bp, Artificial Sequence
  derived and/or modified sequence
gcccgaggtcggcgggacctgatcgaaggcagcgccgcgtcgaccaccccgggagccggacgcttgggagccccagcccggcagcggcgcccggtcactgaagttgcgccccaactcccagccgcctccaagcttctcgagctaagtttcctgacccctccaagggagtctcacagagctcggtggccctcggccttgccaacgtcactttaactgtttggaactcgtgagcaagaaccgagaagtggagagcccagccggggagttttcagcttttctgtttcacttcgggcttcttctattcaaatggctctgcgctggccaccgaatcctgaatgaggcggggctcctctgccccaactccagcagcgggaacttggttcccctgggcagccgggggcagggggcgccaaggccgtggcgataatgaaggctgagacggccaaggccagcgggtcggcgcggggcactcccgggccggagtggccatcggccggagttcaggaggtctgtgacaagcagggaacaaggcaacggacggcgcaacccagccccggctgacggacgctggcgactcagacatggacagtagctgccacaacgcgactaccaaaatgttagcgactgctccagctcggggcaacatgatgagcacgtccaaacccttggctttctccattgaacgaat

SEQ ID NO: 60953 - DNA, 1368 bp, Artificial Sequence
  derived and/or modified sequence
cagggaacaaggcaacggacggcgcaacccagccccggctgacggacgctggcgactcagacatggacagtagctgccacaacgcgactaccaaaatgttagcgactgctccagctcggggcaacatgatgagcacgtccaaacccttggctttctccattgaacgaatcatggcgcgcaccccagagcccaaggccctgccagtcccccacttcctgcagggagccttacccaagggggaacccaagcactctctgcatctcaactcgtcgatcccctgcatgatccccttcgtgcctgtggcctacgacacgagccccaaggcaggagtgacgggctccgagccgcggaaggccagtctggaggccccggcggcgcccgcggcggtgccctcggctcccgcattcagctgcagcgacctgctcaactgcgcactgagtctcaagggcgacctggcccgcgacgcgctgccgctgcagcagtacaagctgccaaaaacgtatttagccgaaaggaataaactggtggtcccggcggtggagaaatacccttctggagtagctttcaaagacctgtcccaggctcagctgcagcattacatgaaagaaagcgcccagcttctgtcggaaaaaatcgcgttcaaaacctcggatttcagccgaggctctcctaatgccaagcccaaagttttcacttgcgaagtgtgtggaaaggtctttaatgcgcactataacttaacccgtcacatgccagtgcacacaggagccagacccttcgtttgcaaagtgtgcggaaaaggtttcaggcaagcaagcaccctgtgcaggcacaagatcattcacacgcaggaaaaacctcacaaatgtaaccagtgtggcaaagcatttaatagaagttccactttaaacactcatacccgaatacacgcgggctacaaaccgtttgtgtgtgaattctgtggcaaagggtttcatcaaaaagggaattacaaaaaccacaagttgacccacagcggggagaagcagttcaagtgcaatatctgcaacaaggctttccaccaggtttacaacctcaccttccacatgcacacccacaacgacaagaagcctttcacctgccccacgtgcggcaagggtttctgcaggaactttgacctcaagaagcatgtccgcaagctgcacgacagcagcctggggctggcccgcacgccagctggcgaaccaggcactgaaccgccgcccccgctaccgcagcagccgccgatgacgctgcctcctctgcagccgccgctgccaaccccggggcccctgcagcccgggctccaccagggccaccagtgatcgaggctaagggtcctcccagcctcag

SEQ ID NO: 60954 - DNA, 108 bp, Artificial Sequence
  derived and/or modified sequence
atggattcaagctgccataacgcgaccaccaaaatgctggcgacggcgcccgcccggggcaacatgatgagtacttccaagcccttggccttcagcatcgaaaggtag

SEQ ID NO: 60955 - DNA, 1278 bp, Artificial Sequence
  derived and/or modified sequence
atggactccagctgtcacaatgccaccacaaagatgcttgccacggcgccagctagagggaatatgatgagcacctctaagcctctggcgttttcaattgaacgcataatggcaaggacaccagagcctaaggcgctgcccgttccgcatttcctgcagggagcactccccaaaggcgaacccaagcactctctccaccttaactcaagcatcccatgcatgattccatttgttcccgtagcttacgacacatctccaaaagcgggagtgacgggatccgagcctcgcaaggcctcattggaggccccggccgccccagccgcagtacccagcgcccctgcattctcttgcagcgatctgctgaattgcgcgctttcccttaagggcgatcttgctagagatgctttacctctgcagcagtataagctgccaaaaacatatctggcggaacgcaacaagctggttgttcccgctgtggaaaaatatccttcaggcgtagcatttaaggacctttctcaggcacagttacagcattacatgaaagagtcagcgcaactgctatctgagaaaatcgcctttaagacaagcgacttctcaagaggaagccccaacgcaaagcctaaagtgtttacttgcgaggtctgtggcaaagtgttcaatgctcactataatcttaccaggcacatgcctgtgcatacaggagcgagaccgttcgtgtgcaaagtctgcgggaaggggttccgccaggcatccacgctttgcagacacaaaattattcatactcaggagaagcctcataagtgtaatcaatgtggaaaggctttcaacaggagctcgaccctcaacacccatactcggatccacgcgggatacaaaccctttgtgtgcgagttttgtggtaaggggttccaccagaagggtaactataaaaaccataagcttacacattctggcgagaagcagttcaagtgcaacatctgtaataaggccttccatcaggtatacaacctcacgtttcatatgcacacccataatgacaaaaagccgtttacgtgcccaacttgtggaaaaggattttgcaggaactttgacttgaagaagcacgttagaaagcttcatgacagctcgttgggcctggcccggactccagcaggtgagcctggtacagagcctccccctcccctgccacagcagccccctatgactcttcctcccttgcagcctccactgcctacccccgggccgctgcagcctggtctgcaccagggacatcaatag

SEQ ID NO: 60956 - DNA, 108 bp, Artificial Sequence
  derived and/or modified sequence
atggacagcagctgccacaatgccaccaccaagatgctggccacagccccagcccggggcaacatgatgagcaccagcaagcccctggccttcagcattgaaagatag

SEQ ID NO: 60957 - DNA, 1278 bp, Artificial Sequence
  derived and/or modified sequence
atggacagcagctgccacaatgccaccaccaagatgctggccacagccccagcccggggcaacatgatgagcaccagcaagcccctggccttcagcattgagcgcatcatggcccggaccccagagcccaaggccctgcctgtgccccacttcctgcagggcgccctgcccaagggggagcccaagcacagcctgcacctgaacagcagcatcccctgcatgatcccctttgtgcctgtggcctatgacaccagccccaaggccggcgtgactggaagtgagcccaggaaggccagcctggaggccccagctgccccagctgctgtgcccagcgccccagccttcagctgcagcgacctgctgaactgtgccctgagcctgaagggggacctggccagagatgccctgcccctgcagcagtacaagctgcccaagacctacctggccgagaggaacaagctggtggtgcctgctgtggagaagtaccccagcggcgtggccttcaaggacctgagccaggcccagctgcagcactacatgaaggagagcgcccagctgctgtctgagaagatcgccttcaagaccagtgacttcagccggggcagccccaatgccaagcccaaggtgttcacctgtgaggtgtgtgggaaggtgttcaatgcccactacaacctgaccaggcacatgcctgtgcacactggagcccggccctttgtgtgcaaggtgtgtgggaagggcttccggcaggccagcaccctgtgccgccacaagatcatccacacccaggagaagccccacaagtgcaaccagtgtgggaaggccttcaacagaagcagcaccctgaacacccacacccgcatccatgctggctacaagccctttgtgtgtgagttctgtgggaagggcttccaccagaagggcaactacaagaaccacaagctgacccacagcggggagaagcagttcaagtgcaacatctgcaacaaggccttccaccaggtgtacaacctgaccttccacatgcacacccacaatgacaagaagcccttcacctgccccacctgtgggaagggcttctgcaggaactttgacctgaagaagcacgtgaggaagctgcatgacagcagcctgggcctggcccggaccccagctggggagcctggaacagagcccccaccacccctgccccagcagccccccatgaccctgccccccctgcagccccccctgcccaccccaggccccctgcagcccggcctgcaccagggccaccagtag

SEQ ID NO: 60958 - DNA, 108 bp, Artificial Sequence
  derived and/or modified sequence
atggacagcagctgccacaacgccaccaccaagatgctggccaccgctcccgcccggggaaacatgatgtccaccagcaaacccttggccttttccattgagcgctag

SEQ ID NO: 60959 - DNA, 1278 bp, Artificial Sequence
  derived and/or modified sequence
atggacagcagctgccacaacgccaccaccaagatgctggccaccgccccagctcggggcaacatgatgtctacctctaagcctctggcttttagcatcgagaggataatggctaggactccagagcccaaagctcttcccgtccctcacttcctccagggggccctgccaaagggggaacctaagcactccctgcacctgaactcttcgataccttgtatgatccccttcgtgccagttgcctatgatacatcaccgaaagctggagtgacgggctctgaaccccgcaaagcatctttggaagcacccgcagctcccgcagccgttccctccgctcctgccttctcctgctccgatctgctgaactgcgctctgagcctcaagggcgacctggctcgcgacgctctaccactccaacagtacaagctcccaaagacctatttggccgagcggaacaagctggtcgtcccagccgtagagaagtatccctctggcgtcgccttcaaagacctttcccaagcccagttacaacattacatgaaagaatccgcacagctgctcagtgagaaaattgcgttcaagacaagcgattttagcagagggtcacccaatgcaaaacctaaggtgttcacttgcgaggtgtgtggtaaagtcttcaacgctcattacaacttgactcggcacatgccagtgcatactggtgcccggccctttgtatgtaaggtatgcggaaaaggatttcggcaggcaagtaccctgtgccggcacaaaattattcatacgcaggagaagccgcacaaatgcaatcagtgtggtaaggctttcaaccgatcttccacgctgaatactcatacaagaatccatgcaggttataagccgtttgtgtgcgaattctgcggcaaaggttttcaccaaaagggcaattataaaaaccataagctgacccattcaggcgaaaagcaattcaagtgcaacatatgcaataaagcattccaccaggtttacaatctaactttccacatgcacacacacaacgataagaaaccgttcacatgccccacctgtggcaagggtttttgcaggaatttcgatttgaaaaaacacgtgcgtaaactccacgacagcagccttggtctggcacgcacacctgctggcgaaccaggtacagagccgccgccacccctgccacagcaacctcctatgaccctgccgccactccagccgcccctcccaacccctggcccgctgcaacctggtctgcaccaggggcaccagtag

SEQ ID NO: 60960 - DNA, 108 bp, Artificial Sequence
  derived and/or modified sequence
atggactcatcttgccataatgctaccaccaagatgcttgcgactgctcctgctaggggcaacatgatgtcgaccagcaagccactggctttcagcattgagcgatag

SEQ ID NO: 60961 - DNA, 1278 bp, Artificial Sequence
  derived and/or modified sequence
atggactcctcatgtcacaatgccactacaaaaatgttggccaccgcaccggctaggggaaatatgatgtccacttccaagccattagcatttagtatcgaacgtattatggccaggacccctgagcccaaggctctgccagttccacacttcctacagggggctctgcccaagggtgagcccaaacactctctgcacttgaatagcagcatcccttgtatgatccccttcgtgcctgtggcatacgacacctcacccaaagctggagtgactggatcagagccccgtaaggcttcattggaggcgcctgccgctcccgctgctgtgccatcggcgcctgccttcagttgctccgatctgctgaattgcgccctctctttgaaaggagatctggcaagggacgctttaccactacagcagtacaagctcccaaaaacctaccttgctgaacgcaataaattggtcgtgccagcagtggagaagtatcctagcggagtcgcctttaaagatctgagtcaggcacagttacagcactatatgaaagaatccgctcagctgctctccgaaaaaattgcttttaaaaccagcgacttttcccggggatcacccaacgcaaaaccgaaggtgtttacctgcgaagtttgtggcaaggtattcaatgcacattacaacctgacaagacacatgcccgtccacactggggctcgcccatttgtctgcaaggtttgcggcaagggattcagacaggcttcgactctgtgtcgacacaagattattcacacccaagaaaagccccataagtgcaatcagtgcggcaaagcttttaatcggtcctcaacactgaatactcacacccggattcatgctggctataaaccttttgtgtgcgagttctgtgggaagggctttcatcaaaagggaaattataagaatcataaactgactcactctggtgagaaacaattcaagtgcaatatctgtaataaagctttccaccaggtgtataacctgacatttcatatgcatacacacaatgataagaagccatttacatgccccacatgcggcaaaggtttttgccgtaattttgaccttaaaaagcacgtgcgtaagctccatgacagctctctcgggctcgcaagaacgcctgccggagaaccgggaactgaaccaccacctcctttgccgcagcagcctcccatgaccctgcctcctttgcagcctcccctgcccacgccaggtccgctgcagccaggtctacatcagggccaccaatag

SEQ ID NO: 60962 - DNA, 369 bp, Artificial Sequence
  derived and/or modified sequence
aggataccattgtcttcctgccccaaaccgtgcccagggagaggtgggaggtgatgggggatctgtgcagtttgggggctcagtcaagacgagctctgcgttacgggaggaacaggaagcccagtgggaaaattggcctaagtctggggttctgacgacagcccctggcttctttcttggcagataagtgcatgacggaacaataggactccccagggctgaagctgggatcccggccagccaggtgacccccacgctctggatgtctctgctctgttccttccccgagcccctgccccggctccccgccaaagcaaccctgcccactcaggcttcatcctgcacaataaactccggaagcaagtcagt

SEQ ID NO: 60963 - DNA, 108 bp, Artificial Sequence
  derived and/or modified sequence
atggacagcagctgccacaacgccaccaccaagatgctggccaccgcccccgccagaggcaacatgatgagcaccagcaagcccctggccttcagcatcgagagatag

SEQ ID NO: 60964 - DNA, 1278 bp, Artificial Sequence
  derived and/or modified sequence
atggacagcagctgccacaacgccaccaccaagatgctggccaccgcccccgccagaggcaacatgatgagcaccagcaagcccctggccttcagcatcgagagaatcatggccagaacccccgagcccaaggccctgcccgtgccccacttcctgcagggcgccctgcccaagggcgagcccaagcacagcctgcacctgaacagcagcatcccctgcatgatccccttcgtgcccgtggcctacgacaccagccccaaggccggcgtgaccggcagcgagcccagaaaggccagcctggaggcccccgccgcccccgccgccgtgcccagcgcccccgccttcagctgcagcgacctgctgaactgcgccctgagcctgaagggcgacctggccagagacgccctgcccctgcagcagtacaagctgcccaagacctacctggccgagagaaacaagctggtggtgcccgccgtggagaagtaccccagcggcgtggccttcaaggacctgagccaggcccagctgcagcactacatgaaggagagcgcccagctgctgagcgagaagatcgccttcaagaccagcgacttcagcagaggcagccccaacgccaagcccaaggtgttcacctgcgaggtgtgcggcaaggtgttcaacgcccactacaacctgaccagacacatgcccgtgcacaccggcgccagacccttcgtgtgcaaggtgtgcggcaagggcttcagacaggccagcaccctgtgcagacacaagatcatccacacccaggagaagccccacaagtgcaaccagtgcggcaaggccttcaacagaagcagcaccctgaacacccacaccagaatccacgccggctacaagcccttcgtgtgcgagttctgcggcaagggcttccaccagaagggcaactacaagaaccacaagctgacccacagcggcgagaagcagttcaagtgcaacatctgcaacaaggccttccaccaggtgtacaacctgaccttccacatgcacacccacaacgacaagaagcccttcacctgccccacctgcggcaagggcttctgcagaaacttcgacctgaagaagcacgtgagaaagctgcacgacagcagcctgggcctggccagaacccccgccggcgagcccggcaccgagccccccccccccctgccccagcagccccccatgaccctgccccccctgcagccccccctgcccacccccggccccctgcagcccggcctgcaccagggccaccagtag

SEQ ID NO: 60965 - protein, 148 aa, Artificial Sequence
  derived and/or modified sequence
MAESLRSPRRSLYKLVGSPPWKEAFRQRCLERMRNSRDRLLNRYRQAGSSGPGNSQNSFLVQEVMEEEWNALQSVENCPEDLAQLEELIDMAVLEEIQQELINQEQSIISEYEKSLQFDEKCLSIMLAEWEANPLICPVCTKPVILGL

SEQ ID NO: 60966 - DNA, 438 bp, Artificial Sequence
  derived and/or modified sequence
atggccgagagcctgagaagccccagaagaagcctgtacaagctggtgggcagccccccctggaaggaggccttcagacagagatgcctggagagaatgagaaacagcagagacagactgctgaacagatacagacaggccggcagcagcggccccggcaacagccagaacagcttcctggtgcaggaggtgatggaggaggagtggaacgccctgcagagcgtggagaactgccccgaggacctggcccagctggaggagctgatcgacatggccgtgctggaggagatccagcaggagctgatcaaccaggagcagagcatcatcagcgagtacgagaagagcctgcagttcgacgagaagtgcctgagcatcatgctggccgagtgggaggccaaccccctgatctgccccgtgtgcaccaacctgctgagctag

SEQ ID NO: 60967 - DNA, 447 bp, Artificial Sequence
  derived and/or modified sequence
atggccgagagcctgagaagccccagaagaagcctgtacaagctggtgggcagccccccctggaaggaggccttcagacagagatgcctggagagaatgagaaacagcagagacagactgctgaacagatacagacaggccggcagcagcggccccggcaacagccagaacagcttcctggtgcaggaggtgatggaggaggagtggaacgccctgcagagcgtggagaactgccccgaggacctggcccagctggaggagctgatcgacatggccgtgctggaggagatccagcaggagctgatcaaccaggagcagagcatcatcagcgagtacgagaagagcctgcagttcgacgagaagtgcctgagcatcatgctggccgagtgggaggccaaccccctgatctgccccgtgtgcaccaagcccgtgatcctgggcctgtag

SEQ ID NO: 60968 - DNA, 438 bp, Artificial Sequence
  derived and/or modified sequence
atggcagaatctcttcgtagccctaggcgctcactgtacaagctggtgggtagtcctccatggaaagaagcatttcggcagaggtgcctggaacggatgagaaattctcgcgaccgcctactgaatagatatcgccaggcaggttcgagcgggcctggaaacagtcagaactccttcctcgtgcaggaagttatggaagaggagtggaacgccttgcagtctgtggaaaactgtcctgaagacttagcacagctggaggagctgatcgatatggccgtgctggaagagattcagcaggagcttattaatcaggagcagagcataatctccgagtacgagaagtccttgcaattcgacgagaaatgtctctctataatgctggctgagtgggaggcaaacccgcttatttgtccagtttgtaccaatcttctctcttag

SEQ ID NO: 60969 - DNA, 447 bp, Artificial Sequence
  derived and/or modified sequence
atggcggagtctctcagaagtccaaggagaagtctatacaagctcgttggatctcccccttggaaggaagcattcagacaacgttgcctcgagagaatgcggaatagtagggatcgacttctgaacaggtacagacaggccgggagctcaggtcccgggaattctcagaactctttcctcgtccaggaagtgatggaagaggagtggaatgcccttcagtccgttgaaaactgcccggaggatctggcacaacttgaggaacttatagatatggcggtcctcgaggaaatccagcaggaactcatcaatcaggaacaaagtatcatctctgagtacgaaaagagtctgcagtttgatgaaaagtgtctctctatcatgttggctgaatgggaggctaaccctctaatctgtcctgtctgcactaaaccggtgatcttggggctttag

SEQ ID NO: 60970 - DNA, 438 bp, Artificial Sequence
  derived and/or modified sequence
atggccgagagcctgcggagccccaggaggagcctgtacaagctggtgggcagccccccctggaaggaggccttccggcagcgctgcctggagaggatgaggaacagccgggaccggctgctgaaccgctaccggcaggccggcagcagcggccctggcaacagccagaacagcttcctggtgcaggaggtgatggaggaggagtggaatgccctgcagagcgtggagaactgcccagaggacctggcccagctggaggagctgattgacatggctgtgctggaggagatccagcaggagctgatcaaccaggagcagagcatcatcagtgaatatgagaagagcctgcagtttgatgagaagtgcctgagcatcatgctggccgagtgggaggccaaccccctcatctgccctgtgtgcaccaacctgctgtcctag

SEQ ID NO: 60971 - DNA, 447 bp, Artificial Sequence
  derived and/or modified sequence
atggccgagagcctgcggagccccaggaggagcctgtacaagctggtgggcagccccccctggaaggaggccttccggcagcgctgcctggagaggatgaggaacagccgggaccggctgctgaaccgctaccggcaggccggcagcagcggccctggcaacagccagaacagcttcctggtgcaggaggtgatggaggaggagtggaatgccctgcagagcgtggagaactgcccagaggacctggcccagctggaggagctgattgacatggctgtgctggaggagatccagcaggagctgatcaaccaggagcagagcatcatcagtgaatatgagaagagcctgcagtttgatgagaagtgcctgagcatcatgctggccgagtgggaggccaaccccctcatctgccctgtgtgcaccaagcctgtgatcctgggcctgtag

SEQ ID NO: 60972 - DNA, 438 bp, Artificial Sequence
  derived and/or modified sequence
atggccgagagcctgcggagcccccggcggagcctgtacaagctggtgggctctccgccttggaaagaagcctttagacagcgctgcctggaacgaatgcgtaattctagggacagactattgaacagataccggcaggcaggctcttccggaccaggtaactcccaaaacagttttctggtacaggaagttatggaagaagaatggaacgctttgcagtcagttgagaactgccctgaggatttggcccagttagaggaattgatcgatatggcagttctcgaagaaatccagcaagagttaataaatcaagaacaaagcattatatctgaatacgaaaaatctctgcagtttgacgagaaatgtctgtctattatgctggccgaatgggaggcaaatcccctgatttgtcccgtctgcaccaatttgctctcctag

SEQ ID NO: 60973 - DNA, 447 bp, Artificial Sequence
  derived and/or modified sequence
atggccgagagcctgcggagcccccggcggagcctgtacaagctggttggatcacctccatggaaggaagcattcaggcagaggtgcctcgagcggatgcgcaactctcgagacagactgctaaacaggtataggcaagctggaagcagcggtccaggcaattctcagaactcgttcttggtgcaagaagtcatggaggaggaatggaacgcccttcagtccgtggaaaattgccccgaagatttggcccagctcgaggaattgatcgatatggccgttctggaggaaatacagcaggaattgataaaccaagaacagagcatcatcagcgaatacgaaaaatccttgcagtttgatgagaaatgtcttagcatcatgctggcggagtgggaggcaaatcctttaatctgccctgtatgtactaagccagtcatccttggactatag

SEQ ID NO: 60974 - DNA, 438 bp, Artificial Sequence
  derived and/or modified sequence
atggcagaaagcctccgtagtccacgcagaagcctatataagctggtgggctctcctccttggaaagaagcattccgccagagatgtctggagagaatgcgcaattcaagagacaggctgctgaataggtatcggcaggctggaagcagtgggcctggcaatagccaaaatagtttccttgtccaggaagttatggaagaggaatggaatgcgctccagtcggtagagaattgtcctgaggacctcgcccagctggaagaactgatagacatggctgttctcgaagagattcaacaggagctcattaatcaagaacagtccataatctccgaatatgaaaaaagcctccagttcgatgagaaatgcctgagcatcatgttggcggagtgggaagcaaatcccctcatttgtcccgtctgcaccaatttactcagctag

SEQ ID NO: 60975 - DNA, 447 bp, Artificial Sequence
  derived and/or modified sequence
atggcggagagcctacgcagtcctcgcaggagcttatacaagctggtcgggtcacccccttggaaagaggcatttaggcagcgctgcctcgaaagaatgaggaattcgagggaccggctgctgaatcgctaccgacaagcaggctcaagcgggcctggtaattctcagaacagcttcctggtccaggaagtgatggaggaggagtggaatgcgctgcagagcgtggaaaattgcccagaagatctggcccagctagaggagcttatagatatggccgtgcttgaggagatccaacaagagttgattaatcaggaacagtccatcatttccgagtatgaaaagagcctgcagttcgacgagaaatgtctctcaatcatgctcgccgaatgggaagcgaatccgttgatctgtcccgtgtgtacaaagcccgtgattcttggtctgtag

SEQ ID NO: 60976 - DNA, 447 bp, Artificial Sequence
  derived and/or modified sequence
cgcgaagaggagatggcggagtcgttgaggtctccgcgccgctccctgtacaaactggtgggctcgccgccttggaaagaggctttccggcagagatgcctggagagaatgagaaacagccgggacaggctcctaaacaggtaccgccaggctggaagcagtgggccagggaattctcagaacagctttctagttcaagaggtgatggaagaagagtggaatgctttgcagtcagtggagaattgtccagaagacttggctcagctggaggagctgatagacatggctgtgctggaggaaattcaacaggagctgatcaaccaagagcagtccatcatcagcgagtatgagaagagcttgcagtttgatgaaaagtgtctcagcatcatgctggctgagtgggaggcaaacccactcatctgtcctgtatgtacaaacctcttgagt

SEQ ID NO: 60977 - DNA, 1474 bp, Artificial Sequence
  derived and/or modified sequence
cggccgccatcttggcccaactgctcccctcactccagttgctcagcccgccgctgagcacagccaatccgcggccgtccactcactgtttcggccaatcaccgagcagacggcccggaagctcgagaggctcgtgccaggtcggggggcgaaggcgaggccagcccaccaagcaggggcgtcaccaagggaaagccaatcaccattatttctgaagcccaagggggcgggacgagaagtcaacataatggtggtgctgctggaaatctagcacctggggagagcctgagacttgtgtatctaattgcctattggacacctccatctgggtaaacccaggcatccagaactttccctcaagacttacctccctcagtgcaggtcgggctggcctcacgcatttcgcttggatgcctaaatctgtctccacgtggggccggtcgataaaacaacacttcccagaatacgctgcgatccattcgcggtctgcacccggaaagtacacctcccaggggtctgtgcgcgcctccagggaacgggtcttgtggctttgtctcccgcgaagaggagatggcggagtcgttgaggtctccgcgccgctccctgtacaaactggtgggctcgccgccttggaaagaggctttccggcagagatgcctggagagaatgagaaacagccgggacaggctcctaaacaggtaccgccaggctggaagcagtgggccagggaattctcagaacagctttctagttcaagaggtgatggaagaagagtggaatgctttgcagtcagtggagaattgtccagaagacttggctcagctggaggagctgatagacatggctgtgctggaggaaattcaacaggagctgatcaaccaagagcagtccatcatcagcgagtatgagaagagcttgcagtttgatgaaaagtgtctcagcatcatgctggctgagtgggaggcaaacccactcatctgtcctgtatgtacaaagcctgtgatacttgggctgtgatcctctagagccagcttggactcacatcattctatggggttgaagacaactcattccctctgaggagccttgtacatacaagccttttatttataacttattttgtattgaaacttttaaacaatactgaagaaaaaaaaacttttccgacatctgttcttggtcttttgtgacgcaggttgaagggggaggaatagaaaaagacaaactgccttggaggagataaaccaattttatgtctatcatgttatacaaaaatctagaaataatagatttgtacagaaaaaaatgataataaatgagaacacaaaacatataatttaaatttggtattttttcccccatgatattaggatgataatcatttcaaagcacatgtctagcttcagagtaggatttgttcactggccaaagcctgccatgaaactatggctttcagcatctgtctgctctactg

SEQ ID NO: 60978 - protein, 514 aa, Artificial Sequence
  derived and/or modified sequence
MPWRRRRNRVSALEGGREEEAPPEAAAVPPALLTSPQQTEAAAERILLRGIFEIGRDSCDVVLSERALRWRPIQPERPAGDSKYDLLCKEEFIELKDIFSVKLKRRCSVKQQRSGTLLGITLFICLKKEQNKLKNSTLDLINLSEDHCDIWFRQFKKILAVMEYEGHALSLLKECELQGFDGGHRKPLFAIHWSVQRLFTGMQTLEPSVVCVGGDGSASEVAHALLLRAQKNAGMETDRILTPVRAQLPLGLIPAGSTNVLAHSLHGVPHVITATLHIIMGHVQLVDVCTFSTAGKLLRFGFSAMFGFGGRTLALAEKYRWMSPNQRRDFAVVKALAKLKAEDCEISFLPFNSSDDVQERRAQGSPKSDCNDQWQMIQGQFLNVSIMAIPCLCSVAPRGLAPNTRLNNGSMALIIARNTSRPEFIKHLKRYASVKNQFNFPFVETYTVEEVKVHPRNNTGGYNPEEEEDETASENCFPWNVDGDLMEVASEVHIRLHPRLISLYGGSMEEMIPK

SEQ ID NO: 60979 - DNA, 1545 bp, Artificial Sequence
  derived and/or modified sequence
atgccttggcggcgtcgccgcaatagggtttccgctcttgaggggggcagagaagaagaggccccccccgaggccgctgcggtccctcccgctcttttgacctctccccaacaaactgaggctgccgccgaaaggatacttcttagggggatatttgaaattggccgtgattcatgcgatgtcgtgctgtccgagagagctttgcgctggaggcctatccagcccgaacgcccggccggagattccaaatacgaccttctgtgtaaggaggagttcattgaactgaaagacatcttttccgttaagctcaaacggaggtgttctgtcaaacagcagcgaagcggcaccctcctgggcatcaccttgttcatttgccttaaaaaggaacagaataagctgaaaaactcgactctggacttgattaacctctccgaagatcattgcgacatttggttccggcagtttaagaaaatcttggccgtcatggagtacgaagggcacgccctgagcctgctgaaagaatgcgagctgcaaggattcgatgggggtcatagaaagcctctgttcgcaattcactggagcgtgcagcgattgttcaccggcatgcagactctagaacctagcgtggtgtgtgtagggggagacggtagtgcgagcgaggtggcccatgctctcctgttgagagctcagaagaacgctggaatggaaaccgatcgaattctgacccccgtgcgcgctcagctgcctctggggctcatcccggccggaagcactaatgtgctagctcattccctccatggggtgccacatgtcattacagcgactctccatataattatggggcatgtgcagcttgtggatgtttgcaccttttctacagccgggaagctgctgcgttttgggttctccgctatgttcggatttggaggccgcaccctggccctggccgagaagtaccgttggatgtctcctaaccaacgtcgcgattttgcggtcgtgaaagctctggccaaactgaaggcggaggattgtgaaattagctttctgcctttcaactcgtctgacgatgtccaggagcgcagggcacagggcagtcctaagagtgactgcaatgatcaatggcaaatgattcaggggcagttcctgaatgtgtccattatggccataccgtgcctgtgctctgtggccccccgcggcctggccccaaacacacgcctgaataatggcagcatggcattgattatcgcccggaatacttcgcgaccagaattcattaagcaccttaaacggtatgcatcggtaaagaatcaatttaatttccccttcgtggaaacatataccgtggaggaagtgaaagttcacccacggaacaatacaggcggatacaatccagaggaggaagaggatgaaaccgcatcagaaaactgcttcccatggaatgtggacggcgatctaatggaggtggccagcgaggttcatatccgtctgcacccccggctcattagcctgtacggagggtcaatggaggaaatgattccaaagtag

SEQ ID NO: 60980 - DNA, 1545 bp, Artificial Sequence
  derived and/or modified sequence
atgccctggaggagaagaagaaacagagtgtctgccctggagggcggccgggaggaggaggcccctcctgaggccgctgctgtgcccccagccctgctgaccagcccccagcagacagaagctgctgctgagcgcatcctgctgcggggcatctttgagatcggccgggacagctgtgatgtggtgctgtctgagcgggccctgcgctggaggcccatccagcctgagaggcctgctggggacagcaaatatgacctgctgtgcaaggaggagttcatcgagctgaaggacatcttctctgtgaagctgaagaggcgctgcagcgtgaagcagcagaggagcggcaccctgctgggcatcaccctcttcatctgcctgaagaaggagcagaacaagctgaagaacagcaccctggacctgatcaacctgtctgaggaccactgtgacatctggttccggcagttcaagaagatcctggccgtgatggagtatgagggccacgccctgagcctgctgaaggaatgtgagctgcagggctttgatggcggccacaggaagcccctgtttgccatccactggagcgtgcagaggctcttcaccggcatgcagaccctggagcccagcgtggtgtgtgtgggcggagatggcagcgccagcgaggtggcccacgccctgctgctgcgggcccagaagaatgccggcatggagacagaccgcatcctgacccctgtgcgggcccagctgcccctgggcctcatcccagctggcagcaccaacgtgctggcccacagcctgcacggcgtgccccacgtgatcacagccaccctgcacatcatcatgggccacgtgcagctggtggatgtgtgcaccttcagcacagctgggaagctgctgcgcttcggcttcagcgccatgtttggatttggaggccgcaccctggccctggccgagaagtaccgctggatgagccccaaccagaggcgggactttgctgtggtgaaggccctggccaagctgaaggccgaggactgtgagatctccttcctgcccttcaacagcagtgatgatgtgcaggagcggcgggcccagggcagccccaagagtgactgcaatgaccagtggcagatgatccagggccagttcctgaatgtgtccatcatggccatcccctgcctgtgcagcgtggccccccggggcctggcccccaacacccggctgaacaacggctccatggccctgatcatcgccaggaacaccagcaggcctgagttcatcaagcacctgaagagatatgcctctgtgaagaaccagttcaacttcccctttgtggagacctacacagtggaggaggtgaaggtgcaccccaggaacaacacaggaggctacaaccctgaggaggaggaggatgaaacagccagcgagaactgcttcccctggaatgtggatggagacctgatggaggtggccagcgaggtgcacatccggctgcaccccaggctcatcagcctgtatggaggctccatggaggagatgatccccaagtag

SEQ ID NO: 60981 - DNA, 1545 bp, Artificial Sequence
  derived and/or modified sequence
atgccctggcggcggcggcggaaccgggtgagcgccctggagggcggacgagaggaagaggcccccccagaagccgccgccgtcccaccggccttgctcacctctccgcagcagaccgaggcggctgccgagaggatcttacttcgagggattttcgagattggtcgcgacagctgtgatgtggtccttagtgaacgagcactgagatggcgcccaatccagcccgaacgcccagcaggcgacagtaaatatgatctcctgtgcaaagaagagtttattgaactgaaggacattttttccgtgaaattgaagcggaggtgttctgtaaagcagcagagatctggcaccctgctcggtattacattatttatctgtctcaagaaggagcaaaacaaattaaagaactccaccctggatctgattaatctcagtgaggatcattgcgacatttggtttaggcagttcaaaaaaatactcgccgtcatggaatacgaaggccacgctctgtctctgctgaaggagtgcgagcttcaaggtttcgacggcggacatcgcaagcctttgtttgcaatccattggagcgtgcagaggctgtttacgggtatgcaaaccctggagccatctgtggtctgcgtcggcggagacgggtccgccagtgaggtagctcacgccctcctgctgcgagctcagaagaatgcaggtatggaaacggaccggattctcaccccagtcagggcacaactccccctaggcctcattccagctggcagcaccaacgtcctggctcactcactccacggggttcctcacgtgataactgcaactctgcacatcattatggggcatgtgcagctggttgatgtttgtacgtttagtactgccgggaagctcctgcgtttcggtttttctgccatgttcggctttggaggacgaactctggccctggccgagaagtatcggtggatgtcccctaatcagaggagagattttgccgtcgtgaaagccctggctaagttgaaagccgaagattgtgaaatttctttcctcccattcaatagctctgatgatgtacaggagcgccgagcccaaggcagtcccaaatccgattgcaacgaccagtggcaaatgatccaggggcagttcttgaatgtgagtattatggcaatcccatgtctgtgttcggtggcccctcgcggcctggctcccaacacaagattgaacaatggcagcatggccctcatcatcgcccgcaacacctcacggcccgaatttatcaagcacctaaaacggtacgcctccgtcaagaaccagtttaatttcccatttgtcgagacatatacggttgaggaagtgaaggtgcatcctagaaataatacaggcggatacaatcctgaggaggaggaagatgagacagcgtccgagaactgttttccttggaacgtagacggcgacctaatggaagtcgcatctgaagtccatattagacttcaccccaggctgatctccctgtatggaggctccatggaggagatgatccccaaatag

SEQ ID NO: 60982 - DNA, 1545 bp, Artificial Sequence
  derived and/or modified sequence
atgccttggcgccgtagacggaatcgggtaagtgctctcgagggcggacgcgaggaggaggcccctcccgaggctgccgcagtgcctcccgctctgcttaccagtcctcagcagactgaagctgccgcagagcggatcctgctgaggggcatatttgaaatagggagggactcatgcgacgtggtgctgtccgagagggctctgcggtggcgccctatccagcccgaacggcctgcaggggatagcaagtacgatctactgtgtaaagaagagttcatcgagctgaaggacattttctcagtgaaacttaaaagacgttgttctgtgaaacagcagagatctggcaccttgctcggaataacactatttatatgcctaaagaaggaacagaacaagcttaaaaacagcacgcttgatctcattaatctatcagaggaccactgtgatatctggtttaggcagttcaaaaagattctggcagtaatggagtacgagggccatgctctctctctcctgaaggaatgtgaactgcaggggttcgatggcggacatcgaaagccactgttcgcaatccactggtctgtccagagactgttcaccggaatgcaaactctggagcccagcgtggtctgtgtaggaggagacgggtctgctagcgaagtggcgcacgccctcctgctgcgtgcacagaaaaacgccggtatggagaccgatagaatcctgacacccgtgagagctcagctgccactggggttgatccctgccggatctacaaatgtgctggcccactcactgcacggagttccccatgtaatcacggcaacacttcatatcattatgggccatgtgcagttggtggacgtgtgcaccttctcaaccgccggtaaattactgagattcggattctctgccatgttcggcttcgggggaaggacactagccctggctgaaaagtaccggtggatgtcccccaatcagcgcagagatttcgccgtggtgaaagcactggcaaagcttaaggccgaagattgcgagatcagtttcttgccattcaatagttcggacgacgttcaggaacgcagggcccaggggagtcctaagagcgattgcaacgatcagtggcagatgatacagggacagttcttaaatgtctctatcatggcaatcccttgtctatgtagcgtcgcacctagggggctggcaccaaataccagattaaacaacggctccatggcactgattatcgcccgaaatactagccgcccagaatttattaaacacctcaagcggtacgcatcagtaaagaaccagttcaattttcccttcgttgaaacttacacagttgaagaagtgaaagtgcacccaaggaacaacactggcggatacaacccagaagaggaggaagatgagaccgcctcagagaattgtttcccgtggaacgtagacggagatctaatggaagtcgccagtgaagttcatataagactgcacccgagacttatttcgctgtacggagggagtatggaggaaatgataccaaagtag

SEQ ID NO: 60983 - DNA, 2425 bp, Artificial Sequence
  derived and/or modified sequence
gcagcgctggacgcggctagagctggggctgccgcgccctccacctccttctccaaaggcctccccggacccctggctcgggcccagcctgcgactccgccatgccctggaggaggcgcaggaaccgggtgagtgccctggagggcggccgggaggaagaggcgcccccggaggctgccgctgtgcctccggcgctgttaacgtccccgcagcagacggaggcggcggccgagcggattctgctccggggcatcttcgagatcgggagggacagttgtgacgtggtgctgagcgagcgagcactgcggtggcggcccattcagcccgagcgcccggcgggtgattctaagtatgacttgctatgtaaagaagaatttattgaactcaaagacatattctctgtgaaactgaaacggcgttgttctgttaaacagcagagaagtggtactttattaggtatcacactcttcatctgcttgaaaaaggaacaaaataaactaaagaattctacacttgatcttattaatttaagtgaagaccactgtgacatatggtttagacagttcaagaaaatattggcagtaatggaatatgaagggcacgctctgtcactgcttaaggaatgtgaactccagggatttgatggtgggcatcggaaaccattgttcgcaatacattggagtgtacagagattgttcactggcatgcaaacgttagaaccaagtgttgtctgtgttggtggagatggatctgctagcgaagtagcccatgctttgcttctgagagctcagaagaatgctgggatggaaacagaccgaatcctgactcctgtcagagcacagcttccacttggcttaataccagcaggatctaccaatgtattggcacattctcttcatggagttcctcatgtgataactgcaacattgcacattataatggggcatgtacagctggtcgacgtctgcaccttcagcaccgctggcaagcttcttcgctttgggttctcagccatgtttggctttggtggaagaactttggctctggcagaaaaatatcgatggatgtcccctaaccaacggagagattttgctgttgttaaggcactggcaaaacttaaggcagaagactgtgaaatatcatttttaccatttaacagctctgatgatgtgcaagaaaggagggcacagggatctcccaaatctgactgtaatgatcaatggcaaatgatccagggtcagttcttgaatgtcagcattatggcaattccttgcctgtgttcagtggcacctagaggcttggcacctaataccagattaaataatggaagtatggctcttataattgcccgaaacacttctcggccagaatttataaaacacctgaaaagatatgccagtgtaaaaaatcagttcaattttccatttgttgagacttacactgttgaggaagtaaaagttcatccaaggaataatactggtggatataatccagaggaggaggaggatgaaactgcttcagaaaattgtttcccttggaatgtagatggtgacttaatggaagttgcatcagaggtccatattagattgcatccaagacttatcagtctttatggaggaagcatggaagaaatgattccaaagtaacatgtaattgtttctaaaagaaatgtacaaactagaattttaatataaagaaatgtggccatgctttaaacctgtggtccccaccctttttgggaccagtttcatggaagacaatttttccgtggatgggggaatggtttcaggatgaactgttccacctcagatcatcaggcattagattctcttgaggaacatggcactctagatccctcacataccagttcaccatatggttcgcacttctatgagaatctaatgctgctgctgatctgacagggggaggaactcagtaatgctccattgctctaacctcctgctgtgtggccaaacggatatcctaatagaaattgatgttactaacaattagcctctagggctttaaaagtcaagatgaaatatcaattcaaattctgtttttagatatcaattcaaattcttttttttacaatgtgtttattggacacacaaaaaaactttgcaaccatcataatacatcaatatttaacctagataattctgaaataatttggattctttcatttttcaggatttgagctcatcaattatgttaaatttcctatattctgttacaaatataatacagatttcataagtctgccttgattcactgctccctaatccagagcagttaaatttcaaaatcacatagttatatagcctacctgccaaaaaagaataacccatccctgtcttcttaaagtggtagggttttaaaattcatgatacaagtaacaaagtaagttgataacaaatactat

SEQ ID NO: 60984 - DNA, 1545 bp, Artificial Sequence
  derived and/or modified sequence
atgccctggagaagaagaagaaacagagtgagcgccctggagggcggcagagaggaggaggccccccccgaggccgccgccgtgccccccgccctgctgaccagcccccagcagaccgaggccgccgccgagagaatcctgctgagaggcatcttcgagatcggcagagacagctgcgacgtggtgctgagcgagagagccctgagatggagacccatccagcccgagagacccgccggcgacagcaagtacgacctgctgtgcaaggaggagttcatcgagctgaaggacatcttcagcgtgaagctgaagagaagatgcagcgtgaagcagcagagaagcggcaccctgctgggcatcaccctgttcatctgcctgaagaaggagcagaacaagctgaagaacagcaccctggacctgatcaacctgagcgaggaccactgcgacatctggttcagacagttcaagaagatcctggccgtgatggagtacgagggccacgccctgagcctgctgaaggagtgcgagctgcagggcttcgacggcggccacagaaagcccctgttcgccatccactggagcgtgcagagactgttcaccggcatgcagaccctggagcccagcgtggtgtgcgtgggcggcgacggcagcgccagcgaggtggcccacgccctgctgctgagagcccagaagaacgccggcatggagaccgacagaatcctgacccccgtgagagcccagctgcccctgggcctgatccccgccggcagcaccaacgtgctggcccacagcctgcacggcgtgccccacgtgatcaccgccaccctgcacatcatcatgggccacgtgcagctggtggacgtgtgcaccttcagcaccgccggcaagctgctgagattcggcttcagcgccatgttcggcttcggcggcagaaccctggccctggccgagaagtacagatggatgagccccaaccagagaagagacttcgccgtggtgaaggccctggccaagctgaaggccgaggactgcgagatcagcttcctgcccttcaacagcagcgacgacgtgcaggagagaagagcccagggcagccccaagagcgactgcaacgaccagtggcagatgatccagggccagttcctgaacgtgagcatcatggccatcccctgcctgtgcagcgtggcccccagaggcctggcccccaacaccagactgaacaacggcagcatggccctgatcatcgccagaaacaccagcagacccgagttcatcaagcacctgaagagatacgccagcgtgaagaaccagttcaacttccccttcgtggagacctacaccgtggaggaggtgaaggtgcaccccagaaacaacaccggcggctacaaccccgaggaggaggaggacgagaccgccagcgagaactgcttcccctggaacgtggacggcgacctgatggaggtggccagcgaggtgcacatcagactgcaccccagactgatcagcctgtacggcggcagcatggaggagatgatccccaagtag

SEQ ID NO: 60985 - protein, 1295 aa, Artificial Sequence
  derived and/or modified sequence
MAFSKGFRIYHKLDPPPFSLIVETRHKEECLMFESGAVAVLSSAEKEAIKGTYSKVLDAYGLLGVLRLNLGDTMLHYLVLVTGCMSVGKIQESEVFRVTSTEFISLRIDSSDEDRISEVRKVLNSGNFYFAWSASGISLDLSLNAHRSMQEQTTDNRFFWNQSLHLHLKHYGVNCDDWLLRLMCGGVEIRTIYAAHKQAKACLISRLSCERAGTRFNVRGTNDDGHVANFVETEQVVYLDDSVSSFIQIRGSVPLFWEQPGLQVGSHRVRMSRGFEANAPAFDRHFRTLKNLYGKQIIVNLLGSKEGEHMLSKAFQSHLKASEHAADIQMVNFDYHQMVKGGKAEKLHSVLKPQVQKFLDYGFFYFNGSEVQRCQSGTVRTNCLDCLDRTNSVQAFLGLEMLAKQLEALGLAEKPQLVTRFQEVFRSMWSVNGDSISKIYAGTGALEGKAKLKDGARSVTRTIQNNFFDSSKQEAIDVLLLGNTLNSDLADKARALLTTGSLRVSEQTLQSASSKVLKSMCENFYKYSKPKKIRVCVGTWNVNGGKQFRSIAFKNQTLTDWLLDAPKLAGIQEFQDKRSKPTDIFAIGFEEMVELNAGNIVSASTTNQKLWAVELQKTISRDNKYVLLASEQLVGVCLFVFIRPQHAPFIRDVAVDTVKTGMGGATGNKGAVAIRMLFHTTSLCFVCSHFAAGQSQVKERNEDFIEIARKLSFPMGRMLFSHDYVFWCGDFNYRIDLPNEEVKELIRQQNWDSLIAGDQLINQKNAGQVFRGFLEGKVTFAPTYKYDLFSDDYDTSEKCRTPAWTDRVLWRRRKWPFDRSAEDLDLLNASFQDESKILYTWTPGTLLHYGRAELKTSDHRPVVALIDIDIFEVEAEERQNIYKEVIAVQGPPDGTVLVSIKSSLPENNFFDDALIDELLQQFASFGEVILIRFVEDKMWVTFLEGSSALNVLSLNGKELLNRTITIALKSPDWIKNLEEEMSLEKISIALPSSTSSTLLGEDAEVAADFDMEGDVDDYSAEVEELLPQHLQPSSSSGLGTSPSSSPRTSPCQSPTISEGPVPSLPIRPSRAPSRTPGPPSAQSSPIDAQPATPLPQKDPAQPLEPKRPPPPRPVAPPTRPAPPQRPPPPSGARSPAPTRKEFGAPKSPGTTRKDNIGRSQPSPQAGLAGPGPAGYSTARPTIPPRAGVISAPQSHARASAGRLTPESQSKTSETSKGSTFLPEPLKPQAAFPPQSSLPPPAQRLQEPLVPVAAPMPQSGPQPNLETPPQPPPRSRSSHSLPSEASSQPQQEQPSG

SEQ ID NO: 60986 - DNA, 3888 bp, Artificial Sequence
  derived and/or modified sequence
atggccttcagcaagggcttcagaatctaccacaagctggaccccccccccttcagcctgatcgtggagaccagacacaaggaggagtgcctgatgttcgagagcggcgccgtggccgtgctgagcagcgccgagaaggaggccatcaagggcacctacagcaaggtgctggacgcctacggcctgctgggcgtgctgagactgaacctgggcgacaccatgctgcactacctggtgctggtgaccggctgcatgagcgtgggcaagatccaggagagcgaggtgttcagagtgaccagcaccgagttcatcagcctgagaatcgacagcagcgacgaggacagaatcagcgaggtgagaaaggtgctgaacagcggcaacttctacttcgcctggagcgccagcggcatcagcctggacctgagcctgaacgcccacagaagcatgcaggagcagaccaccgacaacagattcttctggaaccagagcctgcacctgcacctgaagcactacggcgtgaactgcgacgactggctgctgagactgatgtgcggcggcgtggagatcagaaccatctacgccgcccacaagcaggccaaggcctgcctgatcagcagactgagctgcgagagagccggcaccagattcaacgtgagaggcaccaacgacgacggccacgtggccaacttcgtggagaccgagcaggtggtgtacctggacgacagcgtgagcagcttcatccagatcagaggcagcgtgcccctgttctgggagcagcccggcctgcaggtgggcagccacagagtgagaatgagcagaggcttcgaggccaacgcccccgccttcgacagacacttcagaaccctgaagaacctgtacggcaagcagatcatcgtgaacctgctgggcagcaaggagggcgagcacatgctgagcaaggccttccagagccacctgaaggccagcgagcacgccgccgacatccagatggtgaacttcgactaccaccagatggtgaagggcggcaaggccgagaagctgcacagcgtgctgaagccccaggtgcagaagttcctggactacggcttcttctacttcaacggcagcgaggtgcagagatgccagagcggcaccgtgagaaccaactgcctggactgcctggacagaaccaacagcgtgcaggccttcctgggcctggagatgctggccaagcagctggaggccctgggcctggccgagaagccccagctggtgaccagattccaggaggtgttcagaagcatgtggagcgtgaacggcgacagcatcagcaagatctacgccggcaccggcgccctggagggcaaggccaagctgaaggacggcgccagaagcgtgaccagaaccatccagaacaacttcttcgacagcagcaagcaggaggccatcgacgtgctgctgctgggcaacaccctgaacagcgacctggccgacaaggccagagccctgctgaccaccggcagcctgagagtgagcgagcagaccctgcagagcgccagcagcaaggtgctgaagagcatgtgcgagaacttctacaagtacagcaagcccaagaagatcagagtgtgcgtgggcacctggaacgtgaacggcggcaagcagttcagaagcatcgccttcaagaaccagaccctgaccgactggctgctggacgcccccaagctggccggcatccaggagttccaggacaagagaagcaagcccaccgacatcttcgccatcggcttcgaggagatggtggagctgaacgccggcaacatcgtgagcgccagcaccaccaaccagaagctgtgggccgtggagctgcagaagaccatcagcagagacaacaagtacgtgctgctggccagcgagcagctggtgggcgtgtgcctgttcgtgttcatcagaccccagcacgcccccttcatcagagacgtggccgtggacaccgtgaagaccggcatgggcggcgccaccggcaacaagggcgccgtggccatcagaatgctgttccacaccaccagcctgtgcttcgtgtgcagccacttcgccgccggccagagccaggtgaaggagagaaacgaggacttcatcgagatcgccagaaagctgagcttccccatgggcagaatgctgttcagccacgactacgtgttctggtgcggcgacttcaactacagaatcgacctgcccaacgaggaggtgaaggagctgatcagacagcagaactgggacagcctgatcgccggcgaccagctgatcaaccagaagaacgccggccaggtgttcagaggcttcctggagggcaaggtgaccttcgcccccacctacaagtacgacctgttcagcgacgactacgacaccagcgagaagtgcagaacccccgcctggaccgacagagtgctgtggagaagaagaaagtggcccttcgacagaagcgccgaggacctggacctgctgaacgccagcttccaggacgagagcaagatcctgtacacctggacccccggcaccctgctgcactacggcagagccgagctgaagaccagcgaccacagacccgtggtggccctgatcgacatcgacatcttcgaggtggaggccgaggagagacagaacatctacaaggaggtgatcgccgtgcagggcccccccgacggcaccgtgctggtgagcatcaagagcagcctgcccgagaacaacttcttcgacgacgccctgatcgacgagctgctgcagcagttcgccagcttcggcgaggtgatcctgatcagattcgtggaggacaagatgtgggtgaccttcctggagggcagcagcgccctgaacgtgctgagcctgaacggcaaggagctgctgaacagaaccatcaccatcgccctgaagagccccgactggatcaagaacctggaggaggagatgagcctggagaagatcagcatcgccctgcccagcagcaccagcagcaccctgctgggcgaggacgccgaggtggccgccgacttcgacatggagggcgacgtggacgactacagcgccgaggtggaggagctgctgccccagcacctgcagcccagcagcagcagcggcctgggcaccagccccagcagcagccccagaaccagcccctgccagagccccaccatcagcgagggccccgtgcccagcctgcccatcagacccagcagagcccccagcagaacccccggcccccccagcgcccagagcagccccatcgacgcccagcccgccacccccctgccccagaaggaccccgcccagcccctggagcccaagagaccccccccccccagacccgtggccccccccaccagacccgcccccccccagagaccccccccccccagcggcgccagaagccccgcccccaccagaaaggagttcggcgcccccaagagccccggcaccaccagaaaggacaacatcggcagaagccagcccagcccccaggccggcctggccggccccggccccgccggctacagcaccgccagacccaccatcccccccagagccggcgtgatcagcgccccccagagccacgccagagccagcgccggcagactgacccccgagagccagagcaagaccagcgagaccagcaagggcagcaccttcctgcccgagcccctgaagccccaggccgccttccccccccagagcagcctgcccccccccgcccagagactgcaggagcccctggtgcccgtggccgcccccatgccccagagcggcccccagcccaacctggagacccccccccagcccccccccagaagcagaagcagccacagcctgcccagcgaggccagcagccagccccagcaggagcagcccagcggctag

SEQ ID NO: 60987 - DNA, 3888 bp, Artificial Sequence
  derived and/or modified sequence
atggcatttagcaagggatttcggatctaccataagcttgaccctcctccattttcactgatcgtagagacccgccacaaagaagaatgtctcatgttcgagtccggagctgtggctgtgctgagcagcgctgagaaagaagcgattaagggaacctactcaaaagttctagacgcctatggcctgcttggtgtgctgcggctgaatctgggagacactatgttgcattatttggtgctggtgaccggatgcatgtccgttggaaagatccaagagagcgaagttttccgagttacatctaccgagtttatttcccttagaatagactcctcggacgaagaccgtattagtgaggtgcgcaaggtcttaaattccggcaacttctattttgcatggtccgcgtccggtatatctctggacttatccctgaatgcacacagatcaatgcaggaacagaccactgataatcgctttttctggaaccagtccctccacctccatctgaagcattatggagttaattgtgacgactggctgctcagactgatgtgcggcggtgtggagatcagaacaatatacgccgcacataaacaggcaaaggcctgcctcatttctagactgagttgcgagagagctggcacacgctttaacgtccgcggcaccaacgatgacggccatgtagccaattttgtggaaaccgaacaggtggtgtatttggatgacagcgtctctagctttatccagatccgtggcagtgtgcccttgttctgggagcagcccggtctgcaagtgggatcccaccgggtaagaatgagccgcggcttcgaagctaacgcccccgcattcgatcgacatttccgtactttgaagaacctctacggtaaacagatcatcgtaaatctactgggctccaaggagggagagcacatgctcagtaaagcattccagagtcacctcaaggcttccgaacatgcggccgatattcaaatggtcaatttcgactaccaccagatggtgaaaggcggcaaagccgaaaagctgcactcggtcctgaagccccaggttcaaaaatttctcgactacggatttttctactttaacggatccgaggtgcagaggtgtcaatctggtaccgtgagaactaattgtcttgactgcttggaccggactaattctgtccaggccttcttgggtctagaaatgctcgcgaagcagctggaggccttaggactggccgagaaacctcaactggtgacacggtttcaggaggtgtttcggtccatgtggtccgtaaatggggattccatctctaagatctatgctggcacgggagccttggagggtaaagctaaactgaaagatggggcccgatccgtaacaaggaccatccaaaataactttttcgacagtagcaaacaagaagctatcgacgtgctgcttctggggaacacgctgaattccgatctggccgacaaagcccgggcgctgctgaccactggctccttgcgggtatctgaacaaaccctgcagtctgccagctccaaggtgctgaagagtatgtgtgagaacttttacaagtattctaagcctaaaaagatcagggtgtgcgttgggacgtggaacgtgaatggcggaaaacagtttcggagtattgcattcaagaatcagactctaaccgattggctcctagatgcccccaagctggctggaatccaagagtttcaagataaaagatccaaacccactgatatcttcgccattgggtttgaggagatggtggagctgaatgccggaaacattgtgtcagcttcaactacaaatcaaaagctgtgggctgtggaactgcagaagaccatcagtcgcgataacaaatatgtgctcctggcgtcggagcagctcgttggagtgtgcctttttgtgttcattagacctcagcatgctcccttcattcgggatgtggccgtggacacagttaaaaccggaatgggaggagccacaggaaataaaggagccgtcgccatcaggatgttattccatactacaagtctgtgctttgtctgctctcattttgcggcgggccaaagccaggtgaaggaaaggaacgaggattttatcgaaatcgcccgcaaactgagtttccctatgggaaggatgctgtttagccatgactacgtcttttggtgtggcgattttaactacaggattgatctaccaaatgaggaggtcaaggagctcatcagacagcagaactgggatagtctgattgcgggtgaccaacttatcaatcagaagaacgccggccaggtgtttcgcggctttctcgaaggcaaagtgactttcgcccccacctataagtacgacctgttctccgatgattatgacaccagtgagaaatgccggacacctgcctggaccgatcgagtgctgtggcgccggcggaaatggccctttgatcgtagcgcagaggacttagacctgctgaatgctagcttccaggatgagagtaagatcctgtatacctggacgcctggtaccctcctgcattacggcagagcagagctgaagacgagtgaccaccggcccgttgttgcgctaattgatatcgacatctttgaagtcgaggccgaagagaggcagaacatctataaagaggtaatcgctgtccagggccccccagacgggacggtactggtttcaattaagtcatcccttcccgagaataatttctttgatgacgcgctcatcgatgagctgctccagcagtttgcatcctttggggaggtgatccttattcggttcgtcgaggacaaaatgtgggtgacgttcctggaagggagttctgctctgaatgtactgagtctgaatgggaaagagctcctcaaccgtaccatcacaattgccttgaagtcccctgactggatcaaaaacctggaggaggagatgagcctagagaaaatttccatagctttgcccagcagcacctcatctaccctcctgggagaggacgccgaggtcgccgctgattttgacatggagggcgatgttgatgactactcagccgaggtggaggagctacttccgcagcacctccagccctccagttcttcaggtttgggcaccagtccgagcagctccccccgtactagtccttgccagtctcctaccatctctgaaggacccgtaccatccttgccaatcaggccaagccgtgcaccgtccaggactcctggcccaccatccgcacagtcatcaccaatcgacgcccagccagcaacacccctgcctcagaaagacccagcccagcccctggagccaaaacgcccacctccgccacggcccgtggcccctcctactcgtccggctccaccacagagaccgcctcctccaagcggtgcgcgaagcccagcaccgaccagaaaggaatttggagccccgaagagccccggtacgactaggaaagataatatcgggcggtcccaacctagcccacaggccggcttagccggccctggacccgctgggtactccacagcgcgtcccacaatccctccacgcgctggcgtgatttccgcgccacagagccatgcccgcgctagcgccggacggctgacacctgagtctcaatcaaaaacaagtgaaacatccaagggttctactttcctgccggagcctctgaagcctcaggctgccttcccaccgcagtcgagtctccccccacccgcgcagagacttcaggaaccattggtgccagtcgctgctcccatgccccagtctggaccacaaccaaaccttgagacccccccacagcctcccccacgtagtagaagctctcactccttgccatctgaagcctccagccagccacaacaggaacagccaagtggctag

SEQ ID NO: 60988 - DNA, 3888 bp, Artificial Sequence
  derived and/or modified sequence
atggccttcagcaagggcttccgcatctaccacaagctggaccccccacccttcagcctgattgtggagaccaggcacaaggaggagtgcctgatgtttgaaagtggagctgtggccgtgctgagcagcgctgagaaggaggccatcaagggcacctacagcaaggtgctggatgcctacggcctgctgggcgtgctgcggctgaacctgggggacaccatgctgcactacctggtgctggtgacaggctgcatgtctgtgggcaagatccaggagagcgaggtgttccgggtgaccagcacagagttcatcagcctgagaattgacagcagtgatgaagatcgcatcagcgaggtgaggaaggtgctgaacagcggcaacttctactttgcctggagcgccagcggcatcagcctggacctgagcctgaatgcccaccgctccatgcaggagcagaccacagacaaccgcttcttctggaaccagagcctgcacctgcacctgaagcactatggagtgaactgtgatgactggctgctgcggctgatgtgtggcggcgtggagatccgcaccatctatgctgcccacaagcaggccaaggcctgcctgatcagccggctgagctgtgagcgggccggcacccgcttcaacgtgcggggcaccaatgatgatggccacgtggccaactttgtggagacagagcaggtggtgtacctggatgacagcgtgtcctccttcatccagatccggggctctgtgcccctcttctgggagcagcccggcctgcaggtgggcagccaccgggtgaggatgagccggggctttgaggccaatgccccagcctttgacagacacttccgcaccctgaagaacctgtatggcaagcagatcatcgtgaacctgctgggcagcaaggagggggagcacatgctgagcaaggccttccagagccacctgaaggccagcgagcacgccgctgacatccagatggtgaactttgactaccaccagatggtgaagggcggcaaggccgagaagctgcacagcgtgctgaagccccaggtgcagaagttcctggactatggcttcttctacttcaatggaagtgaggtgcagcgctgccagagcggcaccgtgaggaccaactgcctggactgcctggacaggaccaacagcgtgcaggccttcctgggcctggagatgctggccaagcagctggaggccctgggcctggccgagaagccccagctggtgacccgcttccaggaggtgttccgctccatgtggagcgtgaatggagacagcatcagcaagatctatgccggcactggagccctggagggcaaggccaagctgaaggatggagcccggtctgtgaccaggaccatccagaacaacttctttgacagcagcaagcaggaggccattgatgtgctgctgctgggcaacaccctgaacagcgacctggccgacaaggcccgggccctgctgaccaccggcagcctgcgggtgtctgagcagaccctgcagagcgccagcagcaaggtgctgaagtccatgtgtgagaacttctacaagtacagcaagcccaagaagatccgggtgtgtgtgggcacctggaatgtgaatggaggcaagcagttccgcagcatcgccttcaagaaccagaccctgacagactggctgctggatgcccccaagctggccggcatccaggagttccaggacaagaggagcaagcccacagacatctttgccatcggctttgaggagatggtggagctgaatgccggcaacatcgtgtctgccagcaccaccaaccagaagctgtgggccgtggagctgcagaagaccatcagccgggacaacaagtatgtgctgctggccagcgagcagctggtgggcgtgtgcctgtttgtgttcatccggccccagcacgcccccttcatcagagatgtggccgtggacacagtgaagacaggcatgggcggggccaccggcaacaagggagctgtggccatccgcatgctgttccacaccaccagcctgtgctttgtgtgcagccactttgctgctggccagagccaggtgaaggagagaaatgaagacttcattgaaattgccaggaagctgtccttccccatgggccgcatgctgttcagccatgactatgtgttctggtgtggggacttcaactacagaattgacctgcccaatgaggaggtgaaggagctgatccggcagcagaactgggacagcctgattgctggggaccagctgatcaaccagaagaatgccggccaggtgttccggggcttcctggagggcaaggtgacctttgcccccacctacaagtatgacctcttcagtgatgattatgacaccagcgagaagtgcaggaccccagcctggacagacagagtgctgtggaggaggaggaagtggccctttgacagatctgctgaggacctggacctgctgaatgccagcttccaggatgagagcaagatcctgtacacctggaccccaggcaccctgctgcactacggccgggcagagctgaagaccagtgaccacaggcctgtggtggccctgattgacatcgacatctttgaggtggaggccgaggagcggcagaacatctacaaggaggtgattgctgtgcagggccccccagatggcaccgtgctggtgtccatcaagagcagcctgcctgagaacaacttctttgatgatgccctgattgatgagctgctgcagcagtttgccagctttggagaggtgatcctgatccgctttgtggaggacaagatgtgggtgaccttcctggagggcagcagcgccctgaatgtgctgagcctgaatggcaaggagctgctgaacagaaccatcaccatcgccctgaagagcccagactggatcaagaacctggaggaggagatgagcctggagaagatcagcatcgccctgcccagcagcaccagcagcaccctgctgggagaagatgctgaggtggccgctgactttgacatggagggagatgtggatgactacagcgctgaggtggaggagctgctgccccagcacctgcagcccagcagcagcagcggcctgggcaccagccccagcagcagccccaggaccagcccctgccagagccccaccatcagcgagggccctgtgcccagcctgcccatccggcccagccgggcccccagcaggaccccaggcccccccagcgcccagagcagccccattgatgcccagcctgccacccccctgccccagaaggaccctgcccagcccctggagcccaagaggcctcctccacccaggcctgtggccccacccaccaggcctgccccaccccagaggcctcctccacccagcggggcccggagccctgcccccaccaggaaggagtttggagcccccaagagccctggcaccaccaggaaggacaacatcggccgcagccagcccagcccccaggccggcctggccggccctggccctgctggctacagcacagcccggcccaccatccccccccgggccggggtcatcagcgccccccagagccacgcccgggccagcgctggccgcctgaccccagagagccagagcaagaccagcgagaccagcaagggcagcaccttcctgcctgagcccctgaagccccaggccgccttccccccccagagcagcctgcccccaccagcccagaggctgcaggagcccctggtgcctgtggccgcccccatgccccagagcggcccccagcccaacctggagaccccaccccagcccccacccaggagccgcagcagccacagcctgcccagcgaggccagcagccagccccagcaggagcagcccagcggctag

SEQ ID NO: 60989 - DNA, 3888 bp, Artificial Sequence
  derived and/or modified sequence
atggccttcagcaagggcttccggatctaccacaagctggaccccccaccattctctctgattgtggagacaaggcacaaagaagaatgcttgatgttcgagtccggagccgtggcagtgctgtcctctgcagagaaggaggcaattaaaggcacttattcaaaagtactggatgcttacggtctgttaggggtattgagactgaatcttggggacactatgcttcactacctggtattggtcacaggttgcatgagcgtgggcaagatccaggaatccgaggtctttcgcgtgacgagcaccgagttcatcagtctgcgcatcgactcgtccgacgaggatcggatatcggaggtaaggaaagtactgaacagcggcaacttttatttcgcgtggtctgccagtgggatcagcctggatctgagcttgaacgctcatcgtagcatgcaagaacagactactgacaatagatttttctggaatcagtctcttcacctacatttgaaacactacggtgttaattgcgacgattggctgctgagactgatgtgcgggggcgtggagattcggaccatctacgccgcacacaagcaggctaaagcttgtctaatcagtaggctgagttgcgagcgcgcaggaacacgcttcaatgtaaggggcacgaacgacgacggacacgtcgccaattttgttgagactgagcaggtggtctatcttgacgactccgtttctagctttatccaaatcagggggagtgtgcctctcttctgggagcagccaggactacaggttgggtctcaccgggttcgaatgagcaggggctttgaggctaacgctcccgcattcgatcgccacttcaggaccctgaagaacctatacggcaaacagattattgtcaatctgcttgggagtaaggagggggagcacatgttgagtaaggccttccaatcccatttaaaggccagcgagcatgcagcagacatccagatggtgaacttcgattatcaccagatggtgaaaggtgggaaagccgaaaagctccactctgtcctcaagcctcaggtgcaaaaattccttgactatggctttttttacttcaatgggtcagaggttcagcgatgccagtcgggaacagtaaggactaattgcctcgactgcttggacaggacgaactccgtccaggcttttctcgggctggagatgctggccaagcaactcgaagccttgggactggccgagaagccacagttggttacaaggttccaagaggttttccgttccatgtggtccgtgaacggtgatagtatatcgaagatttatgcaggcactggagccctcgaaggtaaggctaagctgaaggatggggctagatccgtaactcggacaatccagaataactttttcgactcgtctaaacaggaggccatcgacgtgctgttgttgggcaacaccctaaactcggacttagccgacaaagcacgcgcacttttaactactggatctcttcgcgtgtccgaacagaccctgcagtctgctagctctaaagtgctaaaatcaatgtgtgaaaatttttacaaatattctaaaccaaaaaagatccgagtctgtgttggtacatggaatgttaatggcggaaagcagttccgatcgatcgctttcaaaaatcagacactgactgactggctactggacgcccctaaactggcaggcattcaggagtttcaggacaagcgcagcaagccaacggacatctttgctatcggctttgaggagatggttgaacttaacgcggggaatattgtgtccgcatctactacaaaccagaagctatgggccgtcgagctgcagaaaactatctctcgtgataataaatacgtactattggcctctgagcagttggtgggggtgtgtctatttgtgttcattcgcccccagcacgctcctttcataagagatgtcgccgtagatacggtgaagaccggcatggggggcgctacgggaaataagggcgccgttgccataaggatgctgtttcacaccacatccctctgtttcgtgtgttcccatttcgccgctgggcaaagtcaagtgaaggaacgaaatgaggactttattgaaattgcaaggaagctgagtttcccaatgggcagaatgctattttcacatgattatgttttctggtgcggggactttaactatcggatcgacctcccaaacgaggaagtgaaggagttaatccggcagcaaaattgggacagcctgattgccggggaccagctaataaatcaaaagaacgccggtcaggtgttcagggggttccttgagggtaaggtgacattcgccccgacgtataaatatgacttattttctgacgattacgatacgtctgaaaaatgtcggacacccgcatggaccgatagggtattgtggcggagacggaaatggcccttcgaccgctctgctgaggacctggacctgctcaatgcatctttccaggatgaaagcaagatcttgtacacctggaccccggggaccctgttgcattatgggagagcagagctgaagacttccgaccaccggccagtggtggctctcattgatatcgacatcttcgaagtggaagcggaagaaaggcagaacatttataaagaggtcatcgcggtgcaggggccccccgacggaactgtcctggtgagtattaaatccagtctgcccgaaaacaactttttcgacgacgcactaatcgatgagctgctgcagcagtttgcttccttcggtgaggttatcctgatcaggtttgtggaggataagatgtgggtgacattcctggagggctcaagcgctctgaatgtcctaagcctcaatggcaaggaactcctgaataggacgattaccatcgcactgaagagtcccgattggatcaaaaatctggaagaagaaatgtcactcgagaaaatttcaatcgccctgccgtcctcgacaagttctaccttgctgggggaagatgccgaggtagcggctgacttcgatatggagggcgacgtggacgactactccgccgaggtggaagagctactgcctcagcatttgcaaccatcctcaagttccggtctcggcacctctcctagcagcagtccaagaactagcccatgtcaaagtccaacaatttccgagggaccagtgccgtctttacctatcaggcccagcagagctccatcccgcacaccggggccgccatccgcccagtcaagcccaatcgacgcacagcccgcgacacctttaccacagaaggatcccgcccagcctctggaacccaagcgacctcccccgccaagacctgtggccccccccacccgaccagctcctccccaacggcctccacctccgagcggggcacgcagcccagctcccaccaggaaggaattcggtgcccctaagagcccaggaaccacccgaaaggataacattggacggtcacagccatctccccaggcaggtctggcgggccctggtcctgctgggtatagcacagcccgcccaactataccccctcgagcaggcgtcatttctgctcctcagagtcatgccagagcaagcgctggacgcctgactcctgagtcacagtcaaagacttctgaaacttcgaaaggcagcactttcttaccagaacctctgaaaccacaagccgccttccccccccagtcgtcacttcctcctcccgcgcagaggctgcaagagccgctcgttcccgtcgcggccccaatgcctcaatccggccctcagccgaacctcgaaacacctcctcagccgccgccgcggagtcgctcatcccactctctgcccagcgaggccagctcccaaccgcagcaggaacagccatcaggttag

SEQ ID NO: 60990 - DNA, 3888 bp, Artificial Sequence
  derived and/or modified sequence
atggcgtttagtaaagggtttcgaatctatcacaagctggatccccctccattttcactgatcgttgaaacgaggcataaggaggaatgcctcatgttcgagagcggagccgtcgctgtcctgtcttctgcagagaaggaagctatcaaaggaacttactctaaagttctggatgcttacggactgcttggagtcttgagacttaacctaggggacacaatgctgcattacctggtactagtaacaggatgcatgagcgtggggaagatccaggagagcgaggtatttagggtcacatccacggaatttattagcctccgaattgattcaagcgacgaagaccggattagtgaggtaagaaaagtgttgaacagtgggaacttttactttgcttggtcggctagcggcatctcgttagacctgtcattaaacgctcaccgcagcatgcaagagcagaccacggacaacaggttcttctggaaccagtctttgcacttgcacttaaagcattacggagtgaattgtgacgattggttgcttcgcttgatgtgtggcggagtggagatccgtacaatttacgctgctcacaagcaagcaaaagcttgcctgatctctagactgtcctgcgaacgcgctgggacccggttcaacgtgcggggaaccaacgacgatgggcacgtggctaacttcgtggaaactgagcaggtggtctatttagacgatagtgtgtcttcattcatccaaatcagaggctcggtgccgctattctgggaacaacctggactacaagtcgggagtcaccgagtgcgaatgtccaggggctttgaggctaatgcaccagccttcgatcggcactttcgcacgctgaagaacctgtacggcaagcaaattattgtcaatctgctggggagtaaggaaggtgaacacatgttatccaaggctttccagtctcaccttaaagctagtgaacacgctgctgacatccagatggtcaactttgattaccaccaaatggtgaagggcggaaaagccgagaaattgcatagcgtactaaaaccacaggtgcaaaagtttctcgactatggcttcttttattttaacggatcagaggtgcagagatgccagtccggaactgtgcgaacgaactgtttggactgcctcgataggaccaacagcgtacaggccttcctaggcctggaaatgctggctaagcaactagaagccctgggtctggcagagaaacctcagctagtaacgcgctttcaggaagtgtttaggtctatgtggagcgtgaacggagattccatatctaagatctatgcagggacgggtgcgttagaaggaaaggccaagctgaaggacggcgcaaggtccgtgacccgcactattcagaataacttcttcgattcttctaaacaggaagcaatagacgttctgctgttggggaacactctcaatagcgacctggcggataaagcaagggcacttctgaccacgggctcactgcgagttagcgaacagacactccaaagcgctagctctaaggtgttaaagagcatgtgcgaaaacttctataagtacagcaagccaaaaaagatcagggtgtgtgtcgggacctggaatgtaaacggaggtaagcagtttcgctctatcgcattcaaaaaccagaccctaacagactggctgttggatgcgcctaagctcgccggtatacaggagttccaagataagcggagcaagcccaccgacatcttcgccattggatttgaggaaatggtcgagctgaacgccggaaacatagtatcagcttccaccacaaaccagaaactctgggcggtggagctacagaaaaccataagccgggataacaagtatgtcctattggcttcagagcagctggtcggggtatgcttgttcgtgtttatcagaccccagcacgccccttttatccgagatgtggccgtagataccgtgaaaacaggaatgggcggtgctacgggaaataagggagccgttgcaatccgcatgttattccacacaaccagtctgtgctttgtttgcagccatttcgccgctggacagagtcaggtcaaggagcggaacgaggactttattgagatcgccaggaagctgtccttccctatggggaggatgctgtttagccatgactatgtgttctggtgtggggacttcaattataggattgacttgccgaacgaagaggtgaaggagctgatcaggcagcagaactgggatagcttgatagccggtgaccagctcattaatcagaagaatgccggtcaggtcttccggggttttctagagggcaaggtcacgttcgcacctacgtacaagtacgacttattctccgacgattacgacaccagtgagaagtgccgaacacccgcatggacagacagggttctctggagaagacgcaagtggccttttgaccgcagcgcagaggatttagacctgcttaacgcttccttccaggacgagagtaaaatcctttatacctggactcccggaactctgctccattacggcagggcagagctgaaaacctcagaccaccggccagttgtcgcactcattgatatcgacatattcgaggttgaagctgaagaacgtcaaaatatctacaaagaggtgattgcagttcaaggaccaccagatggcacagtgctggtgtcaattaagtctagcctgcccgagaataactttttcgacgatgccctgattgacgagctgttgcagcaatttgcctcttttggcgaagtgatcctgattagatttgtggaggacaaaatgtgggtcacattcctcgaggggagtagtgccctgaacgttctgagcctgaacggtaaagagttactgaacaggaccatcaccatcgcgttgaaatcccctgactggattaaaaacctcgaggaagaaatgtccctggagaaaatctccatcgcactgccgagctccacgtcgtccaccctgctgggggaggacgccgaggtagccgctgatttcgatatggaaggcgatgtcgacgattactcagccgaggtggaagagctgctgccccaacatttacagccatcaagcagctccggcttaggaacctccccatcatcgagcccgaggacgtccccttgtcagtcccccacaatctcagaggggccagtgcctagtctgccaataagaccttctcgcgcaccgagccgtactccgggacctcctagcgcccagagtagccccattgacgctcagccggctacgccactgccacagaaggatcccgcacagcccttggagcccaagagaccaccaccaccacggcctgttgccccaccgactcggcctgctccgccacagaggcctccacctccaagtggagcccgaagccccgctcctacacgcaaggagttcggggcaccgaaatcaccaggcactactcggaaagacaacatcggtaggtcccaaccgtctcctcaggccggattagcagggcctggtccagcgggatacagcaccgccagacctaccattccaccaagagctggcgtgatcagcgctccacaaagtcatgcccgagcctccgcagggagacttacgcccgagtcccagtccaagacatccgagactagtaaaggtagtacatttctgcctgaacccctaaagccccaggccgcttttcctccccagagctccctgccgccaccagcacagcggttacaagagcctctcgtgccagtagcagcccctatgcctcagtccggccctcagcctaatctggagaccccaccacaacctccaccaaggtcaaggtcatctcatagcctcccaagtgaagcatcatcccagccgcagcaggagcaacccagtggatag

SEQ ID NO: 60991 - protein, 1526 aa, Artificial Sequence
  derived and/or modified sequence
MAFSKGFRIYHKLDPPPFSLIVETRHKEECLMFESGAVAVLSSAEKEAIKGTYSKVLDAYGLLGVLRLNLGDTMLHYLVLVTGCMSVGKIQESEVFRVTSTEFISLRIDSSDEDRISEVRKVLNSGNFYFAWSASGISLDLSLNAHRSMQEQTTDNRFFWNQSLHLHLKHYGVNCDDWLLRLMCGGVEIRTIYAAHKQAKACLISRLSCERAGTRFNVRGTNDDGHVANFVETEQVVYLDDSVSSFIQIRGSVPLFWEQPGLQVGSHRVRMSRGFEANAPAFDRHFRTLKNLYGKQIIVNLLGSKEGEHMLSKAFQSHLKASEHAADIQMVNFDYHQMVKGGKAEKLHSVLKPQVQKFLDYGFFYFNGSEVQRCQSGTVRTNCLDCLDRTNSVQAFLGLEMLAKQLEALGLAEKPQLVTRFQEVFRSMWSVNGDSISKIYAGTGALEGKAKAGKLKDGARSVTRTIQNNFFDSSKQEAIDVLLLGNTLNSDLADKARALLTTGSLRASSKVLKSMCENFYKYSKPKKIRVCVGTWNVNGGKQFRSIAFKNQTLTDWLLDAPKLAGIQEFQDKRSKPTDIFAIGFEEMVELNAGNIVSASTTNQKLWAVELQKTISRDNKYVLLASEQLVGVCLFVFIRPQHAPFIRDVAVDTVKTGMGGATGNKGAVAIRMLFHTTSLCFVCSHFAAGQSQVKERNEDFIEIARKLSFPMGRMLFSHDYVFWCGDFNYRIDLPNEEVKELIRQQNWDSLIAGDQLINQKNAGQVFRGFLEGKVTFAPTYKYDLFSDDYDTSEKCRTPAWTDRVLWRRRKWPFDRSAEDLDLLNASFQDESKILYTWTPGTLLHYGRAELKTSDHRPVVALIDIDIFEVEAEERQNIYKEVIAVQGPPDGTVLVSIKSSLPENNFFDDALIDELLQQFASFGEVILIRFVEDKMWVTFLEGSSALNVLSLNGKELLNRTITIALKSPDWIKNLEEEMSLEKISIALPSSTSSTLLGEDAEVAADFDMEGDVDDYSAEVEELLPQHLQPSSSSGLGTSPSSSPRTSPCQSPTISEGPVPSLPIRPSRAPSRTPGPPSAQSSPIDAQPATPLPQKDPAQPLEPKRPPPPRPVAPPTRPAPPQRPPPPSGRSQPSPQAGLAGPGPAGYSTARPTIPPRAGVISAPQSHARASAGRLTPESQSKTSETSKGSTFLPEPLKPQAAFPPQSSLPPPAQRLQEPLVPVAAPMPQSGPQPNLETPPQPPPRSRSSHSLPSEASSQPQVKTNGISDGKRESPLKIDPFEDLSFNLLAVSKAQLSVQTSPVPTPDPKRLIQLPSATQSNVLSSVSCMPTMPPIPARSQSQENMRSSPNPFITGLTRTNPFSDRTAAPGNPFRAKSEESEATSWFSKEEPVTISPFPSLQPLGHNKSRASSSLDGFKDSFDLQGQSTLKISNPKGWVTFEEEEDFGVKGKSKSACSDLLGNQPSSFSGSNLTLNDDWNKGTNVSFCVLPSRRPPPPPVPLLPPGTSPPVDPFTTLASKASPTLDFTER

SEQ ID NO: 60992 - DNA, 4581 bp, Artificial Sequence
  derived and/or modified sequence
atggccttcagcaagggcttcagaatctaccacaagctggaccccccccccttcagcctgatcgtggagaccagacacaaggaggagtgcctgatgttcgagagcggcgccgtggccgtgctgagcagcgccgagaaggaggccatcaagggcacctacagcaaggtgctggacgcctacggcctgctgggcgtgctgagactgaacctgggcgacaccatgctgcactacctggtgctggtgaccggctgcatgagcgtgggcaagatccaggagagcgaggtgttcagagtgaccagcaccgagttcatcagcctgagaatcgacagcagcgacgaggacagaatcagcgaggtgagaaaggtgctgaacagcggcaacttctacttcgcctggagcgccagcggcatcagcctggacctgagcctgaacgcccacagaagcatgcaggagcagaccaccgacaacagattcttctggaaccagagcctgcacctgcacctgaagcactacggcgtgaactgcgacgactggctgctgagactgatgtgcggcggcgtggagatcagaaccatctacgccgcccacaagcaggccaaggcctgcctgatcagcagactgagctgcgagagagccggcaccagattcaacgtgagaggcaccaacgacgacggccacgtggccaacttcgtggagaccgagcaggtggtgtacctggacgacagcgtgagcagcttcatccagatcagaggcagcgtgcccctgttctgggagcagcccggcctgcaggtgggcagccacagagtgagaatgagcagaggcttcgaggccaacgcccccgccttcgacagacacttcagaaccctgaagaacctgtacggcaagcagatcatcgtgaacctgctgggcagcaaggagggcgagcacatgctgagcaaggccttccagagccacctgaaggccagcgagcacgccgccgacatccagatggtgaacttcgactaccaccagatggtgaagggcggcaaggccgagaagctgcacagcgtgctgaagccccaggtgcagaagttcctggactacggcttcttctacttcaacggcagcgaggtgcagagatgccagagcggcaccgtgagaaccaactgcctggactgcctggacagaaccaacagcgtgcaggccttcctgggcctggagatgctggccaagcagctggaggccctgggcctggccgagaagccccagctggtgaccagattccaggaggtgttcagaagcatgtggagcgtgaacggcgacagcatcagcaagatctacgccggcaccggcgccctggagggcaaggccaaggccggcaagctgaaggacggcgccagaagcgtgaccagaaccatccagaacaacttcttcgacagcagcaagcaggaggccatcgacgtgctgctgctgggcaacaccctgaacagcgacctggccgacaaggccagagccctgctgaccaccggcagcctgagagccagcagcaaggtgctgaagagcatgtgcgagaacttctacaagtacagcaagcccaagaagatcagagtgtgcgtgggcacctggaacgtgaacggcggcaagcagttcagaagcatcgccttcaagaaccagaccctgaccgactggctgctggacgcccccaagctggccggcatccaggagttccaggacaagagaagcaagcccaccgacatcttcgccatcggcttcgaggagatggtggagctgaacgccggcaacatcgtgagcgccagcaccaccaaccagaagctgtgggccgtggagctgcagaagaccatcagcagagacaacaagtacgtgctgctggccagcgagcagctggtgggcgtgtgcctgttcgtgttcatcagaccccagcacgcccccttcatcagagacgtggccgtggacaccgtgaagaccggcatgggcggcgccaccggcaacaagggcgccgtggccatcagaatgctgttccacaccaccagcctgtgcttcgtgtgcagccacttcgccgccggccagagccaggtgaaggagagaaacgaggacttcatcgagatcgccagaaagctgagcttccccatgggcagaatgctgttcagccacgactacgtgttctggtgcggcgacttcaactacagaatcgacctgcccaacgaggaggtgaaggagctgatcagacagcagaactgggacagcctgatcgccggcgaccagctgatcaaccagaagaacgccggccaggtgttcagaggcttcctggagggcaaggtgaccttcgcccccacctacaagtacgacctgttcagcgacgactacgacaccagcgagaagtgcagaacccccgcctggaccgacagagtgctgtggagaagaagaaagtggcccttcgacagaagcgccgaggacctggacctgctgaacgccagcttccaggacgagagcaagatcctgtacacctggacccccggcaccctgctgcactacggcagagccgagctgaagaccagcgaccacagacccgtggtggccctgatcgacatcgacatcttcgaggtggaggccgaggagagacagaacatctacaaggaggtgatcgccgtgcagggcccccccgacggcaccgtgctggtgagcatcaagagcagcctgcccgagaacaacttcttcgacgacgccctgatcgacgagctgctgcagcagttcgccagcttcggcgaggtgatcctgatcagattcgtggaggacaagatgtgggtgaccttcctggagggcagcagcgccctgaacgtgctgagcctgaacggcaaggagctgctgaacagaaccatcaccatcgccctgaagagccccgactggatcaagaacctggaggaggagatgagcctggagaagatcagcatcgccctgcccagcagcaccagcagcaccctgctgggcgaggacgccgaggtggccgccgacttcgacatggagggcgacgtggacgactacagcgccgaggtggaggagctgctgccccagcacctgcagcccagcagcagcagcggcctgggcaccagccccagcagcagccccagaaccagcccctgccagagccccaccatcagcgagggccccgtgcccagcctgcccatcagacccagcagagcccccagcagaacccccggcccccccagcgcccagagcagccccatcgacgcccagcccgccacccccctgccccagaaggaccccgcccagcccctggagcccaagagaccccccccccccagacccgtggccccccccaccagacccgcccccccccagagaccccccccccccagcggcagaagccagcccagcccccaggccggcctggccggccccggccccgccggctacagcaccgccagacccaccatcccccccagagccggcgtgatcagcgccccccagagccacgccagagccagcgccggcagactgacccccgagagccagagcaagaccagcgagaccagcaagggcagcaccttcctgcccgagcccctgaagccccaggccgccttccccccccagagcagcctgcccccccccgcccagagactgcaggagcccctggtgcccgtggccgcccccatgccccagagcggcccccagcccaacctggagacccccccccagcccccccccagaagcagaagcagccacagcctgcccagcgaggccagcagccagccccaggtgaagaccaacggcatcagcgacggcaagagagagagccccctgaagatcgaccccttcgaggacctgagcttcaacctgctggccgtgagcaaggcccagctgagcgtgcagaccagccccgtgcccacccccgaccccaagagactgatccagctgcccagcgccacccagagcaacgtgctgagcagcgtgagctgcatgcccaccatgccccccatccccgccagaagccagagccaggagaacatgagaagcagccccaaccccttcatcaccggcctgaccagaaccaaccccttcagcgacagaaccgccgcccccggcaaccccttcagagccaagagcgaggagagcgaggccaccagctggttcagcaaggaggagcccgtgaccatcagccccttccccagcctgcagcccctgggccacaacaagagcagagccagcagcagcctggacggcttcaaggacagcttcgacctgcagggccagagcaccctgaagatcagcaaccccaagggctgggtgaccttcgaggaggaggaggacttcggcgtgaagggcaagagcaagagcgcctgcagcgacctgctgggcaaccagcccagcagcttcagcggcagcaacctgaccctgaacgacgactggaacaagggcaccaacgtgagcttctgcgtgctgcccagcagaagacccccccccccccccgtgcccctgctgccccccggcaccagcccccccgtggaccccttcaccaccctggccagcaaggccagccccaccctggacttcaccgagagatag

SEQ ID NO: 60993 - DNA, 4581 bp, Artificial Sequence
  derived and/or modified sequence
atggcttttagcaaaggatttaggatttaccacaagctcgatccccccccttttagtttgatcgtggaaacaaggcataaggaagagtgcctgatgttcgaatcaggcgccgttgcagttttgtccagcgccgaaaaagaggctataaaaggaacttacagcaaggtgctagatgcttacggtctgctgggcgtactgaggctcaatctgggagataccatgctacattacctcgtcctggtcacagggtgcatgagcgttgggaaaattcaggagtcagaggtcttcagagttacctcgacagaattcatctccttgcgaatcgactcctcagatgaagacagaatctccgaggttagaaaggtgctgaactctggcaacttttatttcgcttggtccgctagcgggatatcacttgacctctccctgaatgcgcaccgaagtatgcaggaacagacaacagataaccgcttcttctggaatcaatctctacacttgcatctgaagcactacggggtgaattgcgacgactggcttctgcggctgatgtgcggtggcgtggagatccgaaccatatacgcggcccacaagcaggccaaggcatgccttatcagccggttgtcatgcgagagagccggtacacgcttcaatgtcagaggaacaaatgacgacggccacgtggcgaactttgtggaaacagagcaggttgtgtaccttgacgattcagtttccagcttcatacaaataaggggaagtgtgcctctgttctgggaacagcctggacttcaggtcggatcacacagagtccgcatgtctaggggattcgaggctaacgccccagctttcgataggcacttccgtaccctgaagaacttgtatggcaagcagatcatcgtgaacctgttgggtagcaaggaaggagagcatatgctgtccaaggcattccaatcccacctgaaggcttctgaacatgcagccgacatacagatggtaaattttgattatcaccagatggtaaaggggggcaaggccgagaagctgcactctgtcttaaagccacaggttcagaagttccttgactacgggttcttctattttaacggatccgaagtacagcggtgtcagtctggcacagtgagaactaactgtctcgattgcctggaccgcaccaatagcgtgcaggccttccttggcctagagatgctcgccaaacagctcgaagccctgggactagccgagaagccgcagttggtgaccaggtttcaagaagtgttccgatccatgtggtctgtgaatggagacagcatctccaaaatttacgcgggaaccggggccctcgaggggaaggcaaaagccggaaaactgaaagatggtgccaggagcgtgactcgaacaattcaaaacaatttcttcgactcttccaagcaggaagcaattgacgtactgctcctgggaaatactttaaacagtgaccttgcagacaaagcccgcgcgttacttaccaccggttcactcagagcttcaagcaaggtgctcaagtccatgtgcgagaatttctacaagtatagcaagcctaagaaaatccgggtgtgtgtcggcacatggaacgtgaacggcggtaagcaattccgcagtattgctttcaagaatcagactctgactgattggttactcgatgccccaaaactcgccgggatacaagagttccaagacaagaggagtaaacctacagatattttcgccatcggctttgaagaaatggttgaattgaacgctggcaacatcgtctccgcttcgactacgaaccaaaaactttgggcagttgaactccagaagacaatatctcgggataataagtacgtgctgctagcgtctgagcaattggtaggagtatgtctctttgttttcattagacctcagcatgcaccattcattcgtgacgtcgcagtggacacagtgaagacgggcatgggaggagcgaccggaaataagggcgctgtggccatcagaatgctgtttcatacaacttctctgtgttttgtgtgctcacacttcgcagctggccagagccaagtaaaggaacggaacgaagactttatcgaaatcgcccgcaaactgtcctttcctatgggtaggatgctgttttcccacgactacgttttctggtgtggcgacttcaattatcgaatcgacctgcccaacgaggaggtcaaagagttgatcaggcaacagaactgggactcgctgattgctggcgaccaactgattaaccagaagaatgcaggccaggtatttagagggtttcttgaaggaaaggtcacgttcgccccaacttataagtatgacctgttcagcgacgactatgacacctctgaaaagtgccgaacaccagcatggaccgatagagtcttgtggcgccgtcgcaaatggccatttgatcgatctgcagaggacttggacttattgaacgcatcattccaagacgagtcaaaaattctgtacacttggacacctgggacacttctacattacggtagggccgaactgaagacctcagaccaccgtcccgtggttgccctgatcgatatcgatattttcgaagtagaggcagaagagcgtcagaacatatacaaagaagtgatcgccgtgcagggcccccccgatggaacagttttggtcagcatcaaatcatctctcccggaaaacaacttcttcgatgatgcactgatcgatgagttgctgcagcagtttgctagttttggcgaggtgattctgatccgatttgttgaggacaaaatgtgggtgacctttctggagggcagttcagctttaaacgtgcttagtctgaatgggaaggagcttctgaatcgcacaattacgatcgctcttaagtcccccgattggataaaaaacctcgaagaggagatgagcttagaaaagatctctattgccctgccaagttcaacctcctcaaccttactgggcgaagacgctgaggtcgccgctgatttcgatatggagggcgatgtggatgactacagcgccgaggtggaagagttgcttcctcagcaccttcagcccagtagcagctcgggacttggaactagtccctcttcctcaccgcgcacaagcccatgccagtcccctacaattagtgaggggccggtaccctctctgccaatccggccttccagggcccctagtaggacgccaggccccccttctgctcagagtagtcccatcgatgctcaacccgcaacccccctgcctcagaaggatcccgctcagccactggaaccaaagcgtccccccccgcctcgcccagttgctccacctacgaggcccgcacccccccagcggccccctccgccgagtgggaggagtcaaccatccccacaggctggactggccgggccagggcccgccggctactcaaccgcgagacctactattccgcccagggcaggggtgatctccgctcctcagagccacgcacgagccagtgcaggacggcttacacctgaaagccagagcaagacctcagaaacatccaaaggctccacgtttttgcccgagccactgaagccgcaggctgcattcccccctcaaagctcattgccacctccagcccagcgtctgcaggaacctctggtccccgtggccgcccccatgcctcagagcggccctcagcctaatctcgagacccccccgcagcctccgccaagatcacgatcgtcccactccctgccatctgaagcctcctcacagccacaagtcaagacgaatggcatctccgacgggaagcgggagagtcccctaaagattgaccctttcgaggatttatcttttaatttactggccgtgagcaaagcacaactttctgtgcagacttcgccagtaccaaccccggacccaaagaggttaatccaacttcccagcgctactcagtccaacgtgcttagcagcgtttcatgtatgccaactatgccacccatccctgccagaagccagtctcaagaaaatatgagatctagccctaatccttttataacaggtcttactcggactaacccttttagcgaccggactgccgcacccggcaatccgttcagggcaaagtcagaggagagtgaagcgacaagctggttttcaaaagaagagcctgttacaatcagtccctttccatcactgcagccccttggccataataagagtcgtgcatcctcttctctggacgggtttaaagactcattcgatttacaaggccagtccacactgaaaatctccaatcctaagggttgggtcacattcgaggaggaagaagactttggggtgaaaggcaagtctaagtcggcctgcagcgatctcctgggaaatcaacccagcagtttctcaggctccaatctaacactgaacgatgactggaacaaggggaccaacgtctccttctgcgttctgccctcgcgacgaccccctccaccacctgtgcctttgctgccacccggcacctctccccctgtggaccctttcaccacattggctagcaaggcgagccctacactggatttcactgagaggtag

SEQ ID NO: 60994 - DNA, 4581 bp, Artificial Sequence
  derived and/or modified sequence
atggccttcagcaagggcttccgcatctaccacaagctggaccccccacccttcagcctgattgtggagaccaggcacaaggaggagtgcctgatgtttgaaagtggagctgtggccgtgctgagcagcgctgagaaggaggccatcaagggcacctacagcaaggtgctggatgcctacggcctgctgggcgtgctgcggctgaacctgggggacaccatgctgcactacctggtgctggtgacaggctgcatgtctgtgggcaagatccaggagagcgaggtgttccgggtgaccagcacagagttcatcagcctgagaattgacagcagtgatgaagatcgcatcagcgaggtgaggaaggtgctgaacagcggcaacttctactttgcctggagcgccagcggcatcagcctggacctgagcctgaatgcccaccgctccatgcaggagcagaccacagacaaccgcttcttctggaaccagagcctgcacctgcacctgaagcactatggagtgaactgtgatgactggctgctgcggctgatgtgtggcggcgtggagatccgcaccatctatgctgcccacaagcaggccaaggcctgcctgatcagccggctgagctgtgagcgggccggcacccgcttcaacgtgcggggcaccaatgatgatggccacgtggccaactttgtggagacagagcaggtggtgtacctggatgacagcgtgtcctccttcatccagatccggggctctgtgcccctcttctgggagcagcccggcctgcaggtgggcagccaccgggtgaggatgagccggggctttgaggccaatgccccagcctttgacagacacttccgcaccctgaagaacctgtatggcaagcagatcatcgtgaacctgctgggcagcaaggagggggagcacatgctgagcaaggccttccagagccacctgaaggccagcgagcacgccgctgacatccagatggtgaactttgactaccaccagatggtgaagggcggcaaggccgagaagctgcacagcgtgctgaagccccaggtgcagaagttcctggactatggcttcttctacttcaatggaagtgaggtgcagcgctgccagagcggcaccgtgaggaccaactgcctggactgcctggacaggaccaacagcgtgcaggccttcctgggcctggagatgctggccaagcagctggaggccctgggcctggccgagaagccccagctggtgacccgcttccaggaggtgttccgctccatgtggagcgtgaatggagacagcatcagcaagatctatgccggcactggagccctggagggcaaggccaaggccggcaagctgaaggatggagcccggtctgtgaccaggaccatccagaacaacttctttgacagcagcaagcaggaggccattgatgtgctgctgctgggcaacaccctgaacagcgacctggccgacaaggcccgggccctgctgaccaccggcagcctgcgggccagcagcaaggtgctgaagtccatgtgtgagaacttctacaagtacagcaagcccaagaagatccgggtgtgtgtgggcacctggaatgtgaatggaggcaagcagttccgcagcatcgccttcaagaaccagaccctgacagactggctgctggatgcccccaagctggccggcatccaggagttccaggacaagaggagcaagcccacagacatctttgccatcggctttgaggagatggtggagctgaatgccggcaacatcgtgtctgccagcaccaccaaccagaagctgtgggccgtggagctgcagaagaccatcagccgggacaacaagtatgtgctgctggccagcgagcagctggtgggcgtgtgcctgtttgtgttcatccggccccagcacgcccccttcatcagagatgtggccgtggacacagtgaagacaggcatgggcggggccactggaaacaagggagctgtggccatccgcatgctgttccacaccaccagcctgtgctttgtgtgcagccactttgctgctggccagagccaggtgaaggagagaaatgaagacttcatcgagatcgccaggaagctgtccttccccatgggccgcatgctgttcagccatgactatgtgttctggtgtggggacttcaactacagaattgacctgcccaatgaggaggtgaaggagctgatccggcagcagaactgggacagcctgattgctggggaccagctgatcaaccagaagaatgccggccaggtgttccggggcttcctggagggcaaggtgacctttgcccccacctacaagtatgacctcttcagtgatgattatgacaccagcgagaagtgcaggaccccagcctggacagacagagtgctgtggaggaggaggaagtggccctttgacagatctgctgaggacctggacctgctgaatgccagcttccaggatgagagcaagatcctgtacacctggaccccaggcaccctgctgcactacggccgggcagagctgaagaccagtgaccacaggcctgtggtggccctgattgatattgacatctttgaggtggaggccgaggagcggcagaacatctacaaggaggtgattgctgtgcagggccccccagatggcaccgtgctggtgtccatcaagagcagcctgcctgagaacaacttctttgatgatgccctgattgatgagctgctgcagcagtttgccagctttggagaggtgatcctgatccgctttgtggaggacaagatgtgggtgaccttcctggagggcagcagcgccctgaatgtgctgagcctgaatggcaaggagctgctgaacagaaccatcaccatcgccctgaagagcccagactggatcaagaacctggaggaggagatgagcctggagaagatcagcatcgccctgcccagcagcaccagcagcaccctgctgggggaggatgctgaggtggccgctgactttgacatggagggagatgtggatgactacagcgctgaggtggaggagctgctgccccagcacctgcagcccagcagcagcagcggcctgggcaccagccccagcagcagccccaggaccagcccctgccagagccccaccatcagcgagggccctgtgcccagcctgcccatccggcccagccgggcccccagcaggaccccaggccccccatctgcccagagcagccccattgatgcccagcctgccacccccctgccccagaaggaccctgcccagcccctggagcccaagaggcctcctccacccaggcctgtggccccacccaccaggcctgccccaccccagaggcctcctcctccttctggccgcagccagcccagcccccaggccggcctggccggccctggccctgctggctacagcacagcccggcccaccatcccccccagggctggggtcatcagcgccccccagagccacgcccgggccagcgctggccgcctgaccccagagagccagagcaagaccagcgagaccagcaagggcagcaccttcctgcctgagcccctgaagccccaggccgccttccccccccagagcagcctgcccccaccagcccagaggctgcaggagcccctggtgcctgtggccgcccccatgccccagagcggcccccagcccaacctggagaccccaccccagcccccacccaggagccgcagcagccacagcctgcccagcgaggccagcagccagccccaggtgaagaccaacggcatcagtgatggcaagcgggagagccccctgaagattgacccctttgaggacctgtccttcaacctgctggccgtgtccaaggcccagctgtctgtgcagaccagccctgtgcccaccccagaccccaagaggctcatccagctgcccagcgccacccagagcaatgtgctgagctctgtgtcctgcatgcccaccatgccacccatcccagcccggagccagagccaggagaacatgaggagcagccccaaccccttcatcaccggcctgaccaggaccaaccccttcagtgacagaacagctgcccctggcaaccccttccgggccaagtctgaggagagcgaggccacctcctggttcagcaaggaggagcctgtgaccatcagccccttccccagcctgcagcccctgggccacaacaagagccgggccagcagcagcctggatggcttcaaggacagctttgacctgcagggccagagcaccctgaagatcagcaaccccaagggctgggtgacctttgaggaggaggaggactttggagtgaagggcaagagcaagagcgcctgcagcgacctgctgggcaaccagcccagcagcttcagcggcagcaacctgaccctgaatgatgactggaacaagggcaccaacgtgtccttctgtgtgctgcccagcagaagacctcctcctcctcctgtgcccctgctgcccccaggcaccagcccccctgtggaccccttcaccaccctggccagcaaggccagccccaccctggacttcacagagaggtag

SEQ ID NO: 60995 - DNA, 4581 bp, Artificial Sequence
  derived and/or modified sequence
atggccttcagcaagggcttccggatctaccacaagctggacccccctcccttttctcttatcgtcgaaacacgtcataaggaggaatgccttatgttcgagtctggcgcagttgcagttctttcctcggctgagaaggaagccattaagggcacgtattcaaaagtactagacgcatacgggctcctcggagtcctccggctcaatctgggagacactatgctccattaccttgttctcgtgaccgggtgcatgtctgtgggtaagatacaggagagcgaggtgttcagggtaacatccactgaattcataagtctgcgcattgattcatccgacgaggatcggatcagcgaagtccgaaaggtgcttaacagtgggaatttttatttcgcctggtccgcctccggcattagtcttgatctgtcgctgaatgctcataggagcatgcaggaacagaccacggataatagattcttctggaaccagagtcttcacctgcacttgaagcactacggggtcaattgtgacgattggctactgcggttaatgtgtgggggggtcgagatccggaccatttacgccgctcacaagcaggctaaagcctgtctcatatcaaggctctcctgcgagagggccggaaccagatttaatgtgcgggggacaaatgacgacggccacgttgctaacttcgttgagaccgaacaggtggtgtatcttgacgattctgtttctagtttcatccaaatccgcggttcagtgccgctgttctgggagcagcccggtctgcaggttggctcccatcgagtgaggatgtcgaggggattcgaggcaaatgctccagcttttgacaggcactttaggacgctaaagaacctgtatggcaaacagatcattgtgaacctgctaggaagtaaagaaggcgagcatatgctctctaaggcgtttcagtcacacctcaaggctagcgaacacgctgctgatatacagatggtcaattttgactaccaccagatggtgaaaggcggcaaagccgaaaagctccactcggtgcttaaacctcaggttcaaaaattcctcgattatggttttttttatttcaatggaagcgaggtccaaagatgccaaagcggcacggtccgtactaactgtctcgactgtctcgaccgtactaatagtgtccaggccttcctgggccttgaaatgttagccaaacaactggaggctctcgggttagccgagaaaccacagctggtaactaggtttcaggaagtgttccgctcgatgtggagtgtcaatggtgatagtattagtaaaatctacgcgggtaccggggccttggagggtaaggccaaggctggaaagctgaaggacggcgcgagatcagtcacccgaacaatccagaataacttcttcgattcttccaagcaggaagccatcgacgtgctgctcctcgggaataccctcaactccgatctggctgacaaggcacgcgcgctgctgaccactggcagcctacgagcgagtagtaaagtcctgaagagcatgtgcgaaaatttctacaagtactctaagccaaaaaaaattcgggtttgcgttgggacatggaacgtaaatgggggcaagcagtttaggagtatcgcctttaagaatcagaccctgaccgattggctcctggacgctcctaaattagcaggcatccaagaatttcaggataaaaggtccaagccaactgacatctttgctatcggcttcgaggaaatggtggagctgaatgctggaaacattgtctctgcctctaccaccaaccagaaattgtgggctgtggagctgcagaaaactatttctcgggacaacaagtacgtgctccttgcgtcggaacagcttgtgggggtctgtctgttcgtctttataaggcctcagcacgctccctttattcgtgatgtcgccgtggacactgtcaaaacggggatggggggggccaccgggaataagggagctgtcgcaattaggatgctcttccacacaacaagtctgtgttttgtgtgttcccacttcgccgccggacagtcgcaagtgaaagagcgcaacgaggatttcatcgaaatcgcccgcaaactgtccttccccatgggtcggatgctgttctctcatgactatgtcttttggtgtggggacttcaattatcgtatcgatctgcccaatgaagaagtgaaagagctcatcaggcagcaaaactgggatagcctcattgccggcgatcagcttataaaccagaagaacgctggtcaggtctttcggggttttttagagggcaaagtgacctttgcccctacatataagtacgatttgttttctgacgactatgacaccagtgaaaaatgccgaaccccggcttggacagatagggtcctttggaggcggcggaagtggccatttgatagaagcgctgaggacctcgacctccttaacgcatcatttcaagatgaatccaagatcttatacacctggactcctgggaccctgcttcactacggccgagcagagctgaaaacatccgatcatcgaccggtcgtggccttgatcgacatcgatatctttgaagtagaagccgaagaaaggcaaaatatctacaaagaggttattgctgtgcagggtcctcccgacggaactgtcttggtaagcatcaagagtagcctgcctgagaacaatttctttgatgacgccctcatcgatgagctgctccagcagtttgcatcattcggggaagtgattctgattaggtttgtggaggataaaatgtgggtgacctttttggagggctccagtgccctgaatgtactgtcgctgaatggcaaggagctcctaaaccgaaccatcaccatcgctctgaaaagtcccgactggatcaagaatctggaggaagagatgtcacttgaaaagatttccattgccctgccctcaagcactagcagcactcttctgggtgaggatgccgaagtcgcagctgattttgatatggagggtgacgtcgacgattacagtgccgaagtggaagagcttctccctcagcacctacagccatcttcgagttctggcctgggcacatccccttcctcatctccccggacaagcccgtgccagtcaccaacaatatccgaaggcccggtcccatcactgccaatacggcccagccgagcccctagtcgaacacctggtccaccttccgctcagagctctccaattgacgcccaacccgcgacccctctcccacaaaaggatcctgcacagccactggagccaaaaaggcctcctccaccgaggccggttgctccaccaactaggcctgccccgccccaaagaccgccaccccctagcgggcgctctcagcctagtccacaggccggccttgctgggccaggccccgcgggttattcaaccgcacggcccacaattcctccaagagctggcgtaatttccgctccacagtctcacgcccgggccagcgcggggagattgacgccagagagccaaagtaaaacttctgagacctcaaagggatctacgtttctccctgaaccactgaagcctcaggctgctttcccgcctcagagctcattacctccgcctgcacagaggctgcaggagcctcttgttccagtcgccgcacctatgccccaatctggcccacagccgaatctggaaacaccccctcagcccccaccgcgatcacgcagcagccattcactgccatctgaggcctcttcacagcctcaggttaagacaaacgggattagcgacggcaagagagagtcaccactgaaaattgatcctttcgaggatctcagtttcaatctactcgccgtttcgaaggctcagctgagcgtccagacaagtcctgtccctacacccgatcccaagagactcattcaacttccatcagccacccagtcaaatgtcctgagcagcgtctcttgtatgcccactatgccaccaatacccgccaggtcccagtcacaggagaatatgcgcagtagcccaaatccgttcatcacaggtttaaccagaacgaatccattctctgacaggacagcagcaccgggcaacccattccgagcaaaaagcgaggaatctgaggcaacgagctggtttagcaaggaagagcctgttaccatcagccctttcccgtccctgcagccgttggggcacaataaaagcagggcttcctccagtctcgacggcttcaaggacagtttcgatttgcagggacagtccacccttaaaatttctaatccaaagggctgggtcacattcgaggaagaagaggactttggcgttaaaggtaagtccaagagtgcctgctcagacctacttggcaatcagccctcatctttctccgggagcaatctgaccctcaatgatgactggaataagggtaccaacgtgagtttttgcgtcctgccctctagacggcctcccccaccacccgtccctctactgcctcctggaacctctccaccagtggacccctttacaaccctggcctctaaggcatcacccacccttgacttcactgagcgctag

SEQ ID NO: 60996 - DNA, 4581 bp, Artificial Sequence
  derived and/or modified sequence
atggccttcagtaagggctttaggatctatcataagttagaccccccaccatttagcctgatagttgagaccaggcataaagaagagtgcctgatgtttgagtctggagcagtggcagtgctgtcctctgccgagaaggaagccataaagggtacttattccaaggtgttggatgcctatggactgttaggcgtgcttcgcctgaatcttggagacaccatgctgcactacttggtgctggtcacaggctgcatgtccgtgggcaaaatccaagaatctgaagtcttcagagtgacttccaccgaattcatttctctcaggatcgactccagcgacgaggatcgcatatctgaggtgcgaaaagtgcttaattctggaaacttttatttcgcctggagcgcatctgggattagcctggatctgagcctgaatgcccaccgatcaatgcaggaacaaactacagacaacagattcttctggaaccagtcactgcacttgcacctgaagcactatggtgtgaattgtgacgattggcttctaaggctgatgtgcggcggtgtggagatcagaactatttacgctgcacacaaacaggccaaggcctgtctaatctcgcgactgagttgcgagcgggctggcactcggttcaacgtgcgcggtactaacgatgacggccacgtagcaaacttcgtcgagacagagcaagttgtctacttggatgactccgtaagctcatttatccagatccggggatctgtaccattattttgggagcaacccggactgcaagtcgggagccaccgtgtcaggatgtctcgcggatttgaggctaacgctcccgcattcgataggcactttcggactttgaaaaatttgtatgggaaacaaatcatcgtgaacctgctggggtcaaaagaaggagagcacatgcttagcaaggcattccagagccatctgaaggctagcgaacacgccgctgacatccagatggtaaattttgactaccatcagatggtaaagggcggaaaagccgagaagcttcattctgtactgaagccccaagttcagaagttcctggactacggattcttttatttcaatgggtccgaggtgcaacgttgccagagtggtacggttagaactaactgtctcgactgtctggatcgcacaaactcagtgcaggcctttctcgggctggagatgcttgccaaacagcttgaggctctgggcctcgcggaaaagcctcagctggtaacccgattccaggaggtgtttagaagcatgtggtcggtcaatggagattcaatctctaaaatttacgctggcacaggggctctggaggggaaggccaaagccggtaagttaaaagacggcgctaggtctgtgactagaacaatccaaaataacttcttcgattcttctaagcaagaggccatcgacgttctgcttctagggaacaccctgaatagcgacctggctgataaagctagggcactcctcaccacgggatctctacgcgcatcaagtaaggttttgaaaagtatgtgcgaaaatttctacaaatacagcaagcccaaaaagattagagtatgcgtcggcacctggaatgtgaatggaggaaaacagtttcggtcaatagcctttaaaaaccagacgctaaccgactggttacttgacgcaccgaagctcgccggaattcaggagttccaggacaagcgaagtaaacccaccgacatatttgctattggatttgaggaaatggtcgaactcaatgcagggaacatcgtttcagcctctacaaccaaccagaaattgtgggccgtcgagctgcagaagaccatctcccgtgataacaagtacgttttactcgctagcgaacagctagtgggggtgtgcctgttcgtgtttatcagacctcagcatgctcctttcattagggatgtggcagtcgacactgtcaagacaggcatgggcggtgcgactggcaataaaggagccgtggcaattaggatgctttttcacacaacctctctgtgtttcgtttgctcccacttcgcagccggtcagtctcaggtgaaggaaaggaatgaagactttatagaaatcgcgcgtaaactctcatttccaatggggcgaatgttattctctcacgactacgtgttctggtgcggcgacttcaattaccgcatcgatcttcctaacgaagaggtgaaagagttgataagacaacagaattgggattccttgattgcaggggatcaacttatcaatcagaagaatgctggtcaggtctttagagggttccttgaaggcaaagttacgtttgccccaacctacaaatacgatttgttttctgacgactatgacacgagcgagaaatgccgcacccctgcctggactgaccgagtgctgtggcgacgtaggaagtggcctttcgacaggtccgccgaagacctggacctgttgaacgccagtttccaggacgagagtaagatactctatacgtggactccaggaactcttcttcattacgggcgagcagaattgaaaacatccgatcatcgtccagtggtcgccctcattgacatcgacattttcgaggtggaggctgaggaaaggcaaaatatctacaaggaagtgatcgccgtgcagggtcctcccgatggcactgtgctggtgagtatcaagtctagcctgcctgagaacaactttttcgatgatgcgttgatagacgaactcctgcagcagtttgcaagttttggtgaagtgatcctcattcgcttcgtagaggacaagatgtgggtgacatttctggagggctcctctgccctgaacgtcctttccttgaacgggaaggaactgctgaaccgcactatcaccatagccctcaagtctcctgactggatcaagaatctggaagaggagatgtctctcgagaagataagcatcgccctcccttcttctactagcagcaccctgttaggcgaggacgccgaggtggcagccgacttcgatatggagggagacgtagacgactactctgcggaagtggaggagttactccctcagcatctgcagccttccagctcctcagggctgggcacctcccctagcagttctcccagaacatctccctgtcagtcccccaccattagtgagggcccagtgccgtcactccctattagacccagccgcgcaccaagtagaacgcctggcccaccttcagcccagtccagtccaattgatgcccaaccagccactcccctgccccagaaggatcccgcacaacccctcgagccgaaaagaccacccccaccaaggcctgtggccccacctacacgtccagcccctccacagagacctccccctccaagcgggaggtctcagcccagcccccaggccggactggccggaccaggccctgccggatattcgacagccagaccaacaattccaccacgcgctggagtaatctctgccccacagtcacatgcacgtgcctccgccggtagactgacgcctgagtcacagagcaaaacttcagaaacatcgaaaggcagcacctttctgccggaacccctgaagcctcaggctgcttttcctccacagtcatcccttcccccacctgcccagagactgcaggaaccactggtgcctgtggcagcccctatgcctcagtccggccctcagccaaatctggagacacccccacagccccctccccgatccaggtcatctcattctctcccgtccgaagccagttcacagccgcaggtcaagactaacggtatatcagacggcaaacgggaaagcccactcaaaatcgaccccttcgaggacctgtcctttaacctgctcgccgtctccaaggcccaactgtccgtgcaaacatctcccgtcccaaccccggaccctaaacgactgattcaactcccctcagcgacccagtcgaatgtcctcagttcagtctcttgcatgcccaccatgcccccaattcctgccaggagccaatcccaagaaaacatgagaagctctccgaatcccttcatcactggactcactagaaccaatccgttctcagatagaacagccgctcccggtaacccgttccgtgctaagagcgaggagtctgaagctactagctggttctccaaggaagagcctgtgaccatctccccctttcccagtttacagcccttggggcacaacaagagcagagcatcttcctctctggatggcttcaaggattcctttgacctccagggtcagtcaactctgaaaatctctaatcccaaaggctgggttactttcgaggaagaggaagattttggcgtgaagggtaagtcgaagtcagcctgttcggatctcctcggcaaccaaccaagctccttctctggcagtaatctcactttaaacgatgactggaacaaaggcaccaatgtttctttctgtgtgcttccttctcgaaggccaccccctccccctgtcccactcctgccgcctggaacaagtcccccagttgaccccttcactacactggcttccaaagcatcccctacgctggatttcacggagcgatag

SEQ ID NO: 60997 - DNA, 6942 bp, Artificial Sequence
  derived and/or modified sequence
aagccggcggggggcggggagctgctgcggccagacccacgggcagccgggcgggcggacgcctccaagaccagtctctgcctccgcagcgtcagcgggagcgggctgcctccgaagaaaggagaatggcgttcagtaaaggattccggatctatcacaaattggatcccccacctttcagcctcatagtggaaactaggcataaggaagaatgtctcatgttcgagtctggggctgtcgctgtgctctcatctgcagaaaaagaggcaatcaagggtacatactccaaagtactggatgcatatggactcttaggtgttctgcggttaaatcttggtgatactatgttacattatctggtcctagtcactggatgtatgtctgttggaaaaattcaagaatctgaagttttccgagttacttccactgagtttatatcactgcgaatcgattcttcagatgaggatcgcatttcagaagtgcggaaagttttgaattcaggaaacttttattttgcatggtctgcatctggcatcagtttagatttgagtcttaatgcgcatcgtagcatgcaagaacagacaactgataatagatttttctggaatcagtctttgcatttgcatctcaaacactatggcgtgaattgtgatgactggttattacgtcttatgtgtggaggagtagaaatcagaacaatttatgctgctcataaacaggcgaaggcttgcctcatttcaagattaagctgtgaacgagctgggaccaggtttaatgtccggggaacaaatgatgatggtcatgttgccaattttgtagaaacagaacaggttgtgtacttagatgactcagtttcttccttcatacaaatccgaggatctgttccattgttctgggagcaaccagggttgcaagtgggatctcatcgtgtccgtatgtcaaggggatttgaagccaatgcacctgcttttgacaggcattttagaacacttaagaacttatatggtaaacaaataatagtaaatttgcttggatctaaggaaggtgaacatatgctaagtaaagctttccagagtcatttgaaagcttctgaacatgctgctgatatccagatggtgaattttgactatcatcaaatggttaagggaggaaaggcagaaaaattacatagtgttcttaaacctcaagtccagaagtttctagattatggatttttttatttcaatggaagtgaagttcaaagatgccagagtggtacagttcgaacaaactgcttggattgtcttgatagaacaaatagtgtgcaggcatttcttggcttagagatgctagctaaacagttggaagctcttggtttagctgaaaagcctcagttggtgactcgctttcaagaagtttttcggtcaatgtggtccgtgaatggtgattcaatcagtaagatatatgcaggaactggagctcttgaagggaaagcgaaggctggaaagttaaaagatggtgctcgctctgttacccgaacaattcagaataacttctttgacagctccaagcaagaggccattgatgttttgctactgggaaatactctgaatagtgatttagctgacaaagctcgagcacttttaactactggaagtttgcgtgcatcttctaaagtactaaagagcatgtgtgagaatttctacaaatattcaaagcctaagaaaattcgagtatgtgtcggaacctggaatgtgaatggtgggaagcaatttcgcagcatagcttttaagaatcagacactcactgactggcttcttgatgcacccaagttagctggcatccaggagtttcaagataaaagaagtaagccaactgatatatttgcaattggttttgaagaaatggtagaattgaatgctggaaacattgtgagtgcaagcacaacaaatcagaagctctgggctgtagaacttcagaagacaatctccagagacaacaagtatgtgctgctggcttctgaacagttggtgggcgtctgtttgtttgtttttatcagaccacagcatgctccttttatcagggatgttgcagttgatactgtgaagactggaatgggaggtgcaactggaaataagggagcagttgcaatccgaatgctcttccatacaaccagcctttgcttcgtctgtagccactttgctgcagggcagtcacaagtcaaagaaagaaatgaagattttatagaaatagcacgaaaattgagttttcctatgggaaggatgctattttcccatgactatgtattttggtgtggtgatttcaactatcgaatcgatctccctaacgaagaagttaaagagctcataagacagcaaaattgggattctcttatagcaggagatcaacttatcaatcagaaaaatgctggacaggtttttagaggatttttagaaggaaaggtaacctttgctccgacatataagtatgacttgttttctgacgactatgacaccagtgaaaagtgccgcacccctgcctggacagaccgtgtcctttggagaaggaggaaatggccttttgatagatcagctgaagatctagatcttctaaatgctagttttcaagatgaaagcaaaattctgtacacgtggactccaggcactttgctgcactatggaagagctgagctgaagacttctgaccacaggcctgtcgttgccctgattgatatagatatatttgaagttgaagctgaagagaggcaaaacatttataaagaagtaattgcagttcagggtccaccagatggtacagtattggtctcaatcaaaagttctttaccagaaaataatttttttgatgatgccttgattgatgagcttctgcagcagtttgcaagttttggtgaagttatacttataagatttgtagaagataaaatgtgggttacatttttggagggaagctctgccttgaatgttctgagcctaaatggtaaagagttattgaatcggactataactattgctttaaaaagtccagactggatcaaaaatttggaagaagaaatgagtttagagaaaattagcattgcattgccatcatcaacaagctctaccctgcttggtgaagatgcagaggttgcagcagattttgatatggaaggtgatgttgatgactatagtgctgaagtggaggaacttcttcctcagcatctccagccatcttcaagttccggccttggtacttcccccagctcttcaccccgaactagtccctgccagtcacctacaatatcagagggtcctgtaccttcccttcccatcagaccaagccgagcaccgtcaagaactcctgggcctcccagtgcacagagttctcctattgacgcgcagccagcaacgccgctgccgcagaaagaccccgcccagcccttggagcccaagcggccgccgccgccccgcccggtcgcccctcccacacgcccggctcccccacagagacctcctccgccttcaggacgcagtcagccttcacctcaagcaggacttgcaggcccaggacctgctggatacagtacagccagaccgacgattcctcctcgtgctggagttatcagtgccccacagagccacgcgcgggcatctgctggaagactgactcctgaaagccaaagcaaaacatcagaaacgtcgaaaggttcaactttccttcctgaaccactgaagcctcaggctgcttttcctccgcagtcttctttgcccccgcctgctcaaaggttgcaagagcctcttgtccctgtggcagcacctatgcctcagtctggcccccagccaaatttggaaaccccaccacaaccaccacctcgaagcaggtcatcccatagcttgccttcagaagcttcctcacaaccgcaagtaaaaacaaatggaatctctgatggcaaaagagaatcaccattaaagattgacccatttgaagatctgtcatttaatctgcttgctgtatcaaaggctcagctatctgttcaaacgtcacctgttcccaccccagacccaaagaggttgattcagttgccttctgcaacgcaaagtaatgttttgagttctgtaagttgcatgccaacaatgcctccaattccagctcggagtcaatcccaggaaaatatgcgaagttctccaaacccatttattactggcttgaccaggacaaatcctttcagtgacaggactgctgctcctggaaacccatttagagccaagtctgaagaatcagaggcaacttcatggttctccaaagaagagcccgttactatcagtcctttcccttctctgcagcctcttggtcataacaaaagcagggcttcatcttcacttgatggctttaaggacagttttgatctacagggccagtctacattaaaaattagcaacccgaaaggatgggtaaccttcgaggaagaagaggattttggtgtgaaagggaagtcaaagtcagcttgttcagacttactgggtaatcagccaagttcattttctggctccaacctgacattgaatgatgactggaataaaggtacaaatgtctccttctgtgtgttgccgtcaagaagacctcctccacctcctgtccctctgctcccgcccggcaccagccctccagtagatcctttcacgaccttggcctctaaggcttcacccacactggactttacagaaagataacgccatgcaatagaaaacagtgggtacttgcttttggcaggatagagctaagagaattgggcattagtatttcattatgtgcaataagtcattgtaagtgcactgatatcttcacaaaacaccactatttgatgtgtacagagttggactatgtgtatattggaaataaggaaaaacccttctcattgttaactggagttttgatgtatttctctttggatgaataggagacagtagtagccataaaaagtacttatactttagaaaacagtccttattcagaaacttttcggtcagtcttctgaagaatctcaaaaagcccacccaactttcagctgacatttccaccagccctctcatacttgttaacaattggtatctttgagtatttaccaaagagctgccaaggttacagtgaacagagttttgaaaggcattgctttaaaggaaaaaagtataggtatgtgtacatatataatacatacaaacacatgtacttctgtatacatttacatatttttacaattcatactttaatttctaggctataactcagaccaaattatacctaaaagttccaacaaagtccctttttcaatatcacattaccaaaaagatggctgcaaatgtaatttggacctttcattaattttgttttcaaaactagaataatctcaccacagaatcagaattttctaccgttccacacccaaccccttcaaatacacacaaccttgttacttttcactccagcaccttcatacgcttttctccaggaggaggttcttgcagctggaaacagcctattttgtggtcactgtcaagtggatggatattctagcgctcccaaaaaagcactatggccttatatgcagggaaggcacataccaccaagttcaatgagaaatattagagctaaccgtactctcttctctgcgtacgttcgagtatacgttgcccatatccctcccatattttctttttgctgcttttgctctggaactttgcttttagcagggaaagcagctgtcccctgagtgctttgaattgggaatatacccagtgtgtgttctcccccctcttacgaggctacataacacatctatgatgctgctttaagtttttagaggctatacctcaaagtagctgcggattttgtctcctgcactgccaatatgcaactgatcccgcttttattaattttttgaagaagtacacagaatttttacagaatgtagtattttgatatcattaagtaaaccaatcagaaaactccttgagcaatagttgtttctttgtcagtttcagttacaatcatctttacccattaagacttacattaacattccttttatataaagagttgtatatgtccacctaaattcctatgtccacacttaacctttaaagatgtacattgagggaatatcaaaaaatagcgttcatggctacgaatatgtagaatgttaaaagcacagcaaactgcactgcacttataaagcaaatctattagaaaaaaagcatttttctaaatgctcaaatgttatcaaaatactatatttatagaagtaatcttctctgttaacagccaagatttgctgttagaaataactcttgtgagttttatattgtgctttttggaggttctaatcatttcagcagtagcgtcttaaacagcagtattactataagcagttgcttcaaaatgtgaattaacttgttgaaactgtggctttaacatccatgtgactagtgtatatggtatttgctctccattagcaaaataattcattgttaggtaaacttcactagtgcaaattgcagatctgtgagcaatgtttcctattgaatataaactactgtctaaaatatacatatcagcagcccagcctttatcaggaaaattatacttggcaagttgctgaaaatgcacaaagttatgaaagttaaaggtatgctgcaaataactagccattattctatgtattattaaatatttactagttctgttaaaagcagagcagaagttagacactaaggatctctttgtgaactctgtgttctctatattagattgctgtttatatgtaagaattttattgcttatgtggcatacaatatttataactataaactttatagaagtacagtattaaagtcagtggtacacagacattctgtacatatcctgtgaaacgtgctgtcatatgaaataaatatatctgtctttaccatg

SEQ ID NO: 60998 - protein, 707 aa, Artificial Sequence
  derived and/or modified sequence
MGEKNGDAKTFWMELEDDGKVDFIFEQVQNVLQSLKQKIKDGSATNKEYIQAMILVNEATIINSSTSIKDPMPVTQKEQENKSNAFPSTSCENSFPEDCTFLTTENKEILSLEDKVVDFREKDSSSNLSYQSHDCSGACLMKMPLNLKGENPLQLPIKCHFQRRHAKTNSHSSALHVSYKTPCGRSLRNVEEVFRYLLETECNFLFTDNFSFNTYVQLARNYPKQKEVVSDVDISNGVESVPISFCNEIDSRKLPQFKYRKTVWPRAYNLTNFSSMFTDSCDCSEGCIDITKCACLQLTARNAKTSPLSSDKITTGYKYKRLQRQIPTGIYECSLLCKCNRQLCQNRVVQHGPQVRLQVFKTEQKGWGVRCLDDIDRGTFVCIYSGRLLSRANTEKSYGIDENGRDENTMKNIFSKKRKLEVACSDCEVEVLPLGLETHPRTAKTEKCPPKFSNNPKELTVETKYDNISRIQYHSVIRDPESKTAIFQHNGKKMEFVSSESVTPEDNDGFKPPREHLNSKTKGAQKDSSSNHVDEFEDNLLIESDVIDITKYREETPPRSRCNQATTLDNQNIKKAIEVQIQKPQEGRSTACQRQQVFCDEELLSETKNTSSDSLTKFNKGNVFLLDATKEGNVGRFLNHSCCPNLLVQNVFVETHNRNFPLVAFFTNRYVKARTELTWDYGYEAGTVPEKEIFCQCGVNKCRKKIL

SEQ ID NO: 60999 - DNA, 2124 bp, Artificial Sequence
  derived and/or modified sequence
atgggggaaaaaaacggcgatgcaaagaccttttggatggaacttgaggacgacgggaaagtcgattttatttttgaacaggtgcagaacgttttgcagtctctcaaacagaaaataaaagacgggagcgccacaaacaaggagtatatacaggcaatgattctggtgaacgaagccaccataatcaattcttccacttcaatcaaggacccgatgccagtgacccagaaggaacaggaaaacaagtccaacgcttttccgtccacttcctgtgagaactcattcccagaggattgcacgtttctgacaacagaaaacaaggagatcctttctcttgaggataaggtagtggacttcagggaaaaggattcaagctctaacctgagttaccaaagccacgactgcagtggcgcctgcctgatgaagatgcccctgaacctcaagggcgaaaatccccttcagctccccattaaatgccactttcaacggagacacgcaaagactaactctcactcctccgccttacacgtgtcctacaaaacgccatgtgggaggtcactccggaatgttgaagaggtgttccggtatcttctggaaacagaatgcaactttttgttcaccgacaacttttcattcaacacctatgttcaattggccaggaactatccgaaacagaaagaggttgtctctgacgttgacattagcaatggcgtcgagagcgtgcctatctccttctgcaacgagatcgattccagaaagcttccccagttcaagtatcgcaagacagtgtggccaagagcctacaatttaacaaatttttcttcaatgtttaccgacagttgtgactgctctgaaggttgtatagatataacgaagtgcgcctgcctgcagctgactgcccggaatgctaaaacttcaccgttgtcgtccgacaagataacaactggatacaaatacaagcgcctccaaagacagatccccactggtatttatgagtgctcccttctatgtaagtgcaaccgccagctgtgtcagaacagagtggtccaacacggtccccaggtgcgacttcaggtcttcaaaactgagcagaaaggctggggcgtccgttgtttagacgatattgatcggggaaccttcgtgtgtatttactcaggtcggctgctctcgcgggccaacactgaaaagtcctatggaatcgatgagaacggcagggacgaaaacacgatgaaaaatatcttctcaaaaaagcgaaaactggaggtggcgtgttctgactgtgaagtggaggtgcttccgctcggcctggagactcacccacggaccgccaaaaccgaaaaatgcccccccaaatttagcaataaccctaaggagctgactgtggagacaaaatacgataacatctcccgaatccagtatcatagcgtgatccgcgaccccgagtctaagacagccattttccaacacaacggcaaaaagatggagtttgtgtcatctgaatcggtgacccctgaggataacgatgggttcaagcctcctagggaacatctgaattccaaaactaagggggctcagaaagacagctcatccaatcacgtagatgaattcgaagataacctcctgatcgagtccgatgtaatcgatatcacaaagtatcgggaggaaactccgccccgcagcagatgtaaccaggcaaccaccttggacaaccaaaatatcaagaaggccatagaggtgcaaatccagaaaccccaggagggtagatctacagcttgtcaacgccagcaggttttttgtgatgaggaactgctgagcgagactaaaaacacgagcagtgacagtctaaccaagttcaacaaaggtaacgtgttccttctcgacgcaactaaggaaggcaacgtcggcagattcctgaaccattcttgttgccccaacctgctggtccaaaacgtatttgtggaaacccacaaccgcaacttccccctcgtggccttttttacaaatagatatgtgaaggcacgcactgagttgacgtgggattacggctacgaggcagggacagtgcccgagaaggagatcttttgccagtgcggggtgaacaaatgtcgtaagaagattctttag

SEQ ID NO: 61000 - DNA, 2124 bp, Artificial Sequence
  derived and/or modified sequence
atgggagagaagaatggagatgccaagaccttctggatggagctggaggatgatggcaaggtggacttcatctttgagcaggtgcagaatgtgctgcagagcctgaagcagaagatcaaggatggcagcgccaccaacaaggagtacatccaggccatgatcctggtgaatgaggccaccatcatcaacagcagcaccagcatcaaggaccccatgcctgtgacccagaaggagcaggagaacaagagcaatgccttccccagcaccagctgtgagaacagcttccctgaggactgcaccttcctgaccacagagaacaaggagatcctgagcctggaggacaaggtggtggacttccgggagaaggacagcagcagcaacctgagctaccagagccatgactgcagcggggcctgcctgatgaagatgcccctgaacctgaagggggagaaccccctgcagctgcccatcaagtgccacttccagaggagacatgccaagaccaacagccacagcagcgccctgcacgtgtcctacaagaccccctgtggccgcagcctgagaaatgtggaggaggtgttccgctacctgctggagacagagtgcaacttcctgttcacagacaacttctccttcaacacctacgtgcagctggccaggaactaccccaagcagaaggaggtggtgtctgatgtggacatcagcaatggagtggagagcgtgcccatctccttctgcaatgaaattgacagcaggaagctgccccagttcaagtacaggaagacagtgtggccccgggcctacaacctgaccaacttcagctccatgttcacagacagctgtgactgcagcgagggctgcatcgacatcaccaagtgtgcctgcctgcagctgacagccagaaatgccaagaccagccccctgagcagtgacaagatcaccaccggctacaagtacaagaggctgcagaggcagatccccaccggcatctatgagtgcagcctgctgtgcaagtgcaaccggcagctgtgccagaacagagtggtgcagcacggcccccaggtgcggctgcaggtgttcaagacagagcagaagggctggggcgtgcgctgcctggatgacatcgaccggggcacctttgtgtgcatctacagcggccgcctgctgagccgggccaacacagagaagagctatggaattgatgaaaatggaagagatgagaacaccatgaagaacatcttcagcaagaagaggaagctggaggtggcctgcagcgactgtgaggtggaggtgctgcccctgggcctggagacccaccccaggacagccaagacagagaagtgcccccccaagttcagcaacaaccccaaggagctgactgtggagaccaagtatgacaacatcagccgcatccagtaccacagcgtcatccgggaccctgagagcaagacagccatcttccagcacaacgggaagaagatggagtttgtgtcctctgagagcgtgaccccagaagataatgatggcttcaagccaccccgggagcacctgaacagcaagaccaagggggcccagaaggacagcagcagcaaccacgtggatgaatttgaggacaacctgctgattgaaagtgatgtgattgacatcaccaagtaccgggaggagaccccacccaggagccgctgcaaccaggccaccaccctggacaaccagaacatcaagaaggccatcgaggtgcagatccagaagccccaggagggccgcagcacagcctgccagaggcagcaggtgttctgtgatgaggagctgctgtctgagaccaagaacaccagcagtgacagcctgaccaagttcaacaagggaaatgtgttcctgctggatgccaccaaggagggcaatgtgggccgcttcctgaaccacagctgctgccccaacctgctggtgcagaatgtgtttgtggagacccacaacagaaacttccccctggtggccttcttcaccaaccgctacgtgaaggccaggacagagctgacctgggactatggctatgaagctggcaccgtgcctgagaaggagatcttctgccagtgtggggtgaacaagtgcaggaagaagatcctgtag

SEQ ID NO: 61001 - DNA, 2124 bp, Artificial Sequence
  derived and/or modified sequence
atgggcgagaagaacggcgacgccaagaccttctggatggagctggaggatgatggcaaagtagacttcattttcgaacaggtgcagaatgtgttgcagtctctgaagcaaaagatcaaagacgggtctgctactaacaaggagtacattcaagctatgatcctcgtcaatgaagccaccataatcaactccagcacctccataaaggaccctatgccagtgacccaaaaggagcaagagaataaatcgaatgcatttcccagcacctcgtgtgaaaactccttccccgaggattgcacctttctgacgacagaaaataaggagatactcagcttagaggataaagtagtggatttccgcgagaaagactccagttcgaatctgagctatcagagccatgactgctctggtgcctgtcttatgaagatgccgctgaatttaaaaggcgaaaatcccctccagctgccaatcaaatgtcacttccagcgccgccacgccaagacaaactcacactcaagcgctctgcacgtgagctacaagaccccctgtggaaggtcactgagaaacgtagaggaggtgttccgatatctgctggagaccgagtgtaattttctttttaccgacaatttttctttcaatacctacgtccagttagcaagaaattatcctaagcagaaggaagtggtcagcgatgtcgatattagcaacggcgtggagagcgtcccaatttctttctgcaatgagatcgattcccggaagctacctcagtttaagtatcgcaagacggtttggccccgtgcttacaacctgacaaatttttcgagcatgttcacagattcatgcgattgttcagagggctgtatcgatattacgaagtgcgcttgtctgcaactgacagccagaaacgctaaaacctcccctctcagctcagataaaatcactacagggtacaaatacaagcgactgcaaaggcagatccccaccggcatttacgaatgttccctgctgtgtaaatgcaacagacagctctgccagaaccgagtagtccagcacggtccacaggtacggctacaggttttcaaaacggaacagaagggttggggagtgaggtgcttggacgatatagatcgcggtacgtttgtgtgcatttatagcggacggctcctatcccgtgctaacacggaaaagagctacgggatagatgagaacggtcgggacgagaacacgatgaagaatatatttagcaagaaacggaaactggaagtggcgtgctcagattgtgaggtcgaggtattgcctctgggcctggagacacatccaagaacggcgaaaacagagaagtgtccaccaaaattctccaacaaccctaaagaattaactgtggagacaaaatatgataatatctcaagaatccagtaccatagcgtcatccgggaccccgagtcaaaaacggccattttccaacataatggtaaaaagatggaatttgtgtcctccgaaagtgtgactcctgaggataatgatggcttcaaaccacctcgcgaacacctgaattctaagaccaaaggcgctcaaaaggactccagcagcaaccacgtggacgaatttgaagataatttactaattgagtcggatgttatcgatatcactaagtatcgtgaggagaccccacctagatcaaggtgcaatcaagctacaacgctggataatcagaatataaagaaggcgattgaggtacagatccagaagccacaggagggacggagtaccgcttgtcagaggcaacaagttttttgcgacgaggaactcctgtccgaaaccaagaacacatcctctgatagcctcacgaagtttaacaaggggaacgtgtttttactggatgcgacaaaggagggcaacgtcgggagatttcttaaccattcctgttgtccgaacttgctcgtgcagaatgtttttgtggaaactcataacagaaacttcccgttggtagcattttttaccaacagatacgtgaaggccaggaccgagctaacttgggactacggctatgaggcagggactgttccagagaaggaaattttctgtcagtgtggggtaaataagtgtcgtaaaaagatcctgtag

SEQ ID NO: 61002 - DNA, 2124 bp, Artificial Sequence
  derived and/or modified sequence
atgggagaaaaaaacggtgatgcaaaaactttttggatggagctggaagatgacgggaaggtggatttcatctttgagcaagtccagaatgtactgcaaagtctgaagcagaagattaaagacgggtccgctaccaataaggagtatatccaggccatgattttggtgaacgaagcaacaatcatcaactcatctactagtatcaaagacccaatgcccgtcactcagaaagaacaggagaataagagcaatgcttttccatctacttcctgtgagaattccttccctgaagattgtaccttccttacaactgaaaacaaagagatcctttctctcgaggataaggtagtcgatttccgcgagaaagactccagctcgaacctctcctaccagagtcacgattgctcgggcgcttgtttgatgaaaatgcctctcaatctgaaaggagagaatccactgcagctacctatcaagtgtcacttccaacgcaggcacgctaaaaccaactcgcacagctccgcactgcatgtgagctataagaccccgtgcggccgaagcctgagaaatgtcgaagaagtatttaggtacctgcttgaaacagaatgcaacttcttgtttacggataatttttcctttaatacctatgtgcaacttgcccgaaactatccgaagcagaaagaagttgtgagtgatgtcgatatctcaaatggagtggagagcgtgcctatctctttttgcaacgaaattgacagccggaagttgcctcaatttaaatatcggaaaactgtgtggcccagggcctacaatctgacaaatttcagctccatgttcacagatagctgcgactgttctgagggctgtatcgacatcaccaaatgtgcctgcctgcaactgaccgcgagaaatgccaagacaagcccactgtcttctgataaaatcaccacagggtataagtataaaaggctgcagagacagatccctaccggaatttatgaatgcagccttttgtgcaaatgtaatcgacagttgtgccagaatcgtgtcgtgcagcatgggccacaggtgcgtctacaggtttttaagacagagcagaagggctggggggttcgctgtctggacgacatagaccgcggtaccttcgtgtgcatatacagcggtcgactgctcagcagggcaaacactgagaaatcatacggaattgatgagaatggaagagatgagaacaccatgaagaacatcttttctaaaaagcggaaactcgaagtggcttgttcagactgtgaagtggaggtgctacccctcggccttgagacccacccacgaactgctaagaccgagaagtgtcccccaaaattcagcaacaatccaaaggagcttacagttgagaccaagtacgataatatcagccgtatacagtatcactccgtcattcgcgatccagagagtaaaacagccatttttcaacataacggaaagaagatggagtttgtctcttcagagtcggtcacacctgaggacaatgatggtttcaagcctccaagagaacacttgaatagcaagactaaaggtgctcagaaagactctagctcaaaccatgtcgatgaatttgaggacaatttgctgattgaaagtgacgtgattgacattaccaaataccgtgaggaaaccccgcctcggagtcgctgcaaccaggctacaaccctggataaccaaaacataaagaaggcaatcgaagtccagatacaaaaaccccaggagggcaggtccactgcctgccagcgacaacaggtcttctgcgacgaagaactgttaagcgagacaaaaaacaccagctcagactccttgaccaaattcaacaaaggcaacgtgttcttgctggatgctaccaaagaaggcaacgtagggcgtttcttgaatcatagctgctgcccaaacctgctggtgcagaacgttttcgtggagacccacaaccgtaacttccccctggtcgccttctttaccaatagatatgtgaaggctagaactgagctgacatgggactatggatatgaggccggtaccgttccagagaaggagattttctgccagtgtggcgtgaacaagtgccgtaagaagattttgtag

SEQ ID NO: 61003 - DNA, 6183 bp, Artificial Sequence
  derived and/or modified sequence
atccccggtagaggcagggcgggactgttgtggttgagatgaaggctagtaaatggtgaagtacttcccggccagagggcacctgcgctcgggaggtttgggcggcttggcgtcggaggagagccccacccgcggaggaacccagccttgccaacggagctggcggagctcactcctcaggtcaggcgggcggcgtagaaaacgcagcggagccaggtgaaaccaaggcaccgccgtggctggcccccgacagttcctctagccgggaggttggaggagctgaaaacgccgcggagccctcggccgcccgagcaggggctggaccccagcccttgcagcctcccttctcctggcacccaagtgcagtcctggctgcagaaggggccgcgggcgcactgagtttccaacctccatttcagcctgtctgtctcagggtgcagccttaatgagaggtgattcctaagctgctgggaacctgaggttgtcaaaggggcggcaggaaatggacagcagtataaaacccagaagcagaacttgaaggttaaaccactagcccatttcacagaatgtttcatccatttgtggaccaaaagatggagttggtttttatttttaaaaagataatgttaatgatctgataccactacaaatatttacgtgagaagattcatggacttgtcttttggttggactgtcactcatttctgaaagtttcttcagccacaatttctatttgaaaattcaagtatcaaaggataccaggtttagaatggtataatgatgtattttgtctgaggactgcaaattttatagagaccacagttggattccagtgatattctgcaatcaaagtgatttgataaacctaattttgaagcattttatatttataagcgacatcaaaagatgggagaaaaaaatggcgatgcaaaaactttctggatggagctagaagatgatggaaaagtggacttcatttttgaacaagtacaaaatgtgctgcagtcactgaaacaaaagatcaaagatgggtctgccaccaataaagaatacatccaagcaatgattctagtgaatgaagcaactataattaacagttcaacatcaataaaggatcctatgcctgtgactcagaaggaacaggaaaacaaatccaatgcatttccctctacatcatgtgaaaactcctttccagaagactgtacatttctaacaacagaaaataaggaaattctctctcttgaagataaagttgtagactttagagaaaaagactcatcttcgaatttatcttaccaaagtcatgactgctctggtgcttgtctgatgaaaatgccactgaacttgaagggagaaaaccctctgcagctgccaatcaaatgtcacttccaaagacgacatgcaaagacaaactctcattcttcagcactccacgtgagttataaaaccccttgtggaaggagtctacgaaacgtggaggaagtttttcgttacctgcttgagacagagtgtaactttttatttacagataacttttctttcaatacctatgttcagttggctcggaattacccaaagcaaaaagaagttgtttctgatgtggatattagcaatggagtggaatcagtgcccatttctttctgtaatgaaattgacagtagaaagctcccacagtttaagtacagaaagactgtgtggcctcgagcatataatctaaccaacttttccagcatgtttactgattcctgtgactgctctgagggctgcatagacataacaaaatgtgcatgtcttcaactgacagcaaggaatgccaaaacttcccccttgtcaagtgacaaaataaccactggatataaatataaaagactacagagacagattcctactggcatttatgaatgcagccttttgtgcaaatgtaatcgacaattgtgtcaaaaccgagttgtccaacatggtcctcaagtgaggttacaggtgttcaaaactgagcagaagggatggggtgtacgctgtctagatgacattgacagagggacatttgtttgcatttattcaggaagattactaagcagagctaacactgaaaaatcttatggtattgatgaaaacgggagagatgagaatactatgaaaaatatattttcaaaaaagaggaaattagaagttgcatgttcagattgtgaagttgaagttctcccattaggattggaaacacatcctagaactgctaaaactgagaaatgtccaccaaagttcagtaataatcccaaggagcttactgtggaaacgaaatatgataatatttcaagaattcaatatcattcagttattagagatcctgaatccaagacagccatttttcaacacaatgggaaaaaaatggaatttgtttcctcggagtctgtcactccagaagataatgatggatttaaaccaccccgagagcatctgaactctaaaaccaagggagcacaaaaggactcaagttcaaaccatgttgatgagtttgaagataatctgctgattgaatcagatgtgatagatataactaaatatagagaagaaactccaccaaggagcagatgtaaccaggcgaccacattggataatcagaatattaaaaaggcaattgaggttcaaattcagaaaccccaagagggacgatctacagcatgtcaaagacagcaggtattttgtgatgaagagttgctaagtgaaaccaagaatacttcatctgattctctaacaaagttcaataaagggaatgtgtttttattggatgccacaaaagaaggaaatgtcggccgcttccttaatcatagttgttgcccaaatctcttggtacagaatgtttttgtagaaacacacaacaggaattttccattggtggcattcttcaccaacaggtatgtgaaagcaagaacagagctaacatgggattatggctatgaagctgggactgtgcctgagaaggaaatcttctgccaatgtggggttaataaatgtagaaaaaaaatattataaatatgtaactaacgcctgtttgtgaaattagcttatcaggctgaaattaaagccatgcaaaagaaggtctaggtccatcaaggaaattcccctccgttttcctttgtcatggggtttatgttttatttcagattttatttgtgtgacttagaaattccaggaacacaattaggatattttcatacacatagggtatcttgttcactgctgtgctactttacatgagtaggatggaagtgtatattttatatgaaataccactgtacaatttataatttatttacaaattatatattaagagaaacaaatgtcataacagaactcagctgtttctaattgcttttgtgactgttaccttttagttcatgcccccccaaagagctaaatttcacatttttacctacaaaattgatttttaattcctggcaaataatttaccattatgagctacaaggtgggcaacagcgcctgaggatctaattttatgcatattactcccaagtattttaacacttgttggagaagcaatatctggatcgataaaacactgtcccatcaaccatttgagtggggagagggagaagctcttctgtaagtaagattctggcaagctctttgaaatgagtcttctttcccacagattttctctactctttctatacaaacagataggagaagagggaatagaaacctggaggaacttgaatatttttgttctagatagagatacagttactgaaaaggaaacctagaaagtagtcacacgttgcttatttaggccagaagtaattgtactgggcaaaaatttcacttaaaaaacacaagaagtccaggtatggtggctcagacctgtaatcccagcactttgagaggccgaggcaggtggattacttgagcctaggggttcaagaccagcttgggcaacatgtcaaaaccctgtctctacaaaaaatacaaaaattagcctggcatgatggcatgtgcccgtagtctcagctactcaggagtgaggtgggaggatcatttgagctcagaaggtcaaggctgcaatgagacataatttcaccatagtacttccagcctgggcaatagagcaagactctctctcaaaaaaaacagcacacacacacacacacgaaaacaattctgaactatgaaatctgaaacagccccttggtatctcctgggcatgatttgcaaatcttttttttttacagaaaaaaggcaaagagtaagcactttgccataggttacttggccgtgatcatctatctagtggaaaaggggactgggaagcccaagcagactgggaaaccagacagctaggaaaaggagcaaaacatagcccagcaacctacagatgaagaaagttgagaaatccatttattcaccatagagacgcaggaatttcaggcaatgcactaaaatgaaatgggggaaaaaagcttgatcagtatgggaaccatttttgtgcaaaagggaatattatggatcagccagtatttctttgagctctgcctgtggagtccatttgacctttagaaatatgaggtattctgtcagttttatcttcttggagaaatttctcctaaaatcttgatttgctttagtctggactggttcatagccatcatcttccatcagtaccccagagattcactttgtctcttatgtgggatctgtttccagttagatgccattattttccttttccttggtttactcttccacatattggtaaagctcttccaatagcttttggaaaggaaaaatgaaaagtaaatgttttgaatctctgtgtgtttgacaatgtctttattttacccttatacctgattgctgttttggttggcaaggtataggattctttagtggtctccatgcccagttttgaagacatctgctagctttcagtgctgttgctgtggagtctgaaaatctgtcttctggcttccagggtgactactggaaattgaatgccattctgttccttctcttttgcatatataatccatttttatctctcttgaagcttataggtttatctttgtctcaatgttctgtccctgttaagagtccattttcatcctttgtactaggtgcctggtgggatcattccgtctgaaactaatgatttcccatctcttcactgtttctggaattcctgttttccagatgttagacctccagaatttgatctctaattttcctatcttttctcttaactttcagctctgtcttcttgctaggaccttttcctaggagcatttctcaatttaatcttccagttcatctgttgcattttatttttctagtctcatattgtctcatatttttaatttctaagagctccccttctccgaatattctttttttttaatagcatcctattttggctcatggttgcagtattttatctccttgaagatgtttgtgtgtttatgtatgtatatgcacacacgtatacatacacatacaggcatgcatctctgtattctttcggcataatctgtgtcctccagggtttgtttctttgtttcccctgtatgtttgttttggtcgttcacattataggctttcctcagagttaatggtcttggtagtctactcatatttaagtgtggaacaccaaaaagcttactataagctgagagtgtggtaaagggctctttgttttactatgacctacctgagctatcttgctggggaacaccctaatgtcagtctctttataaagggcctttcattttggcctggcaagaaatactctttcatcctcctgcatggagggcaaaaaaaaatttaaaaattggctgctagggtctgtctgctcacttccctgttttgcagaccccacactcttctgcaattcatttcatagttgtcaagactatacaaattgtcctttttaatgttctctcttctgctatccctagttggcagtcttcctctttacaacctgctgaaagtggaagacctccagttttcctttaattcctcagcaaaccaccaactattatatgtcttttttccagaacaacttattttttaactataattatatgcatttatgttagattcactgaaaacctcatcttgtatggtgctctgtaccctatgggtgctaaataaaggcttgctactggcaactgg

SEQ ID NO: 61004 - DNA, 2124 bp, Artificial Sequence
  derived and/or modified sequence
atgggcgagaagaacggcgacgccaagaccttctggatggagctggaggacgacggcaaggtggacttcatcttcgagcaggtgcagaacgtgctgcagagcctgaagcagaagatcaaggacggcagcgccaccaacaaggagtacatccaggccatgatcctggtgaacgaggccaccatcatcaacagcagcaccagcatcaaggaccccatgcccgtgacccagaaggagcaggagaacaagagcaacgccttccccagcaccagctgcgagaacagcttccccgaggactgcaccttcctgaccaccgagaacaaggagatcctgagcctggaggacaaggtggtggacttcagagagaaggacagcagcagcaacctgagctaccagagccacgactgcagcggcgcctgcctgatgaagatgcccctgaacctgaagggcgagaaccccctgcagctgcccatcaagtgccacttccagagaagacacgccaagaccaacagccacagcagcgccctgcacgtgagctacaagaccccctgcggcagaagcctgagaaacgtggaggaggtgttcagatacctgctggagaccgagtgcaacttcctgttcaccgacaacttcagcttcaacacctacgtgcagctggccagaaactaccccaagcagaaggaggtggtgagcgacgtggacatcagcaacggcgtggagagcgtgcccatcagcttctgcaacgagatcgacagcagaaagctgccccagttcaagtacagaaagaccgtgtggcccagagcctacaacctgaccaacttcagcagcatgttcaccgacagctgcgactgcagcgagggctgcatcgacatcaccaagtgcgcctgcctgcagctgaccgccagaaacgccaagaccagccccctgagcagcgacaagatcaccaccggctacaagtacaagagactgcagagacagatccccaccggcatctacgagtgcagcctgctgtgcaagtgcaacagacagctgtgccagaacagagtggtgcagcacggcccccaggtgagactgcaggtgttcaagaccgagcagaagggctggggcgtgagatgcctggacgacatcgacagaggcaccttcgtgtgcatctacagcggcagactgctgagcagagccaacaccgagaagagctacggcatcgacgagaacggcagagacgagaacaccatgaagaacatcttcagcaagaagagaaagctggaggtggcctgcagcgactgcgaggtggaggtgctgcccctgggcctggagacccaccccagaaccgccaagaccgagaagtgcccccccaagttcagcaacaaccccaaggagctgaccgtggagaccaagtacgacaacatcagcagaatccagtaccacagcgtgatcagagaccccgagagcaagaccgccatcttccagcacaacggcaagaagatggagttcgtgagcagcgagagcgtgacccccgaggacaacgacggcttcaagccccccagagagcacctgaacagcaagaccaagggcgcccagaaggacagcagcagcaaccacgtggacgagttcgaggacaacctgctgatcgagagcgacgtgatcgacatcaccaagtacagagaggagaccccccccagaagcagatgcaaccaggccaccaccctggacaaccagaacatcaagaaggccatcgaggtgcagatccagaagccccaggagggcagaagcaccgcctgccagagacagcaggtgttctgcgacgaggagctgctgagcgagaccaagaacaccagcagcgacagcctgaccaagttcaacaagggcaacgtgttcctgctggacgccaccaaggagggcaacgtgggcagattcctgaaccacagctgctgccccaacctgctggtgcagaacgtgttcgtggagacccacaacagaaacttccccctggtggccttcttcaccaacagatacgtgaaggccagaaccgagctgacctgggactacggctacgaggccggcaccgtgcccgagaaggagatcttctgccagtgcggcgtgaacaagtgcagaaagaagatcctgtag

SEQ ID NO: 61005 - protein, 1148 aa, Artificial Sequence
  derived and/or modified sequence
MSVPDYMQCAEDHQTLLVVVQPVGIVSEENFFRIYKRICSVSQISVRDSQRVLYIRYRHHYPPENNEWGDFQTHRKVVGLITITDCFSAKDWPQTFEKFHVQKEIYGSTLYDSRLFVFGLQGEIVEQPRTDVAFYPNYEDCQTVEKRIEDFIESLFIVLESKRLDRATDKSGDKIPLLCVPFEKKDFVGLDTDSRHYKKRCQGRMRKHVGDLCLQAGMLQDSLVHYHMSVELLRSVNDFLWLGAALEGLCSASVIYHYPGGTGGKSGARRFQGSTLPAEAANRHRPGAQEVLIDPGALTTNGINPDTSTEIGRAKNCLSPEDIIDKYKEAISYYSKYKNAGVIELEACIKAVRVLAIQKRSMEASEFLQNAVYINLRQLSEEEKIQRYSILSELYELIGFHRKSAFFKRVAAMQCVAPSIAEPGWRACYKLLLETLPGYSLSLDPKDFSRGTHRGWAAVQMRLLHELVYASRRMGNPALSVRHLSFLLQTMLDFLSDQEKKDVAQSLENYTSKCPGTMEPIALPGGLTLPPVPFTKLPIVRHVKLLNLPASLRPHKMKSLLGQNVSTKSPFIYSPIIAHNRGEERNKKIDFQWVQGDVCEVQLMVYNPMPFELRVENMGLLTSGVEFESLPAALSLPAESGLYPVTLVGVPQTTGTITVNGYHTTVFGVFSDCLLDNLPGIKTSGSTVEVIPALPRLQISTSLPRSAHSLQPSSGDEISTNVSVQLYNGESQQLIIKLENIGMEPLEKLEVTSKVLTTKEKLYGDFLSWKLEETLAQFPLQPGKVATFTINIKVKLDFSCQENLLQDLSDDGISVSGFPLSSPFRQVVRPRVEGKPVNPPESNKAGDYSHVKTLEAVLNFKYSGGPGHTEGYYRNLSLGLHVEVEPSVFFTRVSTLPATSTRQCHLLLDVFNSTEHELTVSTRSSEALILHAGECQRMAIQVDKFNFESFPESPGEKGQFANPKQLEEERREARGLEIHSKLGICWRIPSLKRSGEASVEGLLNQLVLEHLQLAPLQWDVLVDGQPCDREAVAACQVGDPVRLEVRLTNRSPRSVGPFALTVVPFQDHQNGVHNYDLHDTVSFVGSSTFYLDAVQPSGQSACLGALLFLYTGDFFLHIRFHEDSTSKELPPSWFCLPSVHVCALEAQA

SEQ ID NO: 61006 - DNA, 3447 bp, Artificial Sequence
  derived and/or modified sequence
atgagcgtgcccgactacatgcagtgcgccgaggaccaccagaccctgctggtggtggtgcagcccgtgggcatcgtgagcgaggagaacttcttcagaatctacaagagaatctgcagcgtgagccagatcagcgtgagagacagccagagagtgctgtacatcagatacagacaccactacccccccgagaacaacgagtggggcgacttccagacccacagaaaggtggtgggcctgatcaccatcaccgactgcttcagcgccaaggactggccccagaccttcgagaagttccacgtgcagaaggagatctacggcagcaccctgtacgacagcagactgttcgtgttcggcctgcagggcgagatcgtggagcagcccagaaccgacgtggccttctaccccaactacgaggactgccagaccgtggagaagagaatcgaggacttcatcgagagcctgttcatcgtgctggagagcaagagactggacagagccaccgacaagagcggcgacaagatccccctgctgtgcgtgcccttcgagaagaaggacttcgtgggcctggacaccgacagcagacactacaagaagagatgccagggcagaatgagaaagcacgtgggcgacctgtgcctgcaggccggcatgctgcaggacagcctggtgcactaccacatgagcgtggagctgctgagaagcgtgaacgacttcctgtggctgggcgccgccctggagggcctgtgcagcgccagcgtgatctaccactaccccggcggcaccggcggcaagagcggcgccagaagattccagggcagcaccctgcccgccgaggccgccaacagacacagacccggcgcccaggaggtgctgatcgaccccggcgccctgaccaccaacggcatcaaccccgacaccagcaccgagatcggcagagccaagaactgcctgagccccgaggacatcatcgacaagtacaaggaggccatcagctactacagcaagtacaagaacgccggcgtgatcgagctggaggcctgcatcaaggccgtgagagtgctggccatccagaagagaagcatggaggccagcgagttcctgcagaacgccgtgtacatcaacctgagacagctgagcgaggaggagaagatccagagatacagcatcctgagcgagctgtacgagctgatcggcttccacagaaagagcgccttcttcaagagagtggccgccatgcagtgcgtggcccccagcatcgccgagcccggctggagagcctgctacaagctgctgctggagaccctgcccggctacagcctgagcctggaccccaaggacttcagcagaggcacccacagaggctgggccgccgtgcagatgagactgctgcacgagctggtgtacgccagcagaagaatgggcaaccccgccctgagcgtgagacacctgagcttcctgctgcagaccatgctggacttcctgagcgaccaggagaagaaggacgtggcccagagcctggagaactacaccagcaagtgccccggcaccatggagcccatcgccctgcccggcggcctgaccctgccccccgtgcccttcaccaagctgcccatcgtgagacacgtgaagctgctgaacctgcccgccagcctgagaccccacaagatgaagagcctgctgggccagaacgtgagcaccaagagccccttcatctacagccccatcatcgcccacaacagaggcgaggagagaaacaagaagatcgacttccagtgggtgcagggcgacgtgtgcgaggtgcagctgatggtgtacaaccccatgcccttcgagctgagagtggagaacatgggcctgctgaccagcggcgtggagttcgagagcctgcccgccgccctgagcctgcccgccgagagcggcctgtaccccgtgaccctggtgggcgtgccccagaccaccggcaccatcaccgtgaacggctaccacaccaccgtgttcggcgtgttcagcgactgcctgctggacaacctgcccggcatcaagaccagcggcagcaccgtggaggtgatccccgccctgcccagactgcagatcagcaccagcctgcccagaagcgcccacagcctgcagcccagcagcggcgacgagatcagcaccaacgtgagcgtgcagctgtacaacggcgagagccagcagctgatcatcaagctggagaacatcggcatggagcccctggagaagctggaggtgaccagcaaggtgctgaccaccaaggagaagctgtacggcgacttcctgagctggaagctggaggagaccctggcccagttccccctgcagcccggcaaggtggccaccttcaccatcaacatcaaggtgaagctggacttcagctgccaggagaacctgctgcaggacctgagcgacgacggcatcagcgtgagcggcttccccctgagcagccccttcagacaggtggtgagacccagagtggagggcaagcccgtgaacccccccgagagcaacaaggccggcgactacagccacgtgaagaccctggaggccgtgctgaacttcaagtacagcggcggccccggccacaccgagggctactacagaaacctgagcctgggcctgcacgtggaggtggagcccagcgtgttcttcaccagagtgagcaccctgcccgccaccagcaccagacagtgccacctgctgctggacgtgttcaacagcaccgagcacgagctgaccgtgagcaccagaagcagcgaggccctgatcctgcacgccggcgagtgccagagaatggccatccaggtggacaagttcaacttcgagagcttccccgagagccccggcgagaagggccagttcgccaaccccaagcagctggaggaggagagaagagaggccagaggcctggagatccacagcaagctgggcatctgctggagaatccccagcctgaagagaagcggcgaggccagcgtggagggcctgctgaaccagctggtgctggagcacctgcagctggcccccctgcagtgggacgtgctggtggacggccagccctgcgacagagaggccgtggccgcctgccaggtgggcgaccccgtgagactggaggtgagactgaccaacagaagccccagaagcgtgggccccttcgccctgaccgtggtgcccttccaggaccaccagaacggcgtgcacaactacgacctgcacgacaccgtgagcttcgtgggcagcagcaccttctacctggacgccgtgcagcccagcggccagagcgcctgcctgggcgccctgctgttcctgtacaccggcgacttcttcctgcacatcagattccacgaggacagcaccagcaaggagctgccccccagctggttctgcctgcccagcgtgcacgtgtgcgccctggaggcccaggcctag

SEQ ID NO: 61007 - DNA, 3447 bp, Artificial Sequence
  derived and/or modified sequence
atgtccgttcccgactatatgcaatgtgccgaagaccaccagactttactggtggtggtgcaacccgtggggatcgtctcagaggagaatttttttcgcatctacaaacgcatctgctctgtgtcccaaatctctgtgcgcgactcacagagggtcttatacattagatataggcaccattaccctcctgagaacaacgagtggggcgacttccaaacacataggaaggtggttggcctgattacgattactgactgcttcagtgctaaggattggccacagacttttgagaagtttcatgtgcagaaggaaatttacggatcgacactatacgatagccgcctgttcgtgttcggcttgcagggcgaaatcgtggagcagcccagaacagatgtggcgttttaccccaactacgaggattgccagacggtcgagaagagaatcgaagacttcatcgaatctcttttcatagtcctggagtccaaacggttggaccgtgccactgataagagcggtgacaaaatcccacttctttgtgtgccattcgaaaaaaaagacttcgtgggactcgatacggactctcggcattacaagaagagatgccaggggcgcatgcggaagcatgtcggcgatctgtgccttcaggcaggtatgctccaagattctttagttcattatcacatgtccgtcgaactactccgatccgtcaacgacttcttgtggctcggtgctgcgcttgaaggcttgtgttccgcttctgtcatctatcactaccctgggggaaccgggggtaagagcggggctcgaagattccagggctcgacgctcccagcagaggctgcaaaccgccaccgcccaggggctcaggaagtgctgatcgaccccggagcactgaccaccaacggaattaaccctgatacgtcaaccgaaattggcagggccaagaactgcctcagcccggaagatataattgacaagtacaaggaggccatttcctattattccaagtacaagaacgccggggtgattgagctggaggcctgcataaaggccgtaagggtacttgcaatccaaaaacgtagtatggaggccagcgagttcctgcagaatgctgtctacataaacttgcggcaactgtcagaggaagaaaaaatccagcgctatagtattctgagcgagctttacgagctcatcggcttccaccgaaagtcagcattcttcaaaagagtagccgcgatgcaatgtgtggctccttccatcgcagaacctgggtggcgggcatgctacaagctgctgcttgagactctacctggatattctctgtcacttgaccctaaagatttctctcgaggtacgcatcgaggctgggcagcggtgcagatgcgattgcttcatgagctggtttatgcatctcggaggatgggcaaccctgctttaagtgtgcggcacctgagtttcctcctacaaaccatgctcgactttctctccgatcaagaaaaaaaagacgtggcccagtctttggaaaattatacatcgaaatgtcccgggactatggaacctatcgcactgcctggagggctgacgctaccccccgttccatttactaagctaccaattgtgaggcacgtgaaattgttaaacttgcccgcatctctcagaccccataaaatgaagtctctgttgggacaaaacgtctcaactaaatcaccttttatttactctccgatcatcgcccataacaggggtgaagagcgtaataaaaagatcgattttcagtgggttcaaggcgatgtctgtgaagtgcaactgatggtttataaccccatgccctttgagctcagggtagagaatatgggactcctcacctccggtgtggagttcgaatctctgccagcggcactgtcattgccggcagagtcaggcctttaccctgtgactctggtgggagtgccccagacaactggtacaattacagtcaacggataccatactacagtctttggggtgttttccgattgcctactggacaatttgcccggcattaagacctctgggagcacagttgaggtgattccagccctccctcgactgcagatctctaccagtctgcctcgctctgcccactcccttcagccctcctccggtgacgagatttccaccaacgtctcagttcagctctataacggggaatcgcaacagttgatcatcaagctggagaatattggcatggagcccttagaaaaactggaagtcacgagcaaagttctcacaacgaaggaaaagctgtacggggactttctgtcttggaaacttgaagagaccctggctcagtttccattgcagcccggaaaggttgccacctttacaattaacattaaagtcaagttggacttctcctgtcaagaaaatctgttgcaagacctcagcgatgatggcatttcagtgagcggttttcctctgagctctccgtttcgtcaggtggtcaggccacgagtggaagggaagcccgttaaccctcccgagagcaataaggctggtgactattctcacgtgaaaacactggaagcagttctaaattttaagtatagtggggggccaggccatactgaaggatactatcgtaatctgagtttaggcttacacgtggaggtggagccatccgtgttctttacacgggtgagcacattgccagcaacttcaacgcgccagtgccacctgctgcttgatgtgtttaactcgactgagcatgaactcaccgtgtcaacgcgttcatcggaggccttgatcctgcacgccggggaatgccagaggatggccatccaggtagacaaatttaatttcgaaagttttcctgaatcccccggcgaaaaagggcaatttgcaaacccgaaacagttggaggaggagcgccgagaagcaagagggcttgaaattcactcaaagctaggaatatgctggcggattccttcactgaaaagatccggagaggcgtccgtagaagggctgctgaaccagctggtgctcgagcatctgcagttagcgccactgcagtgggacgtactggtggacggccagccctgcgacagagaagcagtcgctgcatgccaggtgggggaccctgtccggcttgaagtaaggttgacaaaccgcagcccccgcagtgtggggccatttgcacttactgtagtgcccttccaggatcaccagaatggtgtccataattatgaccttcatgacactgtcagcttcgtgggctcgagtactttttacctcgacgctgtccagccgtcaggacaatcggcctgtctgggggctctactgttcctgtataccggggacttctttctgcatatccgtttccacgaagattctacctccaaggaactcccccccagctggttctgcctgccttcagtgcatgtgtgcgctttagaagcccaggcatag

SEQ ID NO: 61008 - DNA, 3447 bp, Artificial Sequence
  derived and/or modified sequence
atgtctgtgcctgactacatgcagtgtgccgaggaccaccagaccctgctggtggtggtgcagcctgtgggcatcgtgtctgaggagaacttcttccgcatctacaagaggatctgcagcgtgtcccagatctctgtgcgggacagccagagggtgctgtacatccgctaccgccaccactacccacctgagaacaatgagtggggagacttccagacccacaggaaggtggtgggcctcatcaccatcacagactgcttcagcgccaaggactggccccagacctttgagaagttccacgtgcagaaggagatctacggcagcaccctgtatgacagccggctgtttgtgtttggcctgcagggcgagatcgtggagcagcccaggacagatgtggccttctaccccaactatgaggactgccagacagtggagaagagaattgaggacttcatcgagagcctcttcatcgtgctggagagcaagaggctggaccgggccacagacaagagcggggacaagatccccctgctgtgtgtgccctttgagaagaaggactttgtgggcctggacacagacagccgccactacaagaagcgctgccagggccgcatgaggaagcacgtgggggacctgtgcctgcaggccggcatgctgcaggacagcctggtgcactaccacatgtctgtggagctgctgcggtctgtgaatgacttcctgtggctgggcgccgccctggagggcctgtgcagcgccagcgtcatctaccactacccaggcggcaccggcggcaagagcggggcccggcgcttccagggcagcaccctgcctgctgaggccgccaacagacacaggcctggggcccaggaggtgctgattgatcctggggccctgaccaccaacggcatcaacccagacaccagcacagaaattggccgggccaagaactgcctgagccctgaggacatcatcgacaagtacaaggaggccatctcctactacagcaagtacaagaatgctggggtgattgagctggaggcctgcatcaaggctgtgcgggtgctggccatccagaagaggtccatggaggccagcgagttcctgcagaatgctgtgtacatcaacctgcggcagctgtctgaggaggagaagatccagcgctacagcatcctgtctgagctgtatgagctgattggcttccacaggaagagcgccttcttcaagagggtggccgccatgcagtgtgtggcccccagcattgctgagcccggctggagggcctgctacaagctgctgctggagaccctgcccggctacagcctgagcctggaccccaaggacttcagccggggcacccaccggggctgggccgctgtgcagatgaggctgctgcacgagctggtgtatgccagcaggaggatgggcaacccagccctgtctgtgcgccacctgtccttcctgctgcagaccatgctggacttcctgagtgaccaggagaagaaggatgtggcccagagcctggagaactacaccagcaaatgtcctggcaccatggagcccatcgccctgcccggcggcctgaccctgccccctgtgcccttcaccaagctgcccatcgtgcgccacgtgaagctgctgaacctgcctgccagcctgcggccccacaagatgaagagcctgctgggccagaatgtgtccaccaagagccccttcatctacagccccatcatcgcccacaacagaggagaggagaggaacaagaagattgacttccagtgggtgcagggagatgtgtgtgaggtgcagctgatggtgtacaaccccatgccctttgagctgcgggtggagaacatgggcctgctgaccagcggcgtggagtttgagagcctgcctgctgccctgagcctgcctgctgagagcggcctgtaccctgtgaccctggtgggcgtgccccagaccaccggcaccatcaccgtgaatggctaccacaccaccgtgtttggagtcttcagtgactgcctgctggacaacctgcccggcatcaagaccagcggcagcacagtggaggtgatcccagccctgccccggctgcagatcagcaccagcctgcccaggtctgcccacagcctgcagcccagcagtggagatgagatcagcaccaacgtgtctgtgcagctgtacaacggggagagccagcagctgatcatcaagctggagaacatcggcatggagcccctggagaagctggaggtgaccagcaaggtgctgaccaccaaggagaagctgtatggagacttcctgtcctggaagctggaggagaccctggcccagttccccctgcagcccgggaaggtggccaccttcaccatcaacatcaaggtgaagctggacttcagctgccaggagaacctgctgcaggacctgagtgatgatggcatctctgtgtctggcttccccctgagcagccccttccggcaggtggtgcggccccgggtggagggcaagcctgtgaaccccccagagagcaacaaggccggggactacagccacgtgaagaccctggaggccgtgctgaacttcaagtacagcggcggccctggccacacagagggctactacagaaacctgagcctgggcctgcacgtggaggtggagcccagcgtcttcttcaccagggtgtccaccctgcctgccaccagcacccggcagtgccacctgctgctggatgtgttcaacagcacagagcacgagctgactgtgtccaccaggagcagcgaggccctgatcctgcacgccggggagtgccagaggatggccatccaggtggacaagttcaactttgagagcttccctgagagccctggagagaagggccagtttgccaaccccaagcagctggaggaggagcggcgggaggcccggggcctggagatccacagcaagctgggcatctgctggaggatccccagcctgaagaggtctggagaggcctctgtggagggcctgctgaaccagctggtgctggagcacctgcagctggcccccctgcagtgggatgtgctggtggatggccagccctgtgaccgggaggccgtggccgcctgccaggtgggggaccctgtgcggctggaggtgcggctgaccaacagaagccccaggtctgtgggcccctttgccctgactgtggtgcccttccaggaccaccagaatggagtgcacaactatgacctgcatgacacagtgtcctttgtgggcagcagcaccttctacctggatgctgtgcagcccagcggccagagcgcctgcctgggcgccctgctcttcctgtacacaggagacttcttcctgcacatccgcttccacgaggacagcaccagcaaggagctgccccccagctggttctgcctgcccagcgtgcacgtgtgtgccctggaggcccaggcctag

SEQ ID NO: 61009 - DNA, 3447 bp, Artificial Sequence
  derived and/or modified sequence
atgagcgtgcccgactacatgcagtgcgccgaggaccaccagaccctgctagtagtcgtccagccagtcgggatcgtgtccgaggaaaacttcttccgtatctacaagagaatctgcagcgttagccagatttccgtgagggactcccagcgtgtactgtacatccgctatcgccaccattatccacccgagaacaacgaatggggagatttccagactcaccggaaggtggtcgggctgatcactattacagactgcttttcagccaaagactggcctcaaaccttcgaaaagtttcacgtccagaaagagatttacggaagtactctgtacgatagccgattgttcgtgtttgggttgcaaggagaaattgttgaacagccacgtacagacgtggctttttaccccaattatgaggattgtcagactgtcgaaaaaagaattgaagatttcatagagtctttattcatcgtgctggagtctaaaagactggaccgcgcaaccgataaaagcggcgacaagatcccactgctgtgtgtacccttcgaaaagaaggacttcgttggccttgacactgacagcaggcactacaagaagagatgtcaaggcagaatgcgcaagcacgtcggagatctgtgtctccaggccggtatgttgcaggatagcctagtccattaccacatgtccgttgagcttctgcggtcagtgaatgacttcttgtggctgggggcagctctcgaggggctttgtagcgcttccgtgatctatcactatcccggcggtacaggcgggaagtcgggcgcgagacgtttccaagggagcactttaccagctgaggccgctaaccgccaccggccaggggcacaagaagtacttattgaccccggcgctcttaccaccaatggtattaatccagacacctctactgagatagggcgagcaaaaaactgtctgagtcccgaagatataattgacaaatacaaagaggccatctcctactatagcaaatataaaaacgctggggtgatcgagctagaggcatgcatcaaagcagttagggtgctcgccatacaaaagcgaagcatggaggccagcgaatttctgcaaaatgctgtctacattaatttacgccagctctcagaagaagagaaaatccaacgctactccatccttagcgagttatacgaactcattggcttccatcgcaagtctgcattctttaagcgcgtcgctgcaatgcagtgcgtggctccaagcattgcagagccaggctggcgggcatgctacaagcttctgctcgagaccctgcccgggtactctcttagccttgacccaaaggacttctctcgtggtactcaccgggggtgggcagcagtgcagatgcggctcctccatgaactggtgtatgcctccagacgaatggggaatccagcccttagtgtaaggcacttgagcttcctgctccagacgatgctcgacttccttagtgaccaggagaagaaggatgttgcacagtctctggagaactatactagcaaatgtccaggcacaatggagcctatcgcacttcctggcggcctgacactgcctccagtgccgttcacgaagctcccaatcgtgagacacgtgaaactcctaaacctacctgcttcgctgaggcctcacaaaatgaaaagtcttctgggacagaacgtttccactaaatctccattcatctattcacccataattgcccacaaccggggagaagaacgcaacaagaagattgactttcagtgggtccagggggacgtgtgtgaggtgcagctgatggtctataacccaatgcctttcgaacttagagtggaaaacatgggactactgacttccggcgttgagttcgaatcacttcctgctgcgctctcactacctgcggagagtggattgtacccagtgaccctcgttggcgtcccccagaccactgggactatcacggtgaacggataccacactactgttttcggtgtattcagtgactgtcttctcgacaatctgcctggcattaaaacttccggctccaccgtggaggtaattccagctctgccgaggttgcaaatttcaactagcctcccccggtcagcccactcattgcagccaagctcgggcgacgagataagtaccaacgtgtccgtgcagttgtataacggagaaagccaacaattgattattaaactggagaatatagggatggagccccttgagaaactggaagtaacaagcaaggtgttgactacaaaggaaaaattatacggtgacttcctttcgtggaagctcgaggaaacgctggcccaattcccccttcagcccggtaaagtagcaacatttaccattaacataaaggttaagctggattttagctgtcaggaaaatctgctacaggaccttagcgatgacggaataagtgtgtccggattcccactgagttctccattccgccaagtggtgagacccagagtcgaaggaaagcctgtgaacccacctgagagtaacaaggctggcgattactcgcacgtcaagacccttgaggctgtattgaatttcaagtactcgggcggccccggacacacagaaggttactatcgcaacctctcactgggtctgcatgtcgaggtcgaaccctctgttttcttcacgcgagtgagcacgcttcctgctaccagcacgagacaatgccatttactgctcgacgttttcaactctaccgagcacgaactgaccgtgtctacccgctctagcgaagctctcatcctgcatgctggcgagtgccaaagaatggcaatccaggtcgataaatttaatttcgaatcttttcccgaatcaccaggcgaaaaagggcagtttgctaacccaaagcaacttgaggaggaacgacgtgaggctaggggcctcgaaatacacagcaagctggggatctgctggcgcatacccagcttgaaacgtagcggggaagccagtgtggaggggctcttaaaccagctggttttagagcatctgcagttagcacccctccaatgggatgtcctcgttgacggtcagccttgcgatagagaggctgttgccgcgtgccaggtgggggatcccgtccgtctcgaagtccgacttacaaacagaagcccgcgcagtgtcggtcctttcgcactgaccgttgttccatttcaggaccatcagaacggagtgcacaactatgatctccacgataccgtgagttttgtcgggtcatccacgttctaccttgacgccgtgcagcccagtggtcagtccgcttgtctgggcgctttgctttttctgtatacgggcgatttcttcctccacatccggtttcacgaggactccacttcaaaggaactccctccgtcatggttctgcctacccagcgtccacgtttgcgccctggaggcacaggcatag

SEQ ID NO: 61010 - DNA, 3447 bp, Artificial Sequence
  derived and/or modified sequence
atgtcagtaccagattatatgcagtgcgccgaggatcaccagacactacttgtggtggtgcagcctgtaggaatagtgtctgaggagaacttttttcgtatctataagcgcatttgctcagtgagccaaatctctgtgagagactcacagcgcgttctgtatattaggtacagacatcattacccaccagaaaacaatgagtggggagatttccagacccatcgcaaagttgtcggcctcatcacgattactgattgcttctccgctaaagactggccacagacattcgaaaaatttcacgtgcagaaggaaatctatggttccacactctatgactcgcgtctgtttgtctttggactccaaggcgagattgtcgaacagccacgcactgacgttgccttttatccaaattacgaggattgccagaccgtggaaaagaggatagaggacttcattgagtccctctttatcgtactggaatccaagcgcctggacagagccaccgacaaatccggcgataaaataccactgctgtgcgtcccattcgaaaaaaaagacttcgtgggccttgatacggacagtcgacattacaaaaagcgttgtcaggggagaatgagaaagcacgtgggagacttgtgcctgcaggctggtatgttgcaggattccctcgtgcattatcacatgtcggtggagctgctgcgttcagtcaatgacttcttatggttaggagcagccctggagggtctctgcagcgcaagcgtaatctaccattacccaggcggaactggaggtaaaagcggcgcacggcgattccagggcagcacgctacccgctgaagccgctaaccgccacaggcccggagctcaggaagtccttattgaccctggtgcactgactaccaatggcatcaatcctgatacctccactgagatcggtcgggctaagaactgtctaagcccagaagacatcatagataagtacaaggaagccatttcatattattccaaatacaagaacgcaggcgtcattgagctagaagcttgtataaaagccgtccgagttttggccatccagaagaggtcgatggaggcttcggagtttttgcaaaatgccgtgtacataaatctgcgccaacttagtgaagaagagaagatacaacggtatagcattcttagcgaactttatgagttgataggatttcaccgcaagtcagccttctttaagcgggtcgctgcaatgcagtgtgtcgccccaagcatcgctgaacctggctggcgggcatgttacaaattgctcttagaaacactcccagggtattctctaagcctcgaccccaaggacttcagtagagggacacatagaggttgggctgccgtgcagatgaggctgctccacgagcttgtttacgcaagccggagaatggggaatccagcgttgtccgttcggcatttgagctttttactgcagactatgctcgattttttgagtgaccaggaaaaaaaggatgtggcacagtcgctggagaactatacctctaagtgtccgggaactatggagcccatcgcccttcctggcggactgactctccctccagtcccctttactaaactgcccatagttcggcatgtgaagcttctgaacctccctgccagtcttcgtccacataagatgaaatctctgttaggccagaacgtgtcaaccaagtccccattcatatatagtcccattattgcacacaatagaggggaggagcgcaacaaaaagatcgacttccaatgggtacagggggacgtgtgtgaggtgcagctgatggtgtataatcccatgcctttcgagctcagggtcgaaaatatgggtctacttacgtcaggcgtggaatttgagtctctgcccgcagccctctccttgccagcagagagtggactctaccccgtcacactagttggcgtcccgcagaccaccggcaccatcacagtgaacggataccacactactgtgttcggagtttttagcgattgcctgctcgataacttacctggcataaaaacttccggcagcaccgtcgaagtaatacccgctctgcctcggctgcaaatatcaacttcgttaccccgatcagcacactccctgcaaccttcctccggcgacgaaattagtaccaatgtctctgtgcaactttacaacggcgaaagccagcagctcatcattaaactagaaaatattgggatggaacccctcgagaaattggaggtaacctctaaggtcttgactacgaaggagaaactctatggtgattttttgtcctggaagctggaggagaccttggcacaattcccgctccagccagggaaagtggctaccttcactatcaatattaaggtgaagttggattttagctgtcaagaaaacctcctgcaggatcttagtgacgatggtatttctgtgagtggatttcccctctcttcaccgttcagacaagtcgtcaggccgcgtgtggagggcaagccagtcaaccctccggagagtaataaggctggggattatagccatgtaaaaactttagaagctgtgctgaattttaaatattccgggggtcccggacatacggagggctattatcgtaatctcagcttaggtctgcacgtagaggtggagccatcagtgttttttaccagagtgagcactttgccagccacatctactcgtcagtgccaccttttgctggacgtgttcaattccacggaacatgaactgactgtgtctacacggtccagcgaggccctaatacttcatgccggtgaatgccagagaatggccatccaagtcgacaagttcaattttgagagtttccctgaaagtcccggtgaaaagggtcagttcgccaacccaaagcagcttgaagaggagcggcgagaagcaagggggttagagatccactcaaaactcggaatctgttggcgcataccctcccttaaaagatctggagaagcatccgtggaagggcttctaaatcaactggtgctcgagcacctacagctggcccctctgcagtgggatgttctcgtggacggacagccctgcgatcgcgaagccgtcgccgcatgtcaggtgggcgaccccgtccggctggaggttcgtctcaccaatcggtccccgcgaagcgtaggtccatttgcgttgactgtggtcccttttcaggaccaccagaacggcgttcacaattacgacctgcacgacacagtcagtttcgttgggagttcaacgttttacttggatgcggtccagccctctggacagagcgcatgccttggggcattgctgtttctttataccggggatttcttcttgcatataaggtttcacgaggatagcacctcgaaggagctgccaccatcatggttctgccttcccagcgtccatgtgtgtgcgctggaggctcaagcctag

SEQ ID NO: 61011 - protein, 501 aa, Artificial Sequence
  derived and/or modified sequence
MEASRCRLSPSGDSVFHEEMMKMRQAKLDYQRLLLEKRQRKKRLEPFMVQPNPEARLRRAKPRASDEQTPLVNCHTPHSNVILHGIDGPAAVLKPDEVHAPSVSSSVVEEDAENTVDTASKPGLQERLQKHDISESVNFDEETDGISQSACLERPNSASSQNSTDTGTSGSATAAQPADNLLGDIDDLEDFVYSPAPQGVTVRCRIIRDKRGMDRGLFPTYYMYLEKEENQKIFLLAARKRKKSKTANYLISIDPVDLSREGESYVGKLRSNLMGTKFTVYDRGICPMKGRGLVGAAHTRQELAAISYETNVLGFKGPRKMSVIIPGMTLNHKQIPYQPQNNHDSLLSRWQNRTMENLVELHNKAPVWNSDTQSYVLNFRGRVTQASVKNFQIVHKNDPDYIVMQFGRVADDVFTLDYNYPLCAVQAFGIGLSSFDKCIQTLRMQELCELHRQHHSAASLVHRTVCQRWVGHPWRLLPQTSLLWTDLSPPPVVPAPHQISM

SEQ ID NO: 61012 - DNA, 1506 bp, Artificial Sequence
  derived and/or modified sequence
atggaggccagcagatgcagactgagccccagcggcgacagcgtgttccacgaggagatgatgaagatgagacaggccaagctggactaccagagactgctgctggagaagagacagagaaagaagagactggagcccttcatggtgcagcccaaccccgaggccagactgagaagagccaagcccagagccagcgacgagcagacccccctggtgaactgccacaccccccacagcaacgtgatcctgcacggcatcgacggccccgccgccgtgctgaagcccgacgaggtgcacgcccccagcgtgagcagcagcgtggtggaggaggacgccgagaacaccgtggacaccgccagcaagcccggcctgcaggagagactgcagaagcacgacatcagcgagagcgtgaacttcgacgaggagaccgacggcatcagccagagcgcctgcctggagagacccaacagcgccagcagccagaacagcaccgacaccggcaccagcggcagcgccaccgccgcccagcccgccgacaacctgctgggcgacatcgacgacctggaggacttcgtgtacagccccgccccccagggcgtgaccgtgagatgcagaatcatcagagacaagagaggcatggacagaggcctgttccccacctactacatgtacctggagaaggaggagaaccagaagatcttcctgctggccgccagaaagagaaagaagagcaagaccgccaactacctgatcagcatcgaccccgtggacctgagcagagagggcgagagctacgtgggcaagctgagaagcaacctgatgggcaccaagttcaccgtgtacgacagaggcatctgccccatgaagggcagaggcctggtgggcgccgcccacaccagacaggagctggccgccatcagctacgagaccaacgtgctgggcttcaagggccccagaaagatgagcgtgatcatccccggcatgaccctgaaccacaagcagatcccctaccagccccagaacaaccacgacagcctgctgagcagatggcagaacagaaccatggagaacctggtggagctgcacaacaaggcccccgtgtggaacagcgacacccagagctacgtgctgaacttcagaggcagagtgacccaggccagcgtgaagaacttccagatcgtgcacaagaacgaccccgactacatcgtgatgcagttcggcagagtggccgacgacgtgttcaccctggactacaactaccccctgtgcgccgtgcaggccttcggcatcggcctgagcagcttcgacaagtgcatccagaccctgagaatgcaggagctgtgcgagctgcacagacagcaccacagcgccgccagcctggtgcacagaaccgtgtgccagagatgggtgggccacccctggagactgctgccccagaccagcctgctgtggaccgacctgagccccccccccgtggtgcccgccccccaccagatcagcatgtag

SEQ ID NO: 61013 - DNA, 1506 bp, Artificial Sequence
  derived and/or modified sequence
atggaggcctcccgctgtaggctcagtccgtcaggagattcagtcttccacgaagagatgatgaaaatgcggcaagccaaacttgattatcagcgcctcctgctggagaagcgacaacggaaaaagcggctcgaacctttcatggtacagccaaatcctgaagctcggctgagaagggccaaacctcgggcctctgacgagcagacgcccctagtcaattgccacacaccgcattccaatgtgatcttgcatggtatcgatggcccggcagccgtactaaagcctgacgaggttcacgcgccgtctgtgagttcttcagttgtagaagaagatgccgaaaatactgttgatactgctagtaagccaggtctccaggaaaggctacagaagcacgatatctctgaaagcgtgaacttcgatgaggagaccgacggcatctcgcagtctgcatgtcttgagcggccaaattctgcttcctcacagaattctaccgatacgggcacctctggaagtgcaaccgctgcacagccagcagacaatctgttaggcgatatcgacgatctggaggatttcgtttattcccctgccccacagggggtcaccgtgagatgtaggatcataagggacaagcgaggcatggacagaggcctctttcctacatattacatgtacctcgagaaggaagagaaccagaagattttcctgctagcggctaggaagcggaagaaaagcaaaaccgctaactatttgatctctatcgacccagtggacctgagccgcgagggtgaaagctatgtgggcaagctaaggagcaacctcatgggcacaaagtttacagtgtacgatcggggcatctgtcctatgaaaggtcgtgggttggttggcgctgctcacactcgacaggaacttgcggccatctcttacgaaactaacgtcttgggctttaagggaccaaggaagatgtctgtgataataccaggcatgacactgaaccataagcagattccatatcaacctcagaataaccatgacagccttctctctcgttggcagaatcgcaccatggagaacctggtggagttgcataataaggcccccgtttggaacagcgacacccaaagctacgtgctgaacttccgtgggcgcgtgacccaggcatccgtcaagaactttcaaatcgtgcacaaaaatgaccctgactacatagtaatgcaatttggtcgcgtggctgatgacgttttcacgctggattataactaccctctgtgcgctgttcaggctttcggaatcgggctttctagctttgataagtgtatccagaccctgcgaatgcaagaattatgcgaactgcaccggcagcaccacagcgccgcaagcctcgtgcacagaaccgtatgtcagcgctgggttggtcacccgtggcgtctcttaccacagactagtctgctgtggacagacctcagcccgccacccgttgtgcccgccccacaccaaattagtatgtag

SEQ ID NO: 61014 - DNA, 1506 bp, Artificial Sequence
  derived and/or modified sequence
atggaggccagccgctgccgcctgagccccagcggggacagcgtcttccacgaggagatgatgaagatgaggcaggccaagctggactaccagaggctgctgctggagaagaggcagaggaagaagaggctggagcccttcatggtgcagcccaaccctgaggcccggctgcggcgggccaagccccgggccagtgatgagcagacccccctggtgaactgccacaccccccacagcaatgtcatcctgcacggcattgatggccctgctgctgtgctgaagccagatgaggtgcacgcccccagcgtgagcagctctgtggtggaggaggatgctgaaaatacagtggacacagccagcaagccaggcctgcaggagcggctgcagaagcatgacatcagcgagagcgtgaactttgatgaggagacagatggcatcagccagagcgcctgcctggagcggcccaacagcgccagcagccagaacagcacagacaccggcaccagcggcagcgccacagctgcccagcctgctgacaacctgctgggggacattgatgacctggaggactttgtgtacagccctgccccccagggcgtgacagtgcgctgccgcatcatccgggacaagaggggcatggaccggggcctcttccccacctactacatgtacctggagaaggaggagaaccagaagatcttcctgctggccgccaggaagaggaagaagagcaagacagccaactacctgatcagcattgatcctgtggacctgagccgggagggggagagctatgtgggcaagctgcggagcaacctgatgggcaccaagttcaccgtgtatgaccggggcatctgccccatgaagggccggggcctggtgggcgccgcccacacccggcaggagctggccgccatctcctatgagaccaacgtgctgggcttcaagggccccaggaagatgtctgtcatcatccctggcatgaccctgaaccacaagcagatcccctaccagccccagaacaaccacgacagcctgctgagccgctggcagaacagaaccatggagaacctggtggagctgcacaacaaggcccctgtgtggaacagcgacacccagagctatgtgctgaacttccggggccgggtgacccaggcctctgtgaagaacttccagatcgtgcacaagaatgaccctgactacatcgtgatgcagtttggccgggtggctgatgatgtgttcaccctggactacaactaccccctgtgtgctgtgcaggccttcggcatcggcctgagcagctttgacaagtgcatccagaccctgaggatgcaggagctgtgtgagctgcaccggcagcaccacagcgctgccagcctggtgcacaggacagtgtgccagcgctgggtgggccacccctggaggctgctgccccagaccagcctgctgtggacagacctgagccccccacctgtggtgcctgccccccaccagatctccatgtag

SEQ ID NO: 61015 - DNA, 1506 bp, Artificial Sequence
  derived and/or modified sequence
atggaggccagccggtgccggctgagccccagcggcgacagcgtgttccacgaagaaatgatgaagatgcgccaagccaaactggactaccagcgactgctcctcgagaagagacagcggaaaaagaggctggagccctttatggtccagccaaatcctgaggccaggctgcggagagccaaaccaagggctagtgatgagcagacacctttagtcaattgtcacacccctcactcaaacgtcatcctccacgggattgacggccccgccgcagtgcttaagcccgatgaggtgcacgccccaagcgtcagcagttcagtggtggaggaggatgccgagaacacagtggatactgcaagcaagcccggtctccaggaaaggctccagaagcatgatatttctgaatccgtgaacttcgatgaagagaccgacgggatctcccaaagcgcttgcctggaaaggcctaattctgcctcatctcagaactctacggacactggcacctccggtagtgcaacggctgcgcagcccgccgataatttgctaggagacattgacgatttggaagacttcgtatacagccccgcaccacagggggtgactgtccgctgccgtatcatacgcgataagcggggcatggacagagggctgtttccaacctattatatgtacctggagaaggaggaaaaccagaagatcttcctgctcgctgcacgcaaaagaaagaagtcaaagacagcaaattaccttatttctattgacccagtggatctgtcacgggagggcgaatcatacgtcggtaaactgaggagtaacctgatgggaacaaagttcactgtatatgaccgggggatctgcccaatgaagggccgagggctggtgggggctgctcatactaggcaggaacttgcggccatctcttacgaaacaaatgtgctcgggttcaaaggtccaaggaagatgtccgtgatcatcccaggcatgactctgaaccacaaacagattccataccagccccagaataatcatgattcactgttatctcggtggcagaataggacaatggagaacctggtggagctgcataacaaagctcccgtatggaattccgacacccaatcctacgttctgaactttcgcggccgggtcacacaggccagtgtgaagaactttcagatcgtccataaaaacgatcccgactacattgttatgcagttcgggcgggttgccgatgatgtgttcaccttggactataactatcctctctgcgccgtgcaagccttcggcattggtctctcttcttttgacaagtgtattcaaactctgcgaatgcaggagctgtgtgaactgcaccgacagcaccactcagccgcaagcctggttcacaggacagtatgccagcggtgggtgggacatccgtggcgcctactacctcagacctcccttctgtggaccgacctgagtccaccccctgtggtgcccgcacctcatcagatctccatgtag

SEQ ID NO: 61016 - DNA, 1506 bp, Artificial Sequence
  derived and/or modified sequence
atggaggcctccaggtgccgactctcgcctagtggcgacagtgtttttcatgaagagatgatgaagatgcgacaggctaaactggattatcagagactgcttctggagaaacgtcagaggaaaaaaaggctggaaccctttatggttcagccaaatccagaggctcgcctacggcgagccaagcccagggctagcgatgaacaaactccgcttgtgaattgtcacaccccgcacagcaatgtgatcctgcacggaatagatggcccagctgctgtactcaagcctgatgaggttcacgctcctagcgtgtcatctagcgtggttgaagaagatgcagagaacactgtggatactgcatcaaagccaggtttacaggagcgattgcagaaacacgatatttccgagtcagtcaactttgatgaagagacagacggcattagtcagtcagcttgtcttgagaggcctaattcagcatcatcccagaattctactgacacaggcacatcaggtagcgccaccgctgcccagcccgctgataatctccttggcgatatcgacgatctggaagacttcgtgtatagcccggcaccacagggtgtcaccgttaggtgccgaatcattcgcgacaagagaggcatggaccgaggcttatttcccacctattacatgtatctagagaaggaggagaatcagaagattttcctgctggctgctagaaagagaaagaagtctaagactgcaaattatctgatttctatagatccagttgatttaagcagagagggggagagctatgtcggaaaactccggtccaacctgatgggaaccaagttcacggtttatgataggggcatctgcccaatgaagggcagggggctcgttggagccgcacacactcgacaggaactcgccgcaatttcttatgagaccaatgttctagggtttaaagggcctcgaaagatgagcgttatcattcccggaatgacccttaatcataagcagattccatatcaaccacagaataaccatgactctctcctgtcacgatggcagaatcggacaatggagaatcttgtcgagctccacaacaaggcacctgtatggaatagtgacacacagtcatacgtgctcaactttaggggtagagtaactcaggccagcgttaagaattttcagattgtgcataagaacgaccccgactatatcgttatgcagttcgggagagttgcagacgacgtttttactttggactacaactatcccctctgtgcagtccaagcttttgggatcggcctgtcgtccttcgataaatgcatacagactctgcgcatgcaggaactctgtgagctgcacaggcagcaccactccgccgcatctctagttcataggaccgtgtgtcagcggtgggtgggccacccctggcgactgctcccccaaacatcccttctttggactgacctctcacccccacccgtggtgcccgcaccccatcaaatttccatgtag

SEQ ID NO: 61017 - DNA, 995 bp, Artificial Sequence
  derived and/or modified sequence
attccgggctcgaaggctgtgcggtctgccaggagctgcggccccgtccggcccgggctgtgtcttccatgaagaaatgatgaagatgcgacaggctaagctggattatcagaggctactacttgagaagaggcaaaggaaaaagcgccttgagccatttatggtgcagcccaatccagaagccaggctacgtcgggcaaagccaagggccagtgatgagcagactcccttggtgaactgtcatactccccacagcaatgtcatcttacatggtattgatggtccagctgctgtcctgaaaccagacgaagttcatgctccatcagtaagctcctctgttgtggaagaagatgctgaaaacaccgtggatactgcttccaagccaggacttcaggagcgtctccaaaagcatgatatctctgaaagtgtgaacttcgatgaggagactgatggaatatcccagtcagcatgtttagaaagacccaattctgcatcaagccagaattcaaccttttcctcattctgtcagaagactgaagacacgggatacaggcacttccggttctgctactgccgcccaaccagctgataacctcctgggagacatagacgacctggaggactttgtgtatagtcctgcccctcaaggtgtcacagtaagatgtcggataatccgggataaaaggggaatggatcggggtctcttccccacctactatatgtacttggaaaaagaagaaaatcagaagatatttcttcttgcagctagaaagcggaaaaagagcaaaacagccaactaccttatctccattgatccagttgatttatctcgtgaaggagaaagttatgtcggcaagcttagatccaacctcatggggaccaagtttacagtttatgaccgtggcatctgccccatgaagggccggggtttggtaggagcggcccacacccggcaggagctggctgccatctcctatgaaacaaacgtacttgga

SEQ ID NO: 61018 - DNA, 1951 bp, Artificial Sequence
  derived and/or modified sequence
ggaagagtgtgtacgtggtgggggcttcctcggtggcgggcatggaggcttcgcgctgccggctcagtcccagcggcgacagtgtcttccatgaagaaatgatgaagatgcgacaggctaagctggattatcagaggctactacttgagaagaggcaaaggaaaaagcgccttgagccatttatggtgcagcccaatccagaagccaggctacgtcgggcaaagccaagggccagtgatgagcagactcccttggtgaactgtcatactccccacagcaatgtcatcttacatggtattgatggtccagctgctgtcctgaaaccagacgaagttcatgctccatcagtaagctcctctgttgtggaagaagatgctgaaaacaccgtggatactgcttccaagccaggacttcaggagcgtctccaaaagcatgatatctctgaaagtgtgaacttcgatgaggagactgatggaatatcccagtcagcatgtttagaaagacccaattctgcatcaagccagaattcaaccgatacaggcacttccggttctgctactgccgcccaaccagctgataacctcctgggagacatagacgacctggaggactttgtgtatagtcctgcccctcaaggtgtcacagtaagatgtcggataatccgggataaaaggggaatggatcggggtctcttccccacctactatatgtacttggaaaaagaagaaaatcagaagatatttcttcttgcagctagaaagcggaaaaagagcaaaacagccaactaccttatctccattgatccagttgatttatctcgtgaaggagaaagttatgtcggcaagcttagatccaacctcatggggaccaagtttacagtttatgaccgtggcatctgccccatgaagggccggggtttggtaggagcggcccacacccggcaggagctggctgccatctcctatgaaacaaacgtacttggatttaaaggtcctaggaaaatgtctgtgatcattcctggaatgacactgaatcataagcagatcccctatcagccacaaaacaaccatgacagtttgctctcaaggtggcagaacagaactatggaaaatctggttgagctgcacaacaaggcccccgtctggaacagtgacactcagtcctatgtcctcaacttccgtggccgggtcactcaggcgtctgtgaagaacttccagatagtccacaaaaatgaccctgattatatagtcatgcagtttggacgtgtggcagatgacgtgttcacactggattacaactacccactttgtgcagtacaggcctttggcatcggtctttctagctttgacaaatgtatccaaaccttgagaatgcaggagctctgtgagctccaccgtcagcaccattcagctgcatcccttgtgcacagaactgtttgccagcgttgggtgggacacccgtggcggctgctccctcagacctcccttctgtggactgacctctcacctccgcctgttgttcctgcaccacatcagataagcatgtgaaggagggccaactggcagctgcgggacccttggcttgtcccccaccgacaagtcccacctgctgggtgaggacgagactgtttccatctcaggcatgtatcccaccaagtgcctccctcacagccatgcccagaagcctcacacctcgtcaccaccaccaccccccaccccatcctgaggcactgcctggcagataaccctggttggccacagaagctattaatacacgacagcatgtggggaaggacttatggtgggccaggtggacctcatcctgcttcttcctccctctggtttaaagagatatataaactaatttcacataatttgtgtgtgcaggtgattggtttttacataagtcctatttataccttttatatgttacagaaataaaagttaattta

SEQ ID NO: 61019 - protein, 354 aa, Artificial Sequence
  derived and/or modified sequence
MAQAPADPGREAERPQQHAATIPETPGPQFSQQREEDIYRFLKDNGPQRALVIAQALGMRTAKDVNRDLYRMKSRHLLDMDEQSKAWTIYRPEDSGRRAKSASIIYQHNPINMICQNGPNSWISIANSEAIQIGHGNIITRQTVSREDGSAGPRHLPSMAPGDSSTWGTLVDPWGPQDIHMEQSILRRVQLGHSNEMRLHGVPSEGPAHIPPGSPPVSATAAGPEASFEARIPSPGTHPEGEAAQRIHMKSCFLEDATIGNSNKMSISPGVAGPGGVAGSGEGEPGEDAGRRPADTQSRSHFPRDIGQPITPSHSKLTPKLETMTLGNRSHKAAEGSHYVDEASHEGSWWGGGI

SEQ ID NO: 61020 - DNA, 1065 bp, Artificial Sequence
  derived and/or modified sequence
atggcccaggcccccgccgaccccggcagagaggccgagagaccccagcagcacgccgccaccatccccgagacccccggcccccagttcagccagcagagagaggaggacatctacagattcctgaaggacaacggcccccagagagccctggtgatcgcccaggccctgggcatgagaaccgccaaggacgtgaacagagacctgtacagaatgaagagcagacacctgctggacatggacgagcagagcaaggcctggaccatctacagacccgaggacagcggcagaagagccaagagcgccagcatcatctaccagcacaaccccatcaacatgatctgccagaacggccccaacagctggatcagcatcgccaacagcgaggccatccagatcggccacggcaacatcatcaccagacagaccgtgagcagagaggacggcagcgccggccccagacacctgcccagcatggcccccggcgacagcagcacctggggcaccctggtggacccctggggcccccaggacatccacatggagcagagcatcctgagaagagtgcagctgggccacagcaacgagatgagactgcacggcgtgcccagcgagggccccgcccacatcccccccggcagcccccccgtgagcgccaccgccgccggccccgaggccagcttcgaggccagaatccccagccccggcacccaccccgagggcgaggccgcccagagaatccacatgaagagctgcttcctggaggacgccaccatcggcaacagcaacaagatgagcatcagccccggcgtggccggccccggcggcgtggccggcagcggcgagggcgagcccggcgaggacgccggcagaagacccgccgacacccagagcagaagccacttccccagagacatcggccagcccatcacccccagccacagcaagctgacccccaagctggagaccatgaccctgggcaacagaagccacaaggccgccgagggcagccactacgtggacgaggccagccacgagggcagctggtggggcggcggcatctag

SEQ ID NO: 61021 - DNA, 1065 bp, Artificial Sequence
  derived and/or modified sequence
atggcgcaggcccctgctgacccaggtcgggaagctgaaagacctcagcagcacgcggctaccattcccgagaccccaggtcctcagttcagtcagcagagagaggaggatatctaccgtttcctgaaagacaatggcccccaacgagccttggtgatcgctcaggctctgggcatgcggactgccaaagatgtcaaccgggatttgtaccgcatgaaatcacgccacctactcgatatggacgagcagagtaaggcatggactatttaccgtcccgaggattctgggcggagagcgaaaagtgcctcaatcatttaccaacacaatcccatcaacatgatatgtcagaacggcccgaactcatggatctccatcgcaaactccgaggccatccagatcggccatgggaatataataacccgccagaccgtgagtcgcgaggacgggtccgcgggccccagacatcttccatcgatggcccccggcgattcaagcacttggggcactctcgttgatccttgggggccccaggacatccacatggagcagagcatcctgaggagagtccagttagggcacagcaatgaaatgcgactccacggcgttccttcagaggggcctgcgcacattcctccaggttcccccccagtatccgccactgctgcaggcccggaggccagttttgaagctcgaatccccagtccaggcacgcatcccgaaggagaagcagcccagagaattcatatgaagagttgcttcctcgaagatgctacgatcgggaactctaataagatgtcgatctcccctggcgtggccggacctggaggggtagcaggatcaggggagggagagcctggggaggatgccgggagacggccagcagacactcagtcccgatcgcattttccaagagatataggacagccgattacgccaagtcactcaaagctgacccccaaactcgaaaccatgacactcggcaaccggagtcataaagccgcggaggggagccattacgttgatgaagcatcacacgagggctcctggtggggtggcggaatctag

SEQ ID NO: 61022 - DNA, 1065 bp, Artificial Sequence
  derived and/or modified sequence
atggcccaggccccagctgaccccggccgggaggccgagcggccccagcagcacgccgccaccatccctgagaccccaggcccccagttcagccagcagcgggaggaggacatctaccgcttcctgaaggacaatggcccccagagggccctggtgattgcccaggccctgggcatgaggacagccaaggatgtgaacagagacctgtacaggatgaagagccgccacctgctggacatggatgagcagagcaaggcctggaccatctacagaccagaagattctggaagaagagccaagagcgccagcatcatctaccagcacaaccccatcaacatgatctgccagaatggccccaacagctggatcagcatcgccaacagcgaggccatccagattggacatggcaacatcatcacccggcagacagtgtccagagaagatggcagcgctggccccaggcacctgcccagcatggcccctggggacagcagcacctggggcaccctggtggacccctggggcccccaggacatccacatggagcagagcatcctgcggcgggtgcagctgggccacagcaatgagatgaggctgcacggcgtgcccagcgagggccctgcccacatccccccaggcagcccccctgtgtctgccacagctgctggccctgaggccagctttgaggcccgcatccccagccctggcacccaccctgagggggaggccgcccagaggatccacatgaagagctgcttcctggaggatgccaccatcggcaacagcaacaagatgagcatcagccctggggtggccggccctgggggcgtggccggcagcggggagggggagcctggagaagatgctggaagaagacctgctgacacccagagccgcagccacttcccccgggacatcggccagcccatcacccccagccacagcaagctgacccccaagctggagaccatgaccctgggcaacagaagccacaaggctgctgagggcagccactacgtggatgaggccagccatgagggctcctggtggggcggcggcatctag

SEQ ID NO: 61023 - DNA, 1065 bp, Artificial Sequence
  derived and/or modified sequence
atggcccaggcccccgccgaccccggccgggaggccgagcggccccagcagcacgccgcaacgatacctgaaacaccaggaccccagttctctcagcagcgggaggaagatatctatcgattcctgaaggataatggcccacagagagccctcgtcatcgctcaagctctcggtatgaggactgccaaagatgtaaaccgggatctctataggatgaaatcaaggcatctgcttgacatggacgagcaatccaaagcttggacaatttaccgtccagaggattctggaagacgggccaaaagcgcatctatcatctaccagcataaccctattaacatgatatgccagaacggacccaattcctggatatctatcgccaacagtgaagcgatccagataggccatggcaacatcatcaccagacagacggttagcagagaggatggatccgccgggcctagacatctgcccagtatggcccctggagattcatcaacctggggtacgctagtcgacccctggggcccccaggatatccatatggaacagtccatactgcggagagtccagctgggccattccaatgaaatgcgcttgcatggagtaccatcggaggggcctgcccacattccaccagggtcccccccagtcagtgcaacagcagcgggaccggaggcttcctttgaagcccgaattccaagccctgggactcaccccgaaggagaagctgcccagcgcatccatatgaagtcttgcttcctagaagacgccactatcggcaactctaataaaatgtcaatctcgccaggcgtggccggccccggcggtgtcgcgggcagtggagaaggcgagccaggggaggacgctggccgcagacctgctgacactcaaagcaggtcccatttccctagggatattggccagccaatcactccttcgcatagcaagttgacacctaaactagagactatgactctagggaaccgttcacacaaggccgcagagggcagccattatgtggacgaggcatcacatgagggaagttggtggggtggcgggatatag

SEQ ID NO: 61024 - DNA, 1065 bp, Artificial Sequence
  derived and/or modified sequence
atggctcaggccccagccgatccgggtcgagaagccgagcggcctcagcaacacgccgcaacaatccccgaaacacccggtccacaattctcccagcagagagaggaagacatttaccgctttctcaaggacaatgggcctcagcgagcactggttatcgcccaagcccttggtatgcgcaccgccaaagatgtgaaccgcgacttgtaccgtatgaaatcacggcacctactagacatggatgagcagtcaaaagcttggacgatctaccggccagaggattcaggccgaagggcaaagtctgcctccatcatttaccagcacaaccccattaacatgatttgtcaaaatggcccaaactcctggatttccatcgcaaattccgaagccatacagattggacatggaaacataatcactaggcagacagtgtctcgagaggatggaagcgccggtccgagacacctgccttccatggctccgggagattcctctacgtgggggaccttagtggacccgtggggacctcaagacatccatatggaacagagtattctccgcagggtgcagctggggcatagtaacgaaatgagactgcacggagtgccgagcgagggccctgcacatatcccccctggctcacccccagtttccgctactgcagccggaccggaggccagcttcgaagctcggatcccaagtccaggcactcatccagagggggaagctgcccagaggatccacatgaaaagctgtttcctcgaggacgctacaatcggcaactccaacaagatgtctatctcgccgggagtggcaggccctggaggcgtggctggctctggagagggtgaaccaggggaggacgctggcaggcgccctgctgacacacagagccggtcccacttcccccgagacatcgggcaaccgatcacacctagtcatagcaagctcacgccaaagctcgagacaatgaccctcgggaatcggtcccacaaggcggctgaaggtagtcactacgtcgatgaagcaagccatgaggggagctggtgggggggtggaatctag

SEQ ID NO: 61025 - DNA, 2073 bp, Artificial Sequence
  derived and/or modified sequence
tttttttttctttcaaaagacgaacagagaagtttcattttctttttctcctgaaaccgaatctggccggcctggctaggcatctatttccgggctgtaagcagctgacacctgcccagtggaagctggcatccctccccttgtgggttcagagctgcaagaagcaccaggctcggccacttcagaagccccagcctcgacctagcccaccctctcagggccacagtgcagaagcctgcacacctgccaagtctctccgactccttgcagctgctgtcagcatggcccaggctcctgctgacccgggcagagaagccgagaggccccagcaacatgcagctacaattccagagacccctggccctcagttcagccaacaacgggaggaagacatctacaggtttctcaaagacaatggtccccagagggccctggtcatcgcccaagcactgggaatgaggacagcaaaagatgtgaaccgagacttgtacaggatgaagagcaggcaccttctggacatggatgagcagtccaaagcatggacgatttaccgcccagaagattctggaagaagagcaaagtcagcctcaattatttaccagcacaatccaatcaacatgatctgccagaatggacccaacagctggatttccattgcaaactccgaagccatccagattggacacgggaacatcattacaagacagacagtctccagggaggacggttccgccggtccacgccacctcccttcaatggcaccaggtgattcctcaacttgggggaccctagttgatccctgggggccccaggacatccacatggagcagtccatactgagacgggtgcagctgggacacagcaatgagatgaggctccacggcgtcccgtccgagggccctgcccacatcccccctggcagccccccagtctctgccactgctgccggcccagaagcttcgtttgaagcaagaattcccagtccaggaactcaccctgagggggaagccgcccagagaatccacatgaaatcgtgctttctcgaggacgccaccatcggcaacagcaacaaaatgtctatcagcccaggggtggctggcccaggaggagtcgcagggtctggagagggggagccaggggaggacgcaggtcgtcgtcccgcagacacacaatccagaagtcactttcctcgagacattggtcagcccatcactcccagccactcgaagctcacccccaagctggaaactatgactcttggaaacaggagtcacaaagctgcagaaggcagccactatgtggatgaagcctcacacgaggggagctggtggggaggtgggatttagtgcacagcctcacgtggggcttggacacaggctgggggtgggcgcatgctagggagactagcctgctgctctctgcattccttagcgtcttgtttgacctgcttgcttccagacataacctgcatgaatcagttttgggggaatggacctggcatggggatgggttcaggccaggtcttttgatggccaggagtagatgacagggagttgccttggggaacctttggtgtgccaagaggaggtgggtagatgggagtggggctcggtcccccaggcccaggggactctctccactctttcctgggctcggggcatctgcctggagttaccttccatcatggctacctgctgtggtttgaatgtttgagtcccaacaaaattcatatcaaaacataatcccaactgggtgcagtggctcacgcctgtaatcccagcactttgggaggccgaggcgggcggatcaataggtcaggaaatccagaccgtcctggctaacatggtgaaaccccgtctctactaaaaaaaaaaatacaaaaaattagccgggcgttgtggcgggcacctggagtcccagctactccggaggctgagggaggagaatggtgtgaacccgggaggtggagcttccagtgagccgagatcgcgccactgcactccaggctgggcgacagagcgagactccgtctcaaaaaaataaatacataaataaaaaataaaccaaccataa

SEQ ID NO: 61026 - protein, 248 aa, Artificial Sequence
  derived and/or modified sequence
MAQAPADPGREGHLEQRILQVLTEAGSPVKLAQLVKECQAPKRELNQVLYRMKKELKVSLTSPATWCLGGTDPEGEGPAELALSSPAERPQQHAATIPETPGPQFSQQREEDIYRFLKDNGPQRALVIAQALGMRTAKDVNRDLYRMKSRHLLDMDEQSKAWTIYRPEDSGRRAKSASIIYQHNPINMICQNGPNSWISIANSEAIQIGHGNIITRQTVSREDGKSPKRAQGGDLGGEPPDPLGGGKG

SEQ ID NO: 61027 - DNA, 747 bp, Artificial Sequence
  derived and/or modified sequence
atggcccaggcccccgccgaccccggcagagagggccacctggagcagagaatcctgcaggtgctgaccgaggccggcagccccgtgaagctggcccagctggtgaaggagtgccaggcccccaagagagagctgaaccaggtgctgtacagaatgaagaaggagctgaaggtgagcctgaccagccccgccacctggtgcctgggcggcaccgaccccgagggcgagggccccgccgagctggccctgagcagccccgccgagagaccccagcagcacgccgccaccatccccgagacccccggcccccagttcagccagcagagagaggaggacatctacagattcctgaaggacaacggcccccagagagccctggtgatcgcccaggccctgggcatgagaaccgccaaggacgtgaacagagacctgtacagaatgaagagcagacacctgctggacatggacgagcagagcaaggcctggaccatctacagacccgaggacagcggcagaagagccaagagcgccagcatcatctaccagcacaaccccatcaacatgatctgccagaacggccccaacagctggatcagcatcgccaacagcgaggccatccagatcggccacggcaacatcatcaccagacagaccgtgagcagagaggacggcaagagccccaagagagcccagggcggcgacctgggcggcgagccccccgaccccctgggcggcggcaagggctag

SEQ ID NO: 61028 - DNA, 747 bp, Artificial Sequence
  derived and/or modified sequence
atggcacaggccccagccgatccaggccgagagggacacctggagcagcgaatcctgcaggtcctgaccgaagccggaagcccggtgaaattagctcagctagttaaggagtgtcaggcacctaagagggaactgaatcaggttttgtatcgtatgaaaaaggaacttaaagttagccttacaagtccggctacctggtgtcttgggggtacagacccggaaggagaggggccagcggagctggctcttagcagcccagctgaacgtccacagcaacacgccgcgaccattcccgagacccctgggccacagttttctcagcagagagaagaagacatttatagattcttgaaggacaacggtccccagcgcgcccttgtcatcgctcaggcacttggtatgaggactgcaaaggacgttaatagggatctgtataggatgaagtcaaggcatctgctggatatggatgagcaatctaaggcctggactatttatcgcccagaggacagtgggagacgagccaagtcagccagcataatttatcagcacaatcctatcaacatgatctgccaaaatgggcctaattcctggattagtatcgcaaacagcgaggctatacaaataggtcacggaaatattatcacccggcagaccgtgagccgagaggatgggaagtcccccaagagagcgcaaggaggggatctgggtggagagcctccagatcctttgggtggaggaaaaggctag

SEQ ID NO: 61029 - DNA, 747 bp, Artificial Sequence
  derived and/or modified sequence
atggcccaggccccagctgaccccggccgggagggccacctggagcagaggatcctgcaggtgctgacagaagctggcagccctgtgaagctggcccagctggtgaaggagtgccaggcccccaagcgggagctgaaccaggtgctgtacaggatgaagaaggagctgaaggtgtccctgaccagccctgccacctggtgcctgggcggcacagatcctgagggggagggccctgctgagctggccctgagcagccctgctgagcggccccagcagcacgccgccaccatccctgagaccccaggcccccagttcagccagcagcgggaggaggacatctaccgcttcctgaaggacaatggcccccagagggccctggtgattgcccaggccctgggcatgaggacagccaaggatgtgaacagagacctgtacaggatgaagagccgccacctgctggacatggatgagcagagcaaggcctggaccatctacagacctgaggacagcggccggcgggccaagagcgccagcatcatctaccagcacaaccccatcaacatgatctgccagaatggccccaacagctggatcagcatcgccaacagcgaggccatccagatcggccacggcaacatcatcacccggcagacagtgtcccgggaggatggcaagagccccaagagggcccagggcggggacctgggcggggagcccccagaccccctgggcggcggcaaaggatag

SEQ ID NO: 61030 - DNA, 747 bp, Artificial Sequence
  derived and/or modified sequence
atggcccaggcccccgccgaccccggccgggagggccacctggagcagcgtatcctgcaggttttaaccgaggccgggagtcccgtaaaattggcgcagctggtcaaagaatgtcaggcaccaaagcgagagcttaatcaggtcctgtaccgaatgaaaaaagaactgaaggtctccctcacaagtcctgcaacatggtgcctggggggcacagacccagagggcgaaggcccggctgagttagcactaagcagccctgccgagaggccacaacagcacgctgccaccattccagagactccaggcccacaattcagccagcagagagaggaggacatatacaggtttctgaaagacaatggaccccagcgggcgcttgtcatagcccaggcgctgggtatgagaacagctaaagacgtaaaccgcgatctgtaccgaatgaagtcccgccatctgctggacatggatgagcagtccaaagcttggaccatttatcgccccgaggattcgggccgtagagctaagtccgcctccataatctatcaacacaatcctatcaacatgatatgtcagaatgggccaaactcgtggatatcgatcgctaattccgaggctatacagatcggacatggtaatatcataacacgccagacagtgagccgggaagatggcaagtctccaaagagggcccagggcggggacctcggcggggaacccccggatcctcttggagggggcaaaggatag

SEQ ID NO: 61031 - DNA, 747 bp, Artificial Sequence
  derived and/or modified sequence
atggctcaagcacctgccgaccccggacgcgagggccatctggagcagaggatcctgcaggtactaacagaggccggaagccccgtcaagctggcccagctagtgaaagagtgtcaggcacccaaacgcgagctgaatcaggttctataccgcatgaagaaggaactgaaggtctccttgacaagcccggcaacttggtgtctgggcggaacagaccctgagggagagggacctgcagagctcgccctctcttcccccgcagaacgtccacagcagcatgcagctacaattcctgagactcccggtccccagttctcccagcagagggaagaggacatatatcgcttcctgaaagacaacggacctcagcgagccctggtcatcgctcaggctctgggtatgaggactgccaaggatgtgaacagggacctgtatcgcatgaagtcaaggcacttgctggacatggacgagcagtcgaaggcctggactatttatcggcctgaggacagcggcaggcgggctaagtcggcatctatcatctaccaacacaaccctataaacatgatttgtcagaatggcccaaactcttggatttcgatagccaactccgaagccattcaaatcggacacggtaacattattactcgtcaaacagtctcccgggaagatgggaagtctccgaaaagggctcagggtggtgacctcgggggagaacctcccgaccctctgggagggggaaaaggatag

SEQ ID NO: 61032 - DNA, 1041 bp, Artificial Sequence
  derived and/or modified sequence
cagaagccccagcctcgacctagcccaccctctcagggccacagtgcagaagcctgcacacctgccaagtctctccgactccttgcagctgctgtcagcatggcccaggctcctgctgacccgggcagagaaggccaccttgaacaaagaatcctgcaggtgctgacagaggctggctccccggtgaaacttgcccagctggtgaaggaatgccaagcacccaagagggagctcaaccaagtcctctaccgaatgaaaaaggagttgaaagtctccctcacatcccctgccacctggtgcttgggcgggactgatcctgaaggcgagggtcctgcagagctggccttgtccagccctgccgagaggccccagcaacatgcagctacaattccagagacccctggccctcagttcagccaacaacgggaggaagacatctacaggtttctcaaagacaatggtccccagagggccctggtcatcgcccaagcactgggaatgaggacagcaaaagatgtgaaccgagacttgtacaggatgaagagcaggcaccttctggacatggatgagcagtccaaagcatggacgatttaccgcccagaagattctggaagaagagcaaagtcagcctcaattatttaccagcacaatccaatcaacatgatctgccagaatggacccaacagctggatttccattgcaaactccgaagccatccagattggacacgggaacatcattacaagacagacagtctccagggaggacggtaagtcacccaagagagcccagggaggggacctcggtggggagccaccggatcctctgggtgggggcaaagggtagggatggggagtggggggattctgccctccaaggggaaagggttgcttccagacccccacagtccacctttacggccgtcctgagaatgaggacacctggatcaaagctctcctgatttccctgtactctgatactttctacctcattttaaagtttaatttaatttttatttttctaataaaattttaaaattaa

SEQ ID NO: 61033 - protein, 438 aa, Artificial Sequence
  derived and/or modified sequence
MNKLYIGNLNESVTPADLEKVFAEHKISYSGQFLVKSGYAFVDCPDEHWAMKAIETFSGKVELQGKRLEIEHSVPKKQRSRKIQIRNIPPQLRWEVLDSLLAQYGTVENCEQVNTESETAVVNVTYSNREQTRQADEVPLKILAHNNFVGRLIGKEGRNLKKVEQDTETKITISSLQDLTLYNPERTITVKGAIENCCRAEQEIMKKVREAYENDVAAMSLQSHLIPGLNLAAVGLFPASSSAVPPPPSSVTGAAPYSSFMQAPEQEMVQVFIPAQAVGAIIGKKGQHIKQLSRFASASIKIAPPETPDSKVRMVIITGPPEAQFKAQGRIYGKLKEENFFGPKEEVKLETHIRVPASAAGRVIGKGGKTVNELQNLTAAEVVVPRDQTPDENDQVIVKIIGHFYASQMAQRKIRDILAQVKQQHQKGQSNQAQARRK

SEQ ID NO: 61034 - DNA, 1317 bp, Artificial Sequence
  derived and/or modified sequence
atgaacaaactatacattggaaaccttaatgagtcagtcacacctgccgacctggaaaaggtctttgccgaacataaaatttcctattctggacagttcttagtcaagagtggctatgctttcgttgactgtccagatgagcactgggccatgaaggctatcgagacattcagcgggaaggtggaacttcagggcaagcggttggaaatagagcacagcgtgcccaaaaagcagcgatcgagaaagatccaaatcaggaacattccaccccaactccggtgggaggtcctagactctttgctggcgcagtacgggacggtagagaactgcgagcaggtgaataccgaatccgagaccgcagtggtgaatgtgacctactcgaatcgcgaacagacacgccaggccgatgaggtgccactgaaaatcctcgctcacaataactttgtgggacgtttgatcggaaaagaggggcgcaatctcaaaaaggtggagcaggataccgagaccaagataaccatttcatctctacaggacttgacactttataacccagaacgcacgatcactgtgaagggcgccattgaaaactgctgtcgagccgagcaggagattatgaaaaaagttagggaggcctacgagaacgacgttgcggccatgagcctgcaatcccacctaattccaggattaaacctcgctgcggtggggttgttcccagcctcatctagcgcagtgccacctccacccagtagtgtcaccggggcagccccttattcgagttttatgcaagctcccgaacaggagatggttcaggtgtttattcccgcccaggccgttggcgctatcatcggcaagaaagggcagcatatcaagcagctttccagattcgcgagcgccagtattaagatcgccccacccgagacgcccgattcaaaggtgaggatggtgatcattaccggccctcccgaggctcaattcaaagcgcagggccggatttatggaaagctgaaagaggagaatttttttggtcccaaggaggaagtcaagctagagacccatattcgagtgcccgcttccgctgcgggtcgtgtcatcgggaagggcggcaaaaccgtgaacgagctgcagaacctgacagctgccgaggtagtggtgcctcgagatcagactcctgatgagaacgatcaagtcattgtgaaaattattgggcacttctatgccagccagatggcccaaagaaagattcgggacattttggcccaagtgaagcagcagcatcaaaaagggcagtccaaccaggcacaggcgcgtcgtaagtag

SEQ ID NO: 61035 - DNA, 1317 bp, Artificial Sequence
  derived and/or modified sequence
atgaacaagctttacatcggcaacctcaacgagagcgtgacccccgcggacttggagaaagtgtttgcggagcacaagatctcctacagcggccagttcttggtcaaatccggctacgccttcgtggactgcccggacgagcactgggcgatgaaggccatcgaaactttctccgggaaagtagaattacaaggaaaacgcttagagattgaacattcggtgcccaaaaaacaaaggagccggaaaattcaaatccgaaatattccaccccagctccgatgggaagtactggacagcctgctggctcagtatggtacagtagagaactgtgagcaagtgaacaccgagagtgagacggcagtggtgaatgtcacctattccaaccgggagcagaccaggcaggctgacgaggttcccctgaagatcctggcccataataactttgtagggcgtctcattggcaaggaaggacggaacctgaagaaggtagagcaagataccgagacaaaaatcaccatctcctcgttgcaagaccttaccctttacaaccctgagaggaccatcactgtgaagggggccatcgagaattgttgcagggccgagcaggaaataatgaagaaagttcgggaggcctatgagaatgatgtggctgccatgagcctgcagtctcacctgatccctggcctgaacctggctgctgtaggtcttttcccagcttcatccagcgcagtcccgccgcctcccagcagcgttactggggctgctccctatagctcctttatgcaggctcccgagcaggagatggtgcaggtgtttatccccgcccaggcagtgggcgccatcatcggcaagaaggggcagcacatcaaacagctctcccggtttgccagcgcctccatcaagattgcaccacccgaaacacctgactccaaagttcgtatggttatcatcactggaccgccagaggcccaattcaaggctcagggaagaatctatggcaaactcaaggaggagaacttctttggtcccaaggaggaagtgaagctggagacccacatacgtgtgccagcatcagcagctggccgggtcattggcaaaggtggaaaaacggtgaacgagttgcagaatttgacggcagctgaggtggtagtaccaagagaccagacccctgatgagaacgaccaggtcatcgtgaaaatcatcggacatttctatgccagtcagatggctcaacggaagatccgagacatcctggcccaggttaagcagcagcatcagaagggacagagtaaccaggcccaggcacggaggaagtga

SEQ ID NO: 61036 - DNA, 1317 bp, Artificial Sequence
  derived and/or modified sequence
atgaacaagctgtacatcggcaacctgaatgaatctgtgaccccagctgacctggagaaggtgtttgctgagcacaagatctcctacagcggccagttcctggtgaagagcggctacgcctttgtggactgcccagatgagcactgggccatgaaggccatcgagaccttcagcggcaaggtggagctgcagggcaagaggctggagattgagcacagcgtgcccaagaagcagaggagcaggaagatccagatccggaacatccccccccagctgcgctgggaggtgctggacagcctgctggcccagtatggcaccgtggagaactgtgagcaggtgaacacagaaagtgaaacagctgtggtgaatgtgacctacagcaaccgggagcagacccggcaggctgatgaggtgcccctgaagatcctggcccacaacaactttgtgggccgcctgattggcaaggagggcaggaacctgaagaaggtggagcaggacacagagaccaagatcaccatcagcagcctgcaggacctgaccctgtacaaccctgagaggaccatcaccgtgaagggggccatcgagaactgctgcagagctgagcaggagatcatgaagaaggtgcgggaggcctatgaaaatgatgtggccgccatgagcctgcagagccacctgatccctggcctgaacctggccgctgtgggcctcttccctgccagcagcagcgctgtgcccccaccacccagctctgtgactggagctgccccctacagcagcttcatgcaggcccctgagcaggagatggtgcaggtgttcatcccagcccaggccgtgggcgccatcatcggcaagaagggccagcacatcaagcagctgagcagatttgccagcgccagcatcaagatcgcccctcctgagaccccagacagcaaggtgaggatggtgatcatcaccggccccccagaggcccagttcaaggcccagggccgcatctacggcaagctgaaggaggagaacttcttcggccccaaggaggaggtgaagctggagacccacatccgggtgcctgccagcgctgctggccgggtcatcggcaagggcggcaagacagtgaatgagctgcagaacctgacagctgctgaggtggtggtgccccgggaccagaccccagatgaaaatgaccaggtgattgtgaagatcatcggccacttctacgccagccagatggcccagaggaagatccgggacatcctggcccaggtgaagcagcagcaccagaagggccagagcaaccaggcccaggcccggaggaagtag

SEQ ID NO: 61037 - DNA, 1317 bp, Artificial Sequence
  derived and/or modified sequence
atgaacaagctgtacatcggcaacctgaacgagagcgtgacccccgccgacttggagaaagtattcgcggaacataaaatctcttactccgggcaatttctcgtgaagagcgggtatgcctttgtagactgtcccgatgaacattgggctatgaaggctatcgaaacctttagcgggaaggtcgagctgcagggaaagcggctggaaattgagcattctgtgccaaagaaacagaggtccaggaagattcagattcgcaacattccacctcagttacgctgggaagttctggatagccttttggcccagtacggaactgtggagaactgcgagcaggttaacaccgaaagcgaaacagccgtggtgaacgtcacatatagcaatcgtgaacaaactcgccaggccgacgaggtccctcttaagatactggcccacaataacttcgtcgggaggctgattggcaaggagggccgaaacttgaagaaggtcgagcaggatacggagaccaagattacaatctcttctcttcaggatctgactctgtacaatcctgagagaaccatcaccgtgaagggcgctatcgaaaattgctgtagggctgagcaggagattatgaagaaagtacgagaggcttatgaaaatgatgttgccgccatgtctctgcagagccacctgattcccggcctgaatttggccgccgtgggcctattccccgctagctcctccgcagtgccccctccgccgtcgtcagtcaccggcgccgcaccttattcctcattcatgcaagcccctgagcaggagatggtacaagtgtttatccctgcccaggccgtcggcgcaattatcgggaagaaggggcagcacatcaagcagttgtcaaggtttgctagtgctagcattaaaatcgcaccacccgagaccccggatagtaaggtcaggatggtaataatcacgggcccacctgaggcccagttcaaggcccagggacgaatatacggtaaactaaaggaagaaaattttttcggacccaaggaggaagtgaagcttgaaacccatatccgcgtcccagctagtgccgccggaagagtgattggtaagggaggaaaaactgtcaacgagctgcagaatctcacagctgctgaggttgtggtgcctagagatcagaccccggacgagaatgaccaggttattgtgaagataattggccatttctatgcatcacagatggcccagcgaaaaatccgggacatattggctcaggtgaagcagcaacatcagaaggggcaatctaaccaggctcaggccagacggaaatag

SEQ ID NO: 61038 - DNA, 1317 bp, Artificial Sequence
  derived and/or modified sequence
atgaacaagctctacatcggaaacctgaatgagtcagtcaccccagccgatttggagaaggtttttgcagagcacaaaatttcttatagcggtcagttcctggttaaatcaggctacgcctttgtggattgccccgatgagcattgggcaatgaaagcaatagagacgttttctggaaaggtggagcttcagggaaaaagactggagattgagcacagtgtccccaagaagcagcgctcgcgaaaaatccagattagaaatattccaccacaattgagatgggaggtgctcgactcattgctcgctcaatatggcacagttgaaaactgcgagcaggtgaatactgaatctgagacagcagttgttaatgtaacctacagtaatcgggagcagacgaggcaggcggacgaagtacctttgaaaattctggcccataacaactttgtcgggaggctgattggcaaagagggaaggaacctgaagaaggtggaacaggacaccgagaccaaaataaccatctctagtctgcaggatcttactctgtataacccggagcggaccattacagtcaaaggcgcaatcgaaaattgctgccgcgcagagcaagaaatcatgaaaaaggttagagaggcctacgagaatgacgtagccgctatgtccctgcagtcacacttgatcccagggctcaaccttgctgcagtggggctgttcccagcaagttcctctgccgttcctccccctccaagctcagtaacgggcgcagccccatacagttcctttatgcaggccccagaacaagaaatggtccaggtgttcatacctgcccaggcagtaggtgctataatcggtaaaaaggggcagcacattaagcagctctccagatttgcgtctgcctccatcaagatcgcccctccagagacaccggactctaaggtccgcatggtcatcattaccggaccccctgaagcccaattcaaggcccagggacgaatctacggaaagcttaaggaagaaaacttttttggccctaaggaggaggttaagttagagactcacatccgggtcccggcatcagccgcaggaagggtcatcgggaaagggggtaaaaccgtgaatgagctacaaaacttgactgcggcagaagtggtcgtgccacgcgaccagacacccgatgaaaatgaccaggtcatcgtgaagatcattggccatttctatgccagtcagatggcacagagaaaaataagagacattctggctcaggtgaaacagcagcaccagaagggccagagcaaccaggctcaggccagaagaaaatag

SEQ ID NO: 61039 - DNA, 1317 bp, Artificial Sequence
  derived and/or modified sequence
atgaacaagctgtacatcggcaacctgaacgagagcgtgacccccgccgacctggagaaggtgttcgccgagcacaagatcagctacagcggccagttcctggtgaagagcggctacgccttcgtggactgccccgacgagcactgggccatgaaggccatcgagaccttcagcggcaaggtggagctgcagggcaagagactggagatcgagcacagcgtgcccaagaagcagagaagcagaaagatccagatcagaaacatccccccccagctgagatgggaggtgctggacagcctgctggcccagtacggcaccgtggagaactgcgagcaggtgaacaccgagagcgagaccgccgtggtgaacgtgacctacagcaacagagagcagaccagacaggccgacgaggtgcccctgaagatcctggcccacaacaacttcgtgggcagactgatcggcaaggagggcagaaacctgaagaaggtggagcaggacaccgagaccaagatcaccatcagcagcctgcaggacctgaccctgtacaaccccgagagaaccatcaccgtgaagggcgccatcgagaactgctgcagagccgagcaggagatcatgaagaaggtgagagaggcctacgagaacgacgtggccgccatgagcctgcagagccacctgatccccggcctgaacctggccgccgtgggcctgttccccgccagcagcagcgccgtgccccccccccccagcagcgtgaccggcgccgccccctacagcagcttcatgcaggcccccgagcaggagatggtgcaggtgttcatccccgcccaggccgtgggcgccatcatcggcaagaagggccagcacatcaagcagctgagcagattcgccagcgccagcatcaagatcgccccccccgagacccccgacagcaaggtgagaatggtgatcatcaccggcccccccgaggcccagttcaaggcccagggcagaatctacggcaagctgaaggaggagaacttcttcggccccaaggaggaggtgaagctggagacccacatcagagtgcccgccagcgccgccggcagagtgatcggcaagggcggcaagaccgtgaacgagctgcagaacctgaccgccgccgaggtggtggtgcccagagaccagacccccgacgagaacgaccaggtgatcgtgaagatcatcggccacttctacgccagccagatggcccagagaaagatcagagacatcctggcccaggtgaagcagcagcaccagaagggccagagcaaccaggcccaggccagaagaaagtag

SEQ ID NO: 61040 - DNA, 3228 bp, Artificial Sequence
  derived and/or modified sequence
atgaaagcgaacgaaaaggtcacgtccgacgcagatccaatgtggtacctgaaatacctgaatatctacgtcggtctgcctgatgtggaggaaagctttaacgtcaccaggcctgtgagcccgcatgaatgtaggctgagagatatgacatactccgcccctattactgtcgatatcgagtatacaagagggagccaaaggattatccggaatgcacttcccatcggccgcatgcccataatgctgaggtcttcaaattgcgttcttacagggaagacccctgctgaattcgcaaagctcaacgagtgcccactcgacccgggcggctacttcattgtgaaaggcgtggagaaagttattctgattcaagaacaattgagtaaaaacaggattatcgttgaagccgacagaaaaggggctgtcggagccagtgtcacatcctcaacccatgagaagaaatcgcgcacaaatatggcagttaagcaaggcaggttttatctcagacataatactctctcagaggatattcctatcgtgataatcttcaaggcaatgggggtagagagtgaccaggaaattgtgcagatgataggaacagaagagcacgtgatggccgcttttgggccctctctcgaggagtgccagaaagcacagattttcactcaaatgcaggccctcaaatatatcggaaataaggttaggcgtcagaggatgtggggtggagggcctaagaagaccaaaattgaagaagctagggagctgcttgcctcaacaatattgacccacgtgcccgtaaaagaattcaatttccgagctaaatgcatctacactgcggtgatggtgcgacgggtgattctggcccagggcgacaacaaggtggatgatcgtgattactatggcaacaagaggttagaattggcggggcagctgctgtctcttttgttcgaggacctgtttaagaagttcaactctgagatgaaaaagatcgctgatcaagttatccctaaacagcgtgccgcacagttcgatgttgtcaaacacatgagacaggatcagatcacaaacgggatggtgaatgccatcagcacaggaaactggtctttgaaaagattcaagatggatcgccagggggtgacacaggtgctctcgcggctctcctatatttctgcgttaggaatgatgacccgcatcagctcacagttcgagaagactagaaaagtctctggcccaaggtcgttgcagccctcccagtgggggatgctgtgcccttcggacactcctgagggagaggcctgtggcctggtgaaaaacctagctttaatgacccacattacaaccgatatggaggacggtcctatagtgaaactggctagcaatttgggggtcgaggacgtcaacctactttgcggggaggagctgtcctatcccaacgtgtttttggtgtttttgaacggtaacattcttggagtgatcagagaccacaaaaaactggtgaatacttttcgcctgatgaggagggcaggctacatcaatgagttcgtgagtatctctaccaatttgactgacaggtgcgtctatattagcagtgatggcggccgcttgtgccggccttatataatagtgaagaagcaaaagcccgctgtcacaaacaagcacatggaagagctcgcacagggctacaggaactttgaagattttttgcacgagtcgttggtagagtacctcgatgtaaacgaggaaaacgattgtaatatagccctttacgagcacactatcaataaggacaccacgcacctcgagatagagcctttcacactgcttggagtgtgcgccggtctgattccctacccgcatcataatcagtctccccgcaatacgtaccagtgtgcgatggggaagcaggccatggggacgatagggtataaccagaggaacagaatcgataccttgatgtatttgctagcctacccccagaaacctatggtgaagacaaaaactatcgagctgatcgaatttgagaaactgcccgcgggacagaatgcaactgtcgccgtgatgagctacagcgggtatgatattgaagatgctctcgtcctgaataaggccagtttagatcgtggattcggtcggtgtctcgtgtataaaaacgcaaaatgtactctgaagcgctatacgaaccagaccttcgacaaagttatgggtccgatgctggacgccgctaccagaaagccgatttggcgccacgagatcttagacgccgatggaatttgtagccctggagagaaggtcgagaataagcaggtgctggtgaataaaagcatgccaaccgtcactcagatccctctcgaaggttctaacgtgcctcagcagcctcagtataaggatgtgcctatcacctacaagggcgctacagactcttacattgagaaagtcatgatctcctcaaacgccgaagacgcatttctaataaaaatgttgctgcgacaaactagacggcccgaaataggggacaagttctcctccaggcacgggcaaaaaggagtctgtgggctgattgtacctcaggaggatatgcctttttgcgacagcgggatctgccctgacattatcatgaacccacatgggttcccatcacgtatgaccgtgggaaaactgatcgagctgctggcagggaaggccggagtgcttgacggaagattccactacggcacagcattcggcggatctaaggtgaaggatgtctgcgaagacctcgtacgacacggttacaactaccttggcaaggactacgtgaccagcggaattaccggcgagccacttgaagcttacatctacttcgggccagtatactatcagaaattgaagcacatggtgctcgacaagatgcatgccagggcacgcggccctcgcgcggtattgacgcgccagcccaccgaaggccgctcccgggatgggggcctccgtctcggcgaaatggaaagagactgcctgatcgggtatggtgccagcatgcttttgctagagagactgatgattagcagcgatgcatttgaggttgatgtgtgtggtcagtgcggccttctcgggtacagtggatggtgccactactgtaaatcaagttgtcatgtgtccagcctccggataccatacgcctgcaagcttctgttccaggagctccagtccatgaatatcattccacgcctgaagctctccaaatacaacgaatag

SEQ ID NO: 61041 - DNA, 3228 bp, Artificial Sequence
  derived and/or modified sequence
atgaaggccaatgagaaggtgaccagtgatgctgaccccatgtggtacctgaagtacctgaacatctacgtgggcctgcctgatgtggaggagagcttcaacgtgaccaggcctgtgagcccccatgaatgtcggctgcgggacatgacctacagcgcccccatcaccgtggacatcgagtacacccggggcagccagaggatcatcagaaatgccctgcccatcggccgcatgcccatcatgctgcggagcagcaactgtgtgctgaccgggaagaccccagctgagtttgccaagctgaatgaatgtcccctggaccccggcggctacttcatcgtgaagggcgtggagaaggtgatcctgatccaggagcagctgagcaagaaccgcatcatcgtggaggccgacagaaaaggagctgtgggcgcctctgtgaccagcagcacccatgagaagaagagcaggaccaacatggctgtgaagcagggccgcttctacctgcggcacaacaccctgtctgaggacatccccatcgtcatcatcttcaaggccatgggcgtggagagtgaccaggagatcgtgcagatgattggaacagaggagcacgtgatggccgccttcggccccagcctggaggagtgccagaaggcccagatcttcacccagatgcaggccctgaagtacatcggcaacaaggtgcggcggcagaggatgtggggcggcggccccaagaagaccaagattgaggaggcccgggagctgctggccagcaccatcctgacccacgtgcctgtgaaggagttcaacttccgggccaagtgcatctacacagctgtgatggtgcggcgggtcatcctggcccagggcgacaacaaggtggatgaccgggactactacggcaacaagaggctggagctggccggccagctgctgagcctgctgtttgaggacctcttcaagaagttcaacagcgagatgaagaagattgctgaccaggtgatccccaagcagagagctgcccagtttgatgtggtgaagcacatgaggcaggaccagatcaccaacggcatggtgaatgccatcagcactggaaactggagcctgaagcgcttcaagatggaccggcagggcgtgacccaggtgctgagccggctgagctacatcagcgccctgggcatgatgacccgcatcagcagccagtttgagaagaccaggaaggtgtctggccccaggagcctgcagcccagccagtggggcatgctgtgccccagcgacaccccagagggggaggcctgtggcctggtgaagaacctggccctgatgacccacatcaccacagacatggaggatggccccatcgtgaagctggccagcaacctgggcgtggaggatgtgaacctgctgtgtggggaggagctgagctacccaaatgtgttcctggtgttcctgaatggaaacatcctgggcgtcatccgggaccacaagaagctggtgaacaccttccggctgatgagaagagctggctacatcaatgaatttgtgtccatcagcaccaacctgacagacagatgtgtgtacatcagcagtgatggcggccgcctgtgccggccctacatcatcgtgaagaagcagaagccagctgtgaccaacaagcacatggaggagctggcccagggctacagaaactttgaggacttcctgcacgagagcctggtggagtacctggatgtgaatgaggagaatgactgcaacatcgccctgtatgagcacaccatcaacaaggacaccacccacctggagattgagcccttcaccctgctgggcgtgtgtgccggcctcatcccctacccccaccacaaccagagccccaggaacacctaccagtgtgccatgggcaagcaggccatgggcaccatcggctacaaccagaggaacagaattgacaccctgatgtacctgctggcctacccccagaagcccatggtgaagaccaagaccatcgagctgattgaatttgagaagctgcctgctggccagaatgccaccgtggccgtgatgagctacagcggctatgacattgaagatgccctggtgctgaacaaggccagcctggaccggggcttcggccgctgcctggtgtacaagaatgccaagtgcaccctgaagcgctacaccaaccagacctttgacaaggtgatgggccccatgctggatgctgccaccaggaagcccatctggaggcatgagatcctggatgctgatggcatctgcagccctggagagaaggtggagaacaagcaggtgctggtgaacaagtccatgcccaccgtgacccagatccccctggagggcagcaatgtgccccagcagccccagtacaaggatgtgcccatcacctacaagggggccacagacagctacatcgagaaggtgatgatcagcagcaatgcagaagatgccttcctgatcaagatgctgctgcggcagaccaggaggcctgagattggagacaagttcagcagcagacatggccagaagggcgtgtgtggcctcatcgtgccccaggaggacatgcccttctgtgacagcggcatctgcccagacatcatcatgaacccccacggcttccccagcaggatgacagtgggcaagctgattgagctgctggccggcaaggccggcgtgctggatggccgcttccactacggcacagccttcggcggcagcaaggtgaaggatgtgtgtgaggacctggtgagacatggctacaactacctgggcaaggactatgtgaccagcggcatcaccggggagcccctggaggcctacatctacttcggccctgtgtactaccagaagctgaagcacatggtgctggacaagatgcacgcccgggcccggggccccagggctgtgctgacccggcagcccacagagggccgcagcagagatggcggcctgcggctgggggagatggagcgggactgcctgattggctacggggcctccatgctgctgctggagcggctgatgatcagcagtgatgcctttgaggtggatgtgtgtggccagtgtggcctgctgggctacagcggctggtgccactactgcaagagcagctgccacgtgagcagcctgcgcatcccctatgcctgcaagctgctcttccaggagctgcagagcatgaacatcatcccccggctgaagctgagcaagtacaatgaatag

SEQ ID NO: 61042 - DNA, 3228 bp, Artificial Sequence
  derived and/or modified sequence
atgaaggccaacgagaaggtgaccagcgacgccgaccccatgtggtacctcaagtacttaaacatctacgtaggcctccctgacgtcgaagaatccttcaacgtgacacggccggtctcaccacatgaatgtcgacttagagatatgacctatagcgcccccattactgtggacattgagtataccagaggttcccaaaggattatccggaatgccctgcctataggacgcatgcctataatgctgcgctccagcaactgcgtcctgactggaaagactcccgccgaattcgccaagctgaacgaatgtccactggaccccggaggctactttattgtcaaaggagttgagaaagtgatcctcattcaagagcaactgtcaaagaatcggatcatagttgaagccgatagaaaaggagccgtgggggcctccgtgacaagcagcactcatgagaagaagtcaaggaccaatatggccgtgaagcagggcagattttacttacgccacaatactcttagtgaggatattccgattgttattatcttcaaggccatgggcgtggaaagtgatcaggagattgtgcagatgattggcactgaggagcatgtgatggctgccttcggccctagcctggaagagtgtcagaaggctcagatattcacacaaatgcaggcactgaaatatattggtaataaggtgcgcagacagagaatgtggggggggggccccaagaagaccaaaatagaagaggctagggagctcctggcatccacaattctgacccatgtgccagtgaaagagttcaactttcgcgcaaagtgcatttatacagccgtgatggtcagacgtgtgattctggcccagggcgacaacaaggtggacgatagggattattacggcaacaagcggctcgaactggcaggacagctgctcagcctgcttttcgaggacctctttaaaaagttcaactcggaaatgaagaaaattgcagaccaagtgattcccaagcaacgcgcagcccagttcgacgtggtcaagcatatgaggcaagatcagataacaaacggcatggtgaatgcaatatctacaggcaactggagcttgaagcggtttaaaatggacaggcagggtgtgacccaagttctctcaagactttcttacatcagcgctctggggatgatgaccagaatctcaagccagttcgagaagactagaaaagtttcaggccctcgtagtctgcagccatcgcagtggggcatgctatgtccctccgacactccggagggcgaagcctgtggtctggtgaaaaacctggccctcatgacacacataacaacagatatggaggacggcccgattgttaaactcgcttcgaatttgggcgtcgaggatgttaatcttctgtgtggggaggagttgagttatcctaacgtctttctcgtgttcctaaacgggaatattttaggcgtcattcgggaccataagaagcttgttaacactttccgcctcatgcgtcgtgcgggatatattaacgagtttgttagcatcagcacaaacttgacagatcgatgcgtttacatctcatccgatggaggacggctttgtcgcccctacattattgtcaagaaacagaagccggcggttacaaacaaacacatggaagagctggcacaggggtacagaaacttcgaggatttcctgcatgagagcctagtggagtacctggatgtgaatgaggagaatgactgcaatatcgcactttacgaacatacaattaacaaagacacgactcatctggagattgagccatttacactgctcggagtatgcgccggcttaatcccgtacccacaccacaatcagtcgccaagaaacacgtatcagtgtgctatgggtaagcaagccatgggcacgattggctataatcagcgcaatcgcatcgacacactgatgtacctgctggcatatccccagaaacctatggttaagactaagactatcgaactaattgaatttgagaaattgcccgccggtcagaacgcaacggtggcagtgatgtcttactctggctacgacattgaggacgcattagtgctgaacaaggcatctcttgacagagggtttggcagatgtttggtatacaagaatgcaaagtgtaccctgaaaaggtatactaaccagacgttcgacaaggtcatgggacctatgctagatgcagctacacgcaagcccatctggcgtcatgagatacttgatgccgatggaatatgttccccaggcgagaaagtcgaaaataagcaggtccttgtgaacaaatccatgccgacagtgactcagatacctctggaggggagtaacgtgcctcagcagccacagtacaaggatgttccaatcacctataagggcgctaccgattcttatattgagaaggtcatgatcagcagcaacgctgaggatgctttcttgataaaaatgctcctgaggcagactagacggccagaaattggcgacaagttttcaagcagacacgggcagaagggcgtttgcggactgatcgtccctcaagaggacatgcctttttgcgacagcggcatttgcccagatataataatgaatccccatgggtttccgagccggatgacagtgggaaagttgatcgaacttttagcaggcaaggccggcgtcctggatgggaggttccattacggcacggcttttgggggatccaaggttaaagacgtatgcgaggacttggtgaggcatggctacaactatcttggaaaagactacgtaaccagtggtatcaccggagagccactggaagcctacatctacttcggccccgtgtattaccaaaagctcaagcatatggttctagacaagatgcacgcacgggctaggggtcccagagccgtcctaactcgacagccaaccgaagggcgctccagggatggcggcctgcgcctgggagagatggagcgggattgtttaattggatacggagctagtatgctgcttttggaacggctgatgatctcctccgatgcatttgaagtggacgtgtgcggacagtgcggtctgttagggtattcaggatggtgtcattactgcaagagctcctgtcacgtatcttcactcaggattccttacgcctgcaagctgctgttccaggaactgcagagtatgaatattattcctcgcctaaaactcagcaagtataacgagtag

SEQ ID NO: 61043 - DNA, 3228 bp, Artificial Sequence
  derived and/or modified sequence
atgaaagctaatgaaaaagtcacttctgatgccgatcccatgtggtacctgaaatacctgaatatttacgtcggactgccagatgtggaagaatcttttaatgttacgaggcccgtatcgccacacgaatgtcggttaagagacatgacttatagtgcacctatcaccgtcgacatcgagtacacacggggaagccaaaggatcatccgcaatgcactccctattggccgaatgccaatcatgcttaggtcctccaattgtgtactgacaggaaaaacaccagctgagtttgcaaagctcaatgagtgccctctggaccctggcggatactttatagtcaagggtgtcgagaaggtcatcctgatccaggagcagctgtccaaaaataggatcatcgtcgaagctgacagaaaaggcgctgtgggggcatccgtgacatcctccacccacgagaagaaaagcaggaccaatatggccgtcaagcaggggagattttacctgcggcataacacactgtccgaagatattcctattgtgatcatattcaaagccatgggtgtcgaaagcgaccaggagatcgttcagatgataggtacagaggaacatgttatggcggctttcggcccatcacttgaagagtgtcagaaagcacagatctttacccagatgcaggccctaaagtacattggcaacaaggtgaggcggcagagaatgtggggcggtggaccaaagaagaccaagattgaggaggctcgggagctgttggcttccaccattttaacacatgtccctgtgaaggaatttaacttcagggctaagtgcatctacactgccgttatggttcggcgagtgattcttgcgcagggagacaacaaggttgatgacagggactactacggaaacaaaaggcttgaattagctggtcagttgctgtctcttttgttcgaagacctgttcaaaaaatttaactccgaaatgaaaaaaatcgctgaccaggtgattccgaagcaaagggctgcccaatttgatgtagtgaagcatatgagacaggatcaaattactaatggtatggtgaatgccatctcaaccggaaattggagcctgaagagattcaagatggatagacagggcgtgacacaggtcctgtctcggctgtcatacatttcagcgcttgggatgatgaccagaatttccagccagtttgaaaaaacgcgaaaagtgagtggtcctcgaagcctacaaccgtctcagtggggcatgttgtgcccctccgacacccccgagggcgaggcgtgtgggctagtcaagaacctggccctgatgacgcacataacgactgatatggaagatggcccaatcgtcaagctggcttccaacctcggggtggaagacgtgaacctgctctgtggtgaggagttatcgtacccaaatgtttttctcgttttcctcaatggtaacatcttgggtgtcattcgtgatcacaaaaagctggttaacaccttccgtctcatgcggcgtgcgggttacatcaacgagtttgtaagcatatcaacgaatcttacagaccgatgcgtgtatatcagcagcgacggcggaaggctgtgtcggccatacattatagtgaagaaacaaaagcccgctgttacaaataaacatatggaagaactcgcccagggataccggaattttgaagactttctacacgaaagtctagtagagtacttggacgtgaatgaggagaacgactgtaatatagctctctacgaacacactatcaacaaggatacaacgcatctggagatcgaacccttcacgctactgggcgtgtgcgccggtctaatcccatacccccatcacaatcagtcccccagaaacacataccaatgcgccatggggaaacaggccatggggacaatcggatacaatcagcggaaccgtattgatacattgatgtatctcctagcgtacccacagaagccaatggtgaagacaaagacgatcgaactgatcgagtttgaaaagttgcccgcaggtcagaacgctacggtcgctgtaatgtcatactctgggtatgacattgaagatgcactggtgctgaacaaggccagtctcgatcggggttttggaagatgccttgtgtacaaaaacgccaagtgcaccctgaaaaggtacactaaccaaacgttcgataaggttatggggcctatgctggacgcagctacacgtaagccgatctggcgacatgaaatcctcgatgcagacggcatttgtagccctggtgagaaggtagaaaacaagcaggttctagtgaataagtcaatgccaacggtgacccagattcctcttgaaggcagcaacgtcccacagcagccccagtacaaggacgtgccaattacttataagggggctactgactcctacatcgagaaggtgatgatttcctccaacgccgaggacgcttttctgatcaagatgctcctcagacaaaccagacggccagaaattggggataagttttcaagcagacacgggcaaaagggcgtgtgcggcttgattgttccacaagaggacatgcctttctgcgactccggaatttgtcccgatattattatgaacccacacggattcccttctcgaatgaccgtgggaaagcttatagagttactagctgggaaagccggagtccttgacggaagattccattacggaacagccttcggtggatctaaggtgaaggacgtgtgcgaggatcttgttcggcatgggtacaattacctgggaaaagattacgtgacaagcggtattaccggagagccccttgaggcttacatctatttcggacctgtgtactaccagaaactgaaacacatggtactggacaagatgcatgcacgggcacggggtccgagggccgtccttacccgccaacccactgaggggaggtcgagggacgggggattgcggctaggcgaaatggaaagagattgtcttataggttacggggctagtatgctgctcctcgagcgcctcatgatctcctctgacgcatttgaagtcgacgtctgcggacaatgtgggctgctggggtacagcgggtggtgccattactgtaaatccagttgccacgtaagcagcctgcgcattccctatgcgtgtaaactcttgttccaggaattgcaatctatgaacattatcccccgtctaaagctcagcaaatataatgagtag

SEQ ID NO: 61044 - DNA, 3228 bp, Artificial Sequence
  derived and/or modified sequence
atgaaggccaacgagaaggtgaccagcgacgccgaccccatgtggtacctgaagtacctgaacatctacgtgggcctgcccgacgtggaggagagcttcaacgtgaccagacccgtgagcccccacgagtgcagactgagagacatgacctacagcgcccccatcaccgtggacatcgagtacaccagaggcagccagagaatcatcagaaacgccctgcccatcggcagaatgcccatcatgctgagaagcagcaactgcgtgctgaccggcaagacccccgccgagttcgccaagctgaacgagtgccccctggaccccggcggctacttcatcgtgaagggcgtggagaaggtgatcctgatccaggagcagctgagcaagaacagaatcatcgtggaggccgacagaaagggcgccgtgggcgccagcgtgaccagcagcacccacgagaagaagagcagaaccaacatggccgtgaagcagggcagattctacctgagacacaacaccctgagcgaggacatccccatcgtgatcatcttcaaggccatgggcgtggagagcgaccaggagatcgtgcagatgatcggcaccgaggagcacgtgatggccgccttcggccccagcctggaggagtgccagaaggcccagatcttcacccagatgcaggccctgaagtacatcggcaacaaggtgagaagacagagaatgtggggcggcggccccaagaagaccaagatcgaggaggccagagagctgctggccagcaccatcctgacccacgtgcccgtgaaggagttcaacttcagagccaagtgcatctacaccgccgtgatggtgagaagagtgatcctggcccagggcgacaacaaggtggacgacagagactactacggcaacaagagactggagctggccggccagctgctgagcctgctgttcgaggacctgttcaagaagttcaacagcgagatgaagaagatcgccgaccaggtgatccccaagcagagagccgcccagttcgacgtggtgaagcacatgagacaggaccagatcaccaacggcatggtgaacgccatcagcaccggcaactggagcctgaagagattcaagatggacagacagggcgtgacccaggtgctgagcagactgagctacatcagcgccctgggcatgatgaccagaatcagcagccagttcgagaagaccagaaaggtgagcggccccagaagcctgcagcccagccagtggggcatgctgtgccccagcgacacccccgagggcgaggcctgcggcctggtgaagaacctggccctgatgacccacatcaccaccgacatggaggacggccccatcgtgaagctggccagcaacctgggcgtggaggacgtgaacctgctgtgcggcgaggagctgagctaccccaacgtgttcctggtgttcctgaacggcaacatcctgggcgtgatcagagaccacaagaagctggtgaacaccttcagactgatgagaagagccggctacatcaacgagttcgtgagcatcagcaccaacctgaccgacagatgcgtgtacatcagcagcgacggcggcagactgtgcagaccctacatcatcgtgaagaagcagaagcccgccgtgaccaacaagcacatggaggagctggcccagggctacagaaacttcgaggacttcctgcacgagagcctggtggagtacctggacgtgaacgaggagaacgactgcaacatcgccctgtacgagcacaccatcaacaaggacaccacccacctggagatcgagcccttcaccctgctgggcgtgtgcgccggcctgatcccctacccccaccacaaccagagccccagaaacacctaccagtgcgccatgggcaagcaggccatgggcaccatcggctacaaccagagaaacagaatcgacaccctgatgtacctgctggcctacccccagaagcccatggtgaagaccaagaccatcgagctgatcgagttcgagaagctgcccgccggccagaacgccaccgtggccgtgatgagctacagcggctacgacatcgaggacgccctggtgctgaacaaggccagcctggacagaggcttcggcagatgcctggtgtacaagaacgccaagtgcaccctgaagagatacaccaaccagaccttcgacaaggtgatgggccccatgctggacgccgccaccagaaagcccatctggagacacgagatcctggacgccgacggcatctgcagccccggcgagaaggtggagaacaagcaggtgctggtgaacaagagcatgcccaccgtgacccagatccccctggagggcagcaacgtgccccagcagccccagtacaaggacgtgcccatcacctacaagggcgccaccgacagctacatcgagaaggtgatgatcagcagcaacgccgaggacgccttcctgatcaagatgctgctgagacagaccagaagacccgagatcggcgacaagttcagcagcagacacggccagaagggcgtgtgcggcctgatcgtgccccaggaggacatgcccttctgcgacagcggcatctgccccgacatcatcatgaacccccacggcttccccagcagaatgaccgtgggcaagctgatcgagctgctggccggcaaggccggcgtgctggacggcagattccactacggcaccgccttcggcggcagcaaggtgaaggacgtgtgcgaggacctggtgagacacggctacaactacctgggcaaggactacgtgaccagcggcatcaccggcgagcccctggaggcctacatctacttcggccccgtgtactaccagaagctgaagcacatggtgctggacaagatgcacgccagagccagaggccccagagccgtgctgaccagacagcccaccgagggcagaagcagagacggcggcctgagactgggcgagatggagagagactgcctgatcggctacggcgccagcatgctgctgctggagagactgatgatcagcagcgacgccttcgaggtggacgtgtgcggccagtgcggcctgctgggctacagcggctggtgccactactgcaagagcagctgccacgtgagcagcctgagaatcccctacgcctgcaagctgctgttccaggagctgcagagcatgaacatcatccccagactgaagctgagcaagtacaacgagtag

SEQ ID NO: 61045 - protein, 308 aa, Artificial Sequence
  derived and/or modified sequence
MGGPRGAGWVAAGLLLGAGACYCIYRLTRGRRRGDRELGIRSSKSAEDLTDGSYDDVLNAEQLQKLLYLLESTEDPVIIERALITLGNNAAFSVNQAIIRELGGIPIVANKINHSNQSIKEKALNALNNLSVNVENQIKIKIYISQVCEDVFSGPLNSAVQLAGLTLLTNMTVTNDHQHMLHSYITDLFQVLLTGNGNTKVQVLKLLLNLSENPAMTEGLLRAQVDSSFLSLYDSHVAKEILLRVLTLFQNIKNCLKIEGHLAVQPTFTEGSLFFLLHGEECAQKIRALVDHHDAEVKEKVVTIIPKI

SEQ ID NO: 61046 - DNA, 927 bp, Artificial Sequence
  derived and/or modified sequence
atgggaggcccaaggggcgcgggttgggttgctgcggggctactcctcggtgctggagcatgttactgcatctaccggcttacgcgcggcagacggaggggtgacagagagttgggaatccggtccagcaagtccgcggaagatctgactgacggttcctatgacgacgtgttaaacgccgagcagctgcagaagctgctttaccttttggagtctactgaggacccggtcatcatcgagagagctctgataaccttggggaacaacgctgctttttctgtgaaccaggcgattattagagaactcgggggcatccccattgtcgctaacaagattaaccattcaaaccagtccatcaaagagaaggcactgaacgcacttaataacttgagcgtgaatgttgagaaccaaattaaaattaagatctacatctcacaggtgtgtgaggatgtgttctcaggaccccttaacagcgctgtgcagctcgcgggcctcacactgctgaccaacatgaccgtcactaatgatcatcagcacatgctccatagctacattaccgacctcttccaggtactcctgaccgggaatgggaacactaaggtccaggtgcttaaattgctgctgaatttgtctgagaaccccgctatgaccgagggactgctgagggctcaggtcgatagttcctttttgagcctttacgactcccatgtggccaaggagattctcctcagagtgctgacattgtttcagaacattaaaaattgcctaaagatcgaggggcacctagcagtgcagcctacgtttactgaggggtccctgtttttcctactgcacggtgaggagtgtgcccaaaagatccgagctctcgtcgatcatcacgacgcagaggtgaaggagaaggtcgtgacgatcatccccaaaatctag

SEQ ID NO: 61047 - DNA, 927 bp, Artificial Sequence
  derived and/or modified sequence
atgggcggccccagaggagctggctgggtggccgccggcctgctgctgggcgctggggcctgctactgcatctaccgcctgacccggggcagaagaagaggagaccgggagctgggcatccgcagcagcaagtctgctgaggacctgacagatggcagctatgatgatgtgctgaatgctgagcagctgcagaagctgctgtacctgctggagagcacagaggaccccgtcatcatcgagcgggccctgatcaccctgggcaacaatgctgccttctctgtgaaccaggccatcatccgggagctgggcggcatccccatcgtggccaacaagatcaaccacagcaaccagagcatcaaggagaaggccctgaatgccctgaacaacctgtctgtgaatgtggagaaccagatcaagatcaagatctacatcagccaggtgtgtgaagatgtgttttctggccccctgaacagcgctgtgcagctggccggcctgaccctgctgaccaacatgacagtgaccaatgaccaccagcacatgctgcacagctacatcacagacctcttccaggtgctgctgactggaaatggaaacaccaaggtgcaggtgctgaagctgctgctgaacctgtctgagaacccagccatgacagagggcctgctgcgggcccaggtggacagcagcttcctgagcctgtatgacagccacgtggccaaggagatcctgctgcgggtgctgaccctcttccagaacatcaagaactgcctgaagattgagggccacctggccgtgcagcccaccttcacagagggcagcctcttcttcctgctgcacggggaggagtgtgcccagaagatccgggccctggtggaccaccatgatgctgaggtgaaggagaaggtggtgaccatcatccccaagatctag

SEQ ID NO: 61048 - DNA, 927 bp, Artificial Sequence
  derived and/or modified sequence
atgggcggcccccggggcgccggctgggtggccgccggcctgctgcttggcgccggagcctgctattgtatctatagattgactagggggcggagaagaggcgatagagagctggggatcagaagttccaaatccgcagaggacttaactgacggctcctacgatgacgtgctgaacgctgaacagctccaaaagcttctgtatctgttggagtcgacagaggaccctgtgatcatcgaaagggctttgatcactctgggcaacaatgccgccttcagtgttaatcaggccattattagagagctcggaggcatccccattgtggctaacaagatcaatcactccaaccagtctatcaaggaaaaagccctcaatgcactgaataacctgtctgtcaatgtagagaatcagattaaaatcaaaatttatatctcccaagtgtgcgaggacgtattctctggcccactgaattccgccgtacagttagctgggttaacgctgctcactaatatgacagtcacaaacgatcatcaacatatgctgcactcctacataacggacctatttcaggtgctgctcaccggaaatggcaacactaaggtccaagtcttgaagctactgctgaatttgtcggaaaatcctgcaatgaccgaaggcctgttacgggctcaagttgactctagctttcttagcctgtacgactcccacgttgctaaggagatacttctacgggtcctgaccctgtttcagaatataaaaaattgtttgaaaatcgagggccacttggcggtgcaacccaccttcacagagggcagtctgttcttccttctgcacggcgaggaatgtgctcaaaaaatcagagctttagtggaccaccacgacgcagaggtcaaggaaaaagtcgtcactatcatccccaaaatctag

SEQ ID NO: 61049 - DNA, 927 bp, Artificial Sequence
  derived and/or modified sequence
atggggggtcccagaggcgcaggatgggtggcagccggtctgctgttgggtgccggagcttgttactgcatatatcgcttgacccgtggacgcaggcgaggagatcgagaactcggtatccgcagctcaaagtctgccgaagacctgacagatggaagctatgatgacgtgctcaatgccgaacagcttcagaagcttctgtacctcctggagagcacggaggatcccgtaatcattgagagggcccttatcacacttggaaataatgctgcctttagcgtcaatcaggctattatcagggagctgggaggtattccgattgtagccaacaagattaaccattctaaccagagcattaaagaaaaggccctcaatgctctcaataatctctctgtcaatgtcgagaatcaaataaaaataaaaatatacatctcccaggtatgtgaagacgtattttcggggccactcaatagcgccgtgcaacttgctggccttacattgttgactaatatgacagtcactaatgatcatcaacacatgctgcactcttatattacagatttatttcaggtcctgttgactggcaatgggaacacgaaagttcaggtccttaaactcctcttaaacctgagtgagaacccagcgatgaccgaaggtctactacgagcgcaggtagatagctccttcctttccttatacgacagccatgtcgcgaaagagatcctgctccgcgttctgacgttgttccagaatatcaaaaattgtctgaagatagaaggacacctggctgtccaaccgacgttcactgagggctcactgtttttcctgctacatggcgaagaatgtgcccagaaaattcgcgctcttgtagatcatcatgacgctgaggtgaaagagaaggtggtgaccatcattcctaaaatttag

SEQ ID NO: 61050 - DNA, 2524 bp, Artificial Sequence
  derived and/or modified sequence
accgccccgcgctccgctgccaggggcgggagggaggaatggttgcttcacgccccgggggaagagacgggaagctcggctctgggttgcgggccccggcgtctccgcgtggggcgcaccgtccgacccccccctcccggtgtgcagcgccccgcaccgccccgcctcgcctgggagaagccgccgggacgcgccgggctggagtgggcggttataggctttgagctaggccgtttccgggaggcggagctcagaccccatttcctttctccacatccaggtcaggtggcgtttgctgtggcggctaggcccgcgtgcgctggagacctccgcgctggcccccgcgagcctcctgccctggcccggcgctgcggctctgccgcggcggcagcatgggtggcccccggggcgcgggctgggtggcggcgggcctgctgctcggcgcgggcgcctgctactgcatttacaggctgacccggggtcggcggcggggcgaccgcgagctcgggatacgctcttcgaagtccgcagaagacttaactgatggttcatatgatgatgttctaaatgctgaacaacttcagaaactcctttacctgctggagtcaacggaggatcctgtaattattgaaagagctttgattactttgggtaacaatgcagccttttcagttaaccaagctattattcgtgaattgggtggtattccaattgttgcaaacaaaatcaaccattccaaccagagtattaaagagaaagctttaaatgcactaaataacctgagtgtgaatgttgaaaatcaaatcaagataaagatatacatcagtcaagtatgtgaggatgtcttctctggtcctctgaactctgctgtgcagctggctggactgacattgttgacaaacatgactgttaccaatgaccaccagcacatgcttcacagttacattacagacctgttccaggtgttacttactggaaatggaaacacgaaggtgcaagttttgaaactgcttttgaatttgtctgaaaatccagccatgacagaaggacttctccgtgcccaagtggattcatcattcctttccctttatgacagccacgtagcaaaggagattcttcttcgagtacttacgctatttcagaatataaagaactgcctcaaaatagaaggccatttagctgtgcagcctactttcactgaaggttcattgtttttcctgttacatggagaagaatgtgcccagaaaataagagctttagttgatcaccatgatgcagaggtgaaggaaaaggttgtaacaataatacccaaaatctgattggtcatatttttccaaagagtaatgcagtctggatataaacgtattttctgtcttccttataaggggattctcccagctgctaaatttaaacagtaaatatcacattttgtcattaacacagctataacttgccgtggttctcagatttattttggactattttgatgccaagtgaatataagagcttgtactgaaaccatttatttctttctattttgctatttgcaaatgcttgttatcttccctacatgaagtggcagtaacctttttcacatttaagctacccttctaccttttgaagtgatttgcagttactcatctgagacagcatcagtatttgactaaatcattgtttcacaactgaatagtcttgttcttttagtagcaacgaaatcctaagctcttgaggccattcacctgccaacctgaccatactgctttcaaaagtcttttctcatcagtagaatctattttggtcacttctagtcaatgaaaaatgtaaacttttaggagagaatgtttcttaggactcacccactccattcaatgttatatataaaatagtgtgatcaatcacaatgtccatctttagacagttggttaaataaattatctggtctttgaaaagaccgtgctgggcgcggtggctcttgcctgtaatcccagcactttgggaggctgaggcgggcagatcacctgagatcgggagtttgagaccaagcctgaccaatatggagaaaccctgtctctactaagaacacaaaattagctgggcatggtggtgcatgcctgtaatcccagctacttgggaggccgaggcaggagaattgcttgaacccgggaggcagaggttgcagtgagctgagatagcgccattgcactccagcctgggcaacaagagcaaaactctgtctcaaaaaaaaaaaaaaatgatggagctccgaatgtgcttaagtggaaagatatctatgaaatatggtggttttttaaaacacaaaaattatagaatatgggatcccgtgtgtgtgtgtgtgtgtttgaatgaaaaatgcttatgtattgacagaacacttctagaatgatacccaaactcctggagtgggagtggggaatgccttctacgtacacactgttctactgtttgaattttttaatatgagcccaaattgtataatctttttttaataaaggggagaaaaatc

SEQ ID NO: 61051 - DNA, 927 bp, Artificial Sequence
  derived and/or modified sequence
atgggcggccccagaggcgccggctgggtggccgccggcctgctgctgggcgccggcgcctgctactgcatctacagactgaccagaggcagaagaagaggcgacagagagctgggcatcagaagcagcaagagcgccgaggacctgaccgacggcagctacgacgacgtgctgaacgccgagcagctgcagaagctgctgtacctgctggagagcaccgaggaccccgtgatcatcgagagagccctgatcaccctgggcaacaacgccgccttcagcgtgaaccaggccatcatcagagagctgggcggcatccccatcgtggccaacaagatcaaccacagcaaccagagcatcaaggagaaggccctgaacgccctgaacaacctgagcgtgaacgtggagaaccagatcaagatcaagatctacatcagccaggtgtgcgaggacgtgttcagcggccccctgaacagcgccgtgcagctggccggcctgaccctgctgaccaacatgaccgtgaccaacgaccaccagcacatgctgcacagctacatcaccgacctgttccaggtgctgctgaccggcaacggcaacaccaaggtgcaggtgctgaagctgctgctgaacctgagcgagaaccccgccatgaccgagggcctgctgagagcccaggtggacagcagcttcctgagcctgtacgacagccacgtggccaaggagatcctgctgagagtgctgaccctgttccagaacatcaagaactgcctgaagatcgagggccacctggccgtgcagcccaccttcaccgagggcagcctgttcttcctgctgcacggcgaggagtgcgcccagaagatcagagccctggtggaccaccacgacgccgaggtgaaggagaaggtggtgaccatcatccccaagatctag

SEQ ID NO: 61052 - protein, 284 aa, Artificial Sequence
  derived and/or modified sequence
MGGPRGAGWVAAGLLLGAGACYCIYRLTRGRRRGDRELGIRSSKSAGALEEGTSEGQLCGRSARPQTGGTWESQWSKTSQPEDLTDGSYDDVLNAEQLQKLLYLLESTEDPVIIERALITLGNNAAFSVNQAIIRELGGIPIVANKINHSNQSIKEKALNALNNLSVNVENQIKIKVQVLKLLLNLSENPAMTEGLLRAQVDSSFLSLYDSHVAKEILLRVLTLFQNIKNCLKIEGHLAVQPTFTEGSLFFLLHGEECAQKIRALVDHHDAEVKEKVVTIIPKI

SEQ ID NO: 61053 - DNA, 855 bp, Artificial Sequence
  derived and/or modified sequence
atggggggtcctaggggcgccggctgggttgccgccggactgctcttgggagccggggcgtgctactgtatatacaggctgacccggggacgaagaagaggggaccgggagctgggtatccggagctcgaagtctgcgggtgctttggaagaaggcaccagcgaaggacagttgtgcggcaggtccgcccgtcctcagactggcggcacctgggaatctcagtggtctaagacctctcagccggaggatcttactgatggtagttacgatgacgttctcaacgctgagcagctccaaaagctcctgtatctcctggaatctacggaggaccccgtcataattgaacgagccctgatcacgctgggcaacaacgctgcattctccgttaaccaagccatcattcgcgagttaggagggattcctatcgtcgctaacaagataaaccactctaaccagtccatcaaggaaaaggctttgaacgcgcttaataatttatcagtcaacgtggagaaccagattaagattaaggtgcaggtcctgaaattgctgctgaatctgtccgaaaaccctgccatgactgaaggactgcttcgagcccaggtagactcttcctttttatccctctatgattcccacgtcgctaaggagattctgctacgcgtgctgaccttgtttcaaaatatcaaaaattgcctcaaaattgaaggccaccttgccgtgcaacctaccttcaccgaaggatctttgttctttctcctgcacggcgaagaatgtgcccagaaaattagagccctggttgatcaccacgacgccgaagtgaaggagaaggtggttaccattatccctaagatctag

SEQ ID NO: 61054 - DNA, 855 bp, Artificial Sequence
  derived and/or modified sequence
atgggcggccccagaggagctggctgggtggccgccggcctgctgctgggcgctggggcctgctactgcatctaccgcctgacccggggcagaagaagaggagaccgggagctgggcatccgcagcagcaagtctgctggggccctggaggagggcaccagcgagggccagctgtgtggccgcagcgcccggccccagacaggaggcacctgggagagccagtggagcaagaccagccagcctgaggacctgacagatggcagctatgatgatgtgctgaatgctgagcagctgcagaagctgctgtacctgctggagagcacagaagatcctgtgatcatcgagcgggccctgatcaccctgggcaacaatgctgccttctctgtgaaccaggccatcatccgggagctgggcggcatccccatcgtggccaacaagatcaaccacagcaaccagagcatcaaggagaaggccctgaatgccctgaacaacctgtctgtgaatgtggagaaccagatcaagatcaaggtgcaggtgctgaagctgctgctgaacctgtctgagaacccagccatgacagagggcctgctgcgggcccaggtggacagcagcttcctgagcctgtatgacagccacgtggccaaggagatcctgctgcgggtgctgaccctcttccagaacatcaagaactgcctgaagattgagggccacctggccgtgcagcccaccttcacagagggcagcctcttcttcctgctgcacggggaggagtgtgcccagaagatccgggccctggtggaccaccatgatgctgaggtgaaggagaaggtggtgaccatcatccccaagatctag

SEQ ID NO: 61055 - DNA, 855 bp, Artificial Sequence
  derived and/or modified sequence
atgggcggcccccggggcgccggctgggtggccgccggcctgctgcttggcgctggcgcttgttattgcatctaccgtcttacaaggggcagaaggcggggcgaccgggagctgggcattcggtcctcgaagagcgctggtgctctggaagaaggtacatcagagggtcagctttgcgggcgctcagctaggcctcagactggcggaacatgggagtcacagtggagcaaaaccagtcagccagaggacctgaccgacggttcttatgatgatgttctgaatgcagaacagctgcaaaagttgctttacctgctggagtccaccgaagatccagttatcatcgaacgtgctttaataacactcggtaacaatgcagctttttccgtgaatcaggctattattcgcgagcttggaggcattcccattgttgccaacaagatcaaccattccaatcagtcgattaaagaaaaggcactcaacgctcttaacaatctatctgtcaacgtggaaaatcagattaagattaaggtgcaggtgttaaaactcctattgaacctgtctgagaacccagcgatgactgagggtctcctgagggcacaggttgattcctccttcctcagtctgtacgattctcacgtagctaaggagattctccttagggtgctgaccttgttccaaaacattaagaattgcctcaagattgaagggcacttggccgttcagccaacattcacagagggcagcctgttctttctcttacacggagaagaatgtgcccagaagatccgagctctggtggaccaccatgacgctgaagtaaaagagaaggtggtgaccatcattccaaagatttag

SEQ ID NO: 61056 - DNA, 855 bp, Artificial Sequence
  derived and/or modified sequence
atggggggacctagaggggcaggatgggtggctgccggtctcctcctgggcgcaggggcttgctactgtatctacagacttaccaggggcaggcggagaggcgaccgggagttgggcatccgctcctccaaatccgcaggggctctggaggaggggacatctgagggtcaattatgcggacgtagcgctaggccacagactggtggcacatgggaatctcaatggtcaaagacaagccagccagaagacttaaccgatggaagctatgacgatgtcttgaacgcagaacagctgcagaagctgttatacctgctggaaagcactgaggatcccgtcatcattgagagggctctgattacgctaggaaacaacgccgcttttagcgtgaaccaggccatcatccgcgagctcggcggtattcctattgtcgccaataagatcaaccattcaaatcagtcaataaaagaaaaggcattgaatgctctcaataacctctccgtgaatgtggagaatcaaataaagatcaaagttcaggtcctgaaactccttctgaacctttctgagaatccagctatgactgaggggctcctgcgggcacaggtggactctagctttctctctttgtacgactcccacgtagcgaaggagatcctcctgcgtgttcttacactctttcagaatattaaaaactgtctcaaaatagaaggccacctggctgtgcagccaaccttcaccgagggctctctcttttttctgttacatggcgaagagtgcgcccaaaagatccgtgccctcgtggaccaccacgatgccgaagtcaaggagaaagttgtcacaattattcctaagatctag

SEQ ID NO: 61057 - DNA, 2445 bp, Artificial Sequence
  derived and/or modified sequence
accgccccgcgctccgctgccaggggcgggagggaggaatggttgcttcacgccccgggggaagagacgggaagctcggctctgggttgcgggccccggcgtctccgcgtggggcgcaccgtccgacccccccctcccggtgtgcagcgccccgcaccgccccgcctcgcctgggagaagccgccgggacgcgccgggctggagtgggcggttataggctttgagctaggccgtttccgggaggcggagctcagaccccatttcctttctccacatccaggtcaggtggcgtttgctgtggcggctaggcccgcgtgcgctggagacctccgcgctggcccccgcgagcctcctgccctggcccggcgctgcggctctgccgcggcggcagcatgggtggcccccggggcgcgggctgggtggcggcgggcctgctgctcggcgcgggcgcctgctactgcatttacaggctgacccggggtcggcggcggggcgaccgcgagctcgggatacgctcttcgaagtccgcaggtgccctggaagaagggacgtcagagggtcagttgtgcgggcgctcggcccggcctcagacgggaggtacctgggagtcacagtggtccaagacctcgcagcctgaagacttaactgatggttcatatgatgatgttctaaatgctgaacaacttcagaaactcctttacctgctggagtcaacggaggatcctgtaattattgaaagagctttgattactttgggtaacaatgcagccttttcagttaaccaagctattattcgtgaattgggtggtattccaattgttgcaaacaaaatcaaccattccaaccagagtattaaagagaaagctttaaatgcactaaataacctgagtgtgaatgttgaaaatcaaatcaagataaaggtgcaagttttgaaactgcttttgaatttgtctgaaaatccagccatgacagaaggacttctccgtgcccaagtggattcatcattcctttccctttatgacagccacgtagcaaaggagattcttcttcgagtacttacgctatttcagaatataaagaactgcctcaaaatagaaggccatttagctgtgcagcctactttcactgaaggttcattgtttttcctgttacatggagaagaatgtgcccagaaaataagagctttagttgatcaccatgatgcagaggtgaaggaaaaggttgtaacaataatacccaaaatctgattggtcatatttttccaaagagtaatgcagtctggatataaacgtattttctgtcttccttataaggggattctcccagctgctaaatttaaacagtaaatatcacattttgtcattaacacagctataacttgccgtggttctcagatttattttggactattttgatgccaagtgaatataagagcttgtactgaaaccatttatttctttctattttgctatttgcaaatgcttgttatcttccctacatgaagtggcagtaacctttttcacatttaagctacccttctaccttttgaagtgatttgcagttactcatctgagacagcatcagtatttgactaaatcattgtttcacaactgaatagtcttgttcttttagtagcaacgaaatcctaagctcttgaggccattcacctgccaacctgaccatactgctttcaaaagtcttttctcatcagtagaatctattttggtcacttctagtcaatgaaaaatgtaaacttttaggagagaatgtttcttaggactcacccactccattcaatgttatatataaaatagtgtgatcaatcacaatgtccatctttagacagttggttaaataaattatctggtctttgaaaagaccgtgctgggcgcggtggctcttgcctgtaatcccagcactttgggaggctgaggcgggcagatcacctgagatcgggagtttgagaccaagcctgaccaatatggagaaaccctgtctctactaagaacacaaaattagctgggcatggtggtgcatgcctgtaatcccagctacttgggaggccgaggcaggagaattgcttgaacccgggaggcagaggttgcagtgagctgagatagcgccattgcactccagcctgggcaacaagagcaaaactctgtctcaaaaaaaaaaaaaaatgatggagctccgaatgtgcttaagtggaaagatatctatgaaatatggtggttttttaaaacacaaaaattatagaatatgggatcccgtgtgtgtgtgtgtgtgtttgaatgaaaaatgcttatgtattgacagaacacttctagaatgatacccaaactcctggagtgggagtggggaatgccttctacgtacacactgttctactgtttgaattttttaatatgagcccaaattgtataatctttttttaataaaggggag

SEQ ID NO: 61058 - DNA, 855 bp, Artificial Sequence
  derived and/or modified sequence
atgggcggccccagaggcgccggctgggtggccgccggcctgctgctgggcgccggcgcctgctactgcatctacagactgaccagaggcagaagaagaggcgacagagagctgggcatcagaagcagcaagagcgccggcgccctggaggagggcaccagcgagggccagctgtgcggcagaagcgccagaccccagaccggcggcacctgggagagccagtggagcaagaccagccagcccgaggacctgaccgacggcagctacgacgacgtgctgaacgccgagcagctgcagaagctgctgtacctgctggagagcaccgaggaccccgtgatcatcgagagagccctgatcaccctgggcaacaacgccgccttcagcgtgaaccaggccatcatcagagagctgggcggcatccccatcgtggccaacaagatcaaccacagcaaccagagcatcaaggagaaggccctgaacgccctgaacaacctgagcgtgaacgtggagaaccagatcaagatcaaggtgcaggtgctgaagctgctgctgaacctgagcgagaaccccgccatgaccgagggcctgctgagagcccaggtggacagcagcttcctgagcctgtacgacagccacgtggccaaggagatcctgctgagagtgctgaccctgttccagaacatcaagaactgcctgaagatcgagggccacctggccgtgcagcccaccttcaccgagggcagcctgttcttcctgctgcacggcgaggagtgcgcccagaagatcagagccctggtggaccaccacgacgccgaggtgaaggagaaggtggtgaccatcatccccaagatctag

SEQ ID NO: 61059 - protein, 284 aa, Artificial Sequence
  derived and/or modified sequence
MGGPRGAGWVAAGLLLGAGACYCIYRLTRGRRRGDRELGIRSSKSAEDLTDGSYDDVLNAEQLQKLLYLLESTEDPVIIERALITLGNNAAFSVNQAIIRELGGIPIVANKINHSNQSIKEKALNALNNLSVNVENQIKIKIYISQVCEDVFSGPLNSAVQLAGLTLLTNMTVTNDHQHMLHSYITDLFQVLLTGNGNTKVDSSFLSLYDSHVAKEILLRVLTLFQNIKNCLKIEGHLAVQPTFTEGSLFFLLHGEECAQKIRALVDHHDAEVKEKVVTIIPKI

SEQ ID NO: 61060 - DNA, 855 bp, Artificial Sequence
  derived and/or modified sequence
atgggaggaccccggggagcaggctgggtggccgcaggcctgcttctgggggccggagcttgctattgtatttacagactgactcgtggcaggaggaggggcgaccgtgaattggggatacgctcctctaaaagtgctgaggaccttacagacgggtcttatgatgatgtgctgaatgcagagcagctgcagaagttgctatacctactggaatctacggaggatcccgtgatcatagaaagagctctaattacgctggggaacaacgcagcattttcggtaaatcaggccattatcagagagctgggaggcattcccatcgttgcaaacaaaatcaatcactctaaccagagtattaaagagaaggccttgaatgccctcaataatctttcagtcaacgtggaaaaccagattaagataaaaatatatataagtcaggtatgcgaggacgtcttctcaggcccactgaactccgccgttcagttggccggtctgactctgctcacaaacatgactgtaacaaacgatcaccagcatatgctccactcttacatcaccgatttgttccaggttctccttaccggaaatgggaataccaaagtcgactcgtccttcttgtcgctatacgatagccatgtggcaaaggagatacttttgagggtgttaaccctatttcagaacattaaaaattgcctaaaaattgaaggccatctggccgtgcagccaacgttcacagaaggtagccttttctttctactccatggtgaggagtgcgcccagaagattcgagccctcgtcgatcaccacgacgcggaagtcaaggaaaaggtggttacaattataccaaagatttag

SEQ ID NO: 61061 - DNA, 855 bp, Artificial Sequence
  derived and/or modified sequence
atgggcggccccagaggagctggctgggtggccgccggcctgctgctgggcgctggggcctgctactgcatctaccgcctgacccggggcagaagaagaggagaccgggagctgggcatccgcagcagcaagtctgctgaggacctgacagatggcagctatgatgatgtgctgaatgctgagcagctgcagaagctgctgtacctgctggagagcacagaggaccccgtcatcatcgagcgggccctgatcaccctgggcaacaatgctgccttctctgtgaaccaggccatcatccgggagctgggcggcatccccatcgtggccaacaagatcaaccacagcaaccagagcatcaaggagaaggccctgaatgccctgaacaacctgtctgtgaatgtggagaaccagatcaagatcaagatctacatcagccaggtgtgtgaagatgtgttttctggccccctgaacagcgctgtgcagctggccggcctgaccctgctgaccaacatgacagtgaccaatgaccaccagcacatgctgcacagctacatcacagacctcttccaggtgctgctgactggaaatggaaacaccaaggtggacagcagcttcctgagcctgtatgacagccacgtggccaaggagatcctgctgcgggtgctgaccctcttccagaacatcaagaactgcctgaagattgagggccacctggccgtgcagcccaccttcacagagggcagcctcttcttcctgctgcacggggaggagtgtgcccagaagatccgggccctggtggaccaccatgatgctgaggtgaaggagaaggtggtgaccatcatccccaagatctag

SEQ ID NO: 61062 - DNA, 855 bp, Artificial Sequence
  derived and/or modified sequence
atgggcggcccccggggcgccggctgggtggccgccggcctgctgttgggcgccggcgcctgttactgtatttaccgtctaactcgcgggcgccgccggggggacagggaactcggcatccgctcttctaagtctgccgaggacctcacagatggttcatacgatgacgtgttaaacgctgagcaactccagaagctgctctatctgctggaatcaacagaggatccagtgatcatcgagcgagcacttattaccctggggaataatgctgccttttcagttaaccaggcgatcatccgagagttaggaggcatacctatcgtggccaataaaattaaccatagtaaccagtccattaaagaaaaggctctaaacgcattgaataatctgtctgtcaacgtggaaaaccagataaagattaagatctatatatcccaggtgtgcgaggatgtcttttcaggtcctctcaatagcgcggtacagctggcagggctgactctactcacgaacatgactgtcactaatgaccatcagcacatgcttcattcttacatcaccgacctgttccaggtgcttctgacgggcaacggaaacaccaaagtggactcttccttcttgtccctgtatgatagtcatgtagccaaagagatcttgcttagagtactaacattatttcagaatataaaaaactgccttaagatagaggggcatctggcggtgcagcctacgtttacagaaggcagccttttctttttgctgcatggtgaagagtgtgcccagaaaatccgcgcgctggtcgaccatcatgatgccgaagtcaaggagaaggttgtgaccattattcctaagatttag

SEQ ID NO: 61063 - DNA, 855 bp, Artificial Sequence
  derived and/or modified sequence
atgggaggaccgagaggagccggatgggtggcagcagggctactcttaggcgcaggcgcttgctattgcatctatcgccttacccgaggcagacgtcggggagatcgcgagctcggcatccggtctagcaagagtgctgaggacctcacagacgggtcctacgacgatgtcttaaatgctgagcagttgcagaagctgctttaccttctggagagcactgaggacccagtgatcattgagcgcgcactgatcaccctcgggaataacgcagccttctctgtgaaccaggccattatcagggaactcggagggattcccatcgtggcgaacaaaatcaaccactccaaccaatctatcaaagaaaaagcccttaatgccttgaacaatctgagcgtgaatgtggaaaaccaaattaagattaagatctacatttcccaggtatgtgaggatgtttttagtggccctctgaattctgcagttcagctggcaggattgacgctgttgactaatatgacggtcactaacgaccatcaacacatgctgcacagttatattacagatctgtttcaagtgctgctaaccggtaacggaaacaccaaagtcgatagcagctttttgtccctatacgatagtcatgttgccaaggaaatactcctgcgagtgttgactctgtttcaaaatatcaaaaactgcctaaaaattgagggacacctcgcagtccagcccacctttaccgaaggctccctgttctttctacttcacggggaagagtgtgctcagaagatccgggctcttgtcgaccaccacgacgcagaggtcaaagagaaggttgtcacaattattccgaaaatttag

SEQ ID NO: 61064 - DNA, 2443 bp, Artificial Sequence
  derived and/or modified sequence
accgccccgcgctccgctgccaggggcgggagggaggaatggttgcttcacgccccgggggaagagacgggaagctcggctctgggttgcgggccccggcgtctccgcgtggggcgcaccgtccgacccccccctcccggtgtgcagcgccccgcaccgccccgcctcgcctgggagaagccgccgggacgcgccgggctggagtgggcggttataggctttgagctaggccgtttccgggaggcggagctcagaccccatttcctttctccacatccaggtcaggtggcgtttgctgtggcggctaggcccgcgtgcgctggagacctccgcgctggcccccgcgagcctcctgccctggcccggcgctgcggctctgccgcggcggcagcatgggtggcccccggggcgcgggctgggtggcggcgggcctgctgctcggcgcgggcgcctgctactgcatttacaggctgacccggggtcggcggcggggcgaccgcgagctcgggatacgctcttcgaagtccgcagaagacttaactgatggttcatatgatgatgttctaaatgctgaacaacttcagaaactcctttacctgctggagtcaacggaggatcctgtaattattgaaagagctttgattactttgggtaacaatgcagccttttcagttaaccaagctattattcgtgaattgggtggtattccaattgttgcaaacaaaatcaaccattccaaccagagtattaaagagaaagctttaaatgcactaaataacctgagtgtgaatgttgaaaatcaaatcaagataaagatatacatcagtcaagtatgtgaggatgtcttctctggtcctctgaactctgctgtgcagctggctggactgacattgttgacaaacatgactgttaccaatgaccaccagcacatgcttcacagttacattacagacctgttccaggtgttacttactggaaatggaaacacgaaggtggattcatcattcctttccctttatgacagccacgtagcaaaggagattcttcttcgagtacttacgctatttcagaatataaagaactgcctcaaaatagaaggccatttagctgtgcagcctactttcactgaaggttcattgtttttcctgttacatggagaagaatgtgcccagaaaataagagctttagttgatcaccatgatgcagaggtgaaggaaaaggttgtaacaataatacccaaaatctgattggtcatatttttccaaagagtaatgcagtctggatataaacgtattttctgtcttccttataaggggattctcccagctgctaaatttaaacagtaaatatcacattttgtcattaacacagctataacttgccgtggttctcagatttattttggactattttgatgccaagtgaatataagagcttgtactgaaaccatttatttctttctattttgctatttgcaaatgcttgttatcttccctacatgaagtggcagtaacctttttcacatttaagctacccttctaccttttgaagtgatttgcagttactcatctgagacagcatcagtatttgactaaatcattgtttcacaactgaatagtcttgttcttttagtagcaacgaaatcctaagctcttgaggccattcacctgccaacctgaccatactgctttcaaaagtcttttctcatcagtagaatctattttggtcacttctagtcaatgaaaaatgtaaacttttaggagagaatgtttcttaggactcacccactccattcaatgttatatataaaatagtgtgatcaatcacaatgtccatctttagacagttggttaaataaattatctggtctttgaaaagaccgtgctgggcgcggtggctcttgcctgtaatcccagcactttgggaggctgaggcgggcagatcacctgagatcgggagtttgagaccaagcctgaccaatatggagaaaccctgtctctactaagaacacaaaattagctgggcatggtggtgcatgcctgtaatcccagctacttgggaggccgaggcaggagaattgcttgaacccgggaggcagaggttgcagtgagctgagatagcgccattgcactccagcctgggcaacaagagcaaaactctgtctcaaaaaaaaaaaaaaatgatggagctccgaatgtgcttaagtggaaagatatctatgaaatatggtggttttttaaaacacaaaaattatagaatatgggatcccgtgtgtgtgtgtgtgtgtttgaatgaaaaatgcttatgtattgacagaacacttctagaatgatacccaaactcctggagtgggagtggggaatgccttctacgtacacactgttctactgtttgaattttttaatatgagcccaaattgtataatctttttttaataaagggg

SEQ ID NO: 61065 - DNA, 855 bp, Artificial Sequence
  derived and/or modified sequence
atgggcggccccagaggcgccggctgggtggccgccggcctgctgctgggcgccggcgcctgctactgcatctacagactgaccagaggcagaagaagaggcgacagagagctgggcatcagaagcagcaagagcgccgaggacctgaccgacggcagctacgacgacgtgctgaacgccgagcagctgcagaagctgctgtacctgctggagagcaccgaggaccccgtgatcatcgagagagccctgatcaccctgggcaacaacgccgccttcagcgtgaaccaggccatcatcagagagctgggcggcatccccatcgtggccaacaagatcaaccacagcaaccagagcatcaaggagaaggccctgaacgccctgaacaacctgagcgtgaacgtggagaaccagatcaagatcaagatctacatcagccaggtgtgcgaggacgtgttcagcggccccctgaacagcgccgtgcagctggccggcctgaccctgctgaccaacatgaccgtgaccaacgaccaccagcacatgctgcacagctacatcaccgacctgttccaggtgctgctgaccggcaacggcaacaccaaggtggacagcagcttcctgagcctgtacgacagccacgtggccaaggagatcctgctgagagtgctgaccctgttccagaacatcaagaactgcctgaagatcgagggccacctggccgtgcagcccaccttcaccgagggcagcctgttcttcctgctgcacggcgaggagtgcgcccagaagatcagagccctggtggaccaccacgacgccgaggtgaaggagaaggtggtgaccatcatccccaagatctag

SEQ ID NO: 61066 - protein, 249 aa, Artificial Sequence
  derived and/or modified sequence
MGGPRGAGWVAAGLLLGAGACYCIYRLTRGRRRGDRELGIRSSKSAEDLTDGSYDDVLNAEQLQKLLYLLESTEDPVIIERALITLGNNAAFSVNQAIIRELGGIPIVANKINHSNQSIKEKALNALNNLSVNVENQIKIKVQVLKLLLNLSENPAMTEGLLRAQVDSSFLSLYDSHVAKEILLRVLTLFQNIKNCLKIEGHLAVQPTFTEGSLFFLLHGEECAQKIRALVDHHDAEVKEKVVTIIPKI

SEQ ID NO: 61067 - DNA, 750 bp, Artificial Sequence
  derived and/or modified sequence
atgggaggaccccggggcgctggttgggtggcagctgggctgctcttgggagcaggtgcttgctactgcatctacaggctgaccagagggaggcgtagaggcgacagagagttgggcataaggagcagcaaatctgcggaagaccttacagacggctcctacgacgatgtgctaaacgctgaacagcttcaaaaactgttgtatctcctcgagtccaccgaagatcccgtaataatagaaagggccttgatcactcttggtaacaatgcagccttctccgtcaatcaagcaatcatacgggagttgggaggcattccgatcgtagctaataaaatcaatcacagtaaccagtcgatcaaggaaaaggctctaaacgccctgaacaatttatccgttaatgtggagaaccagatcaagattaaggtgcaagtcctcaaattgctgctgaacctgtctgaaaatcccgcgatgacggagggtttgttgagggcccaagttgattcaagtttcctctctctgtacgacagccacgtagccaaggagatactcctgagagtattgacgctgttccagaacattaaaaactgtctgaagatcgaaggtcacttggccgtgcagcctacttttactgaaggctccctgttcttcttactccatggggaggaatgtgcacagaaaatccgggcacttgtggatcaccacgacgctgaggtaaaagaaaaagtggtgaccatcatccccaagatctag

SEQ ID NO: 61068 - DNA, 750 bp, Artificial Sequence
  derived and/or modified sequence
atgggcggccccagaggagctggctgggtggccgccggcctgctgctgggcgctggggcctgctactgcatctaccgcctgacccggggcagaagaagaggagaccgggagctgggcatccgcagcagcaagtctgctgaggacctgacagatggcagctatgatgatgtgctgaatgctgagcagctgcagaagctgctgtacctgctggagagcacagaggaccccgtcatcatcgagcgggccctgatcaccctgggcaacaatgctgccttctctgtgaaccaggccatcatccgggagctgggcggcatccccatcgtggccaacaagatcaaccacagcaaccagagcatcaaggagaaggccctgaatgccctgaacaacctgtctgtgaatgtggagaaccagatcaagatcaaggtgcaggtgctgaagctgctgctgaacctgtctgaaaatcctgccatgacagagggcctgctgcgggcccaggtggacagcagcttcctgagcctgtatgacagccacgtggccaaggagatcctgctgcgggtgctgaccctcttccagaacatcaagaactgcctgaagattgagggccacctggccgtgcagcccaccttcacagagggcagcctcttcttcctgctgcatggagaggagtgtgcccagaagatccgggccctggtggaccaccatgatgctgaggtgaaggagaaggtggtgaccatcatccccaagatctag

SEQ ID NO: 61069 - DNA, 750 bp, Artificial Sequence
  derived and/or modified sequence
atgggcggcccccggggcgccggctgggtggccgccggcctgctgctgggcgctggcgcatgttattgcatttacagactaaccagaggtaggaggcgcggggaccgtgagttaggcattcgctcttctaaatccgctgaggacttaactgatggttcttacgacgacgtgctgaacgcagagcaattacagaagcttctctatctcctggagagtaccgaggatccagtcatcattgagagagccctgatcacccttggcaacaacgctgcctttagcgtgaaccaggctattatcagagagcttgggggcataccaatcgtcgctaacaaaatcaaccacagcaaccagtccatcaaggaaaaggccctgaacgcgctgaataacctgagtgttaacgtagagaaccagatcaagatcaaggtccaagtgcttaagctgctacttaacctgtccgaaaatcctgcaatgactgagggcctgctaagggcccaagtcgactcctcattcctgagtctctatgatagccacgtagcgaaggagattctgctgcgggtgctgacacttttccagaatatcaaaaactgtctcaagatcgagggacatttggccgtgcagccaacattcacagaaggatcgctgttcttcctgttgcatggcgaagagtgtgctcagaagatacgggctttagtggaccatcacgatgccgaggtgaaggagaaagtggttactataattccgaaaatctag

SEQ ID NO: 61070 - DNA, 750 bp, Artificial Sequence
  derived and/or modified sequence
atgggtggacctcggggagcagggtgggtggccgcaggcctgctcctcggcgcaggcgcatgttactgcatctatcggttgacacgagggaggaggcgaggcgacagagagctgggcattagatcaagcaaatccgccgaggacctaacggacgggtcttatgatgatgttttgaacgcggagcagctacagaaactgctctatttactagaatcaactgaggaccctgtcataattgaacgcgctcttatcaccctgggcaacaacgccgctttctccgtgaatcaggccatcattcgggaactgggaggcataccaatagtagccaataagataaatcattcgaaccagagcattaaggaaaaagccctgaatgcgctcaacaatctttcggtaaacgtagaaaaccagattaaaattaaagttcaggtactgaagctgcttctgaacctatccgagaaccccgcaatgaccgaggggctgcttcgagcccaggtcgacagctcctttctcagcctatacgatagccacgtcgctaaggaaattctccttagggtgttgaccctgtttcagaatataaagaattgtctcaagatcgagggacacttggccgtgcagcccacgttcaccgaagggtctctattttttctcttacacggcgaggaatgcgcgcaaaaaatcagagctctcgttgatcatcacgacgccgaagtgaaagaaaaagtcgtcacaatcatccctaaaatctag

SEQ ID NO: 61071 - DNA, 2347 bp, Artificial Sequence
  derived and/or modified sequence
accgccccgcgctccgctgccaggggcgggagggaggaatggttgcttcacgccccgggggaagagacgggaagctcggctctgggttgcgggccccggcgtctccgcgtggggcgcaccgtccgacccccccctcccggtgtgcagcgccccgcaccgccccgcctcgcctgggagaagccgccgggacgcgccgggctggagtgggcggttataggctttgagctaggccgtttccgggaggcggagctcagaccccatttcctttctccacatccaggtcaggtggcgtttgctgtggcggctaggcccgcgtgcgctggagacctccgcgctggcccccgcgagcctcctgccctggcccggcgctgcggctctgccgcggcggcagcatgggtggcccccggggcgcgggctgggtggcggcgggcctgctgctcggcgcgggcgcctgctactgcatttacaggctgacccggggtcggcggcggggcgaccgcgagctcgggatacgctcttcgaagtccgcagaagacttaactgatggttcatatgatgatgttctaaatgctgaacaacttcagaaactcctttacctgctggagtcaacggaggatcctgtaattattgaaagagctttgattactttgggtaacaatgcagccttttcagttaaccaagctattattcgtgaattgggtggtattccaattgttgcaaacaaaatcaaccattccaaccagagtattaaagagaaagctttaaatgcactaaataacctgagtgtgaatgttgaaaatcaaatcaagataaaggtgcaagttttgaaactgcttttgaatttgtctgaaaatccagccatgacagaaggacttctccgtgcccaagtggattcatcattcctttccctttatgacagccacgtagcaaaggagattcttcttcgagtacttacgctatttcagaatataaagaactgcctcaaaatagaaggccatttagctgtgcagcctactttcactgaaggttcattgtttttcctgttacatggagaagaatgtgcccagaaaataagagctttagttgatcaccatgatgcagaggtgaaggaaaaggttgtaacaataatacccaaaatctgattggtcatatttttccaaagagtaatgcagtctggatataaacgtattttctgtcttccttataaggggattctcccagctgctaaatttaaacagtaaatatcacattttgtcattaacacagctataacttgccgtggttctcagatttattttggactattttgatgccaagtgaatataagagcttgtactgaaaccatttatttctttctattttgctatttgcaaatgcttgttatcttccctacatgaagtggcagtaacctttttcacatttaagctacccttctaccttttgaagtgatttgcagttactcatctgagacagcatcagtatttgactaaatcattgtttcacaactgaatagtcttgttcttttagtagcaacgaaatcctaagctcttgaggccattcacctgccaacctgaccatactgctttcaaaagtcttttctcatcagtagaatctattttggtcacttctagtcaatgaaaaatgtaaacttttaggagagaatgtttcttaggactcacccactccattcaatgttatatataaaatagtgtgatcaatcacaatgtccatctttagacagttggttaaataaattatctggtctttgaaaagaccgtgctgggcgcggtggctcttgcctgtaatcccagcactttgggaggctgaggcgggcagatcacctgagatcgggagtttgagaccaagcctgaccaatatggagaaaccctgtctctactaagaacacaaaattagctgggcatggtggtgcatgcctgtaatcccagctacttgggaggccgaggcaggagaattgcttgaacccgggaggcagaggttgcagtgagctgagatagcgccattgcactccagcctgggcaacaagagcaaaactctgtctcaaaaaaaaaaaaaaatgatggagctccgaatgtgcttaagtggaaagatatctatgaaatatggtggttttttaaaacacaaaaattatagaatatgggatcccgtgtgtgtgtgtgtgtgtttgaatgaaaaatgcttatgtattgacagaacacttctagaatgatacccaaactcctggagtgggagtggggaatgccttctacgtacacactgttctactgtttgaattttttaatatgagcccaaattgtataatctttttttaataaaggggagaaaaatc

SEQ ID NO: 61072 - DNA, 750 bp, Artificial Sequence
  derived and/or modified sequence
atgggcggccccagaggcgccggctgggtggccgccggcctgctgctgggcgccggcgcctgctactgcatctacagactgaccagaggcagaagaagaggcgacagagagctgggcatcagaagcagcaagagcgccgaggacctgaccgacggcagctacgacgacgtgctgaacgccgagcagctgcagaagctgctgtacctgctggagagcaccgaggaccccgtgatcatcgagagagccctgatcaccctgggcaacaacgccgccttcagcgtgaaccaggccatcatcagagagctgggcggcatccccatcgtggccaacaagatcaaccacagcaaccagagcatcaaggagaaggccctgaacgccctgaacaacctgagcgtgaacgtggagaaccagatcaagatcaaggtgcaggtgctgaagctgctgctgaacctgagcgagaaccccgccatgaccgagggcctgctgagagcccaggtggacagcagcttcctgagcctgtacgacagccacgtggccaaggagatcctgctgagagtgctgaccctgttccagaacatcaagaactgcctgaagatcgagggccacctggccgtgcagcccaccttcaccgagggcagcctgttcttcctgctgcacggcgaggagtgcgcccagaagatcagagccctggtggaccaccacgacgccgaggtgaaggagaaggtggtgaccatcatccccaagatctag

SEQ ID NO: 61073 - protein, 225 aa, Artificial Sequence
  derived and/or modified sequence
MGGPRGAGWVAAGLLLGAGACYCIYRLTRGRRRGDRELGIRSSKSAEDLTDGSYDDVLNAEQLQKLLYLLESTEDPVIIERALITLGNNAAFSVNQAIIRELGGIPIVANKINHSNQSIKEKALNALNNLSVNVENQIKIKVDSSFLSLYDSHVAKEILLRVLTLFQNIKNCLKIEGHLAVQPTFTEGSLFFLLHGEECAQKIRALVDHHDAEVKEKVVTIIPKI

SEQ ID NO: 61074 - DNA, 678 bp, Artificial Sequence
  derived and/or modified sequence
atgggaggcccgcgcggtgcaggctgggttgccgcgggcctgctgctcggagctggtgcctgctattgtatatatcgactgacacgtggacgccgacgtggcgatagagagttagggatcaggtcctctaagtccgcagaagacctgaccgacgggtcttacgacgacgtgcttaacgctgagcaattgcagaagttgctgtatttgctcgaatcaaccgaagaccctgtaattatagaaagagctctcatcacgttgggaaacaacgcagctttctccgtaaaccaagctatcattcgcgaactcgggggaattccaatcgtagctaataagattaatcactccaaccagtccatcaaggaaaaagcactgaatgcactgaacaatctctctgtcaatgtcgagaatcagattaaaatcaaggtggactcttctttcctgagcctgtacgatagtcatgtggctaaggaaatactactcagagtgctgaccctatttcagaatataaagaactgcctgaaaattgaaggccacctcgccgtacagccaacattcactgagggctctctcttctttctgctgcacggggaagagtgcgcccagaaaatccgcgcactggtggaccaccacgacgctgaggtgaaggaaaaggtggtgaccatcatccccaaaatatag

SEQ ID NO: 61075 - DNA, 678 bp, Artificial Sequence
  derived and/or modified sequence
atgggcggccccagaggagctggctgggtggccgccggcctgctgctgggcgctggggcctgctactgcatctaccgcctgacccggggcagaagaagaggagaccgggagctgggcatccgcagcagcaagtctgctgaggacctgacagatggcagctatgatgatgtgctgaatgctgagcagctgcagaagctgctgtacctgctggagagcacagaggaccccgtcatcatcgagcgggccctgatcaccctgggcaacaatgctgccttctctgtgaaccaggccatcatccgggagctgggcggcatccccatcgtggccaacaagatcaaccacagcaaccagagcatcaaggagaaggccctgaatgccctgaacaacctgtctgtgaatgtggagaaccagatcaagatcaaggtggacagcagcttcctgagcctgtatgacagccacgtggccaaggagatcctgctgcgggtgctgaccctcttccagaacatcaagaactgcctgaagattgagggccacctggccgtgcagcccaccttcacagagggcagcctcttcttcctgctgcatggagaggagtgtgcccagaagatccgggccctggtggaccaccatgatgctgaggtgaaggagaaggtggtgaccatcatccccaagatctag

SEQ ID NO: 61076 - DNA, 678 bp, Artificial Sequence
  derived and/or modified sequence
atgggcggcccccggggcgccggctgggtggccgccggcctgctgctgggcgcaggcgcctgctactgtatctatagactgacccgtggccgcaggcgtggcgatcgcgagctgggtatacgcagtagtaaaagcgccgaagatctcactgacgggtcttacgatgacgttctgaatgcagagcaactccagaaactcctttacttgctggaaagcacggaggacccagtgatcattgaaagggctcttatcactctaggcaacaacgccgcattctccgtaaaccaagcaattataagggagctgggaggtataccaattgtggccaataaaattaaccacagtaatcagtcgattaaagaaaaggcactgaatgccctgaataatctttctgtgaatgttgaaaaccagatcaagataaaggtggactctagcttcctttccttgtacgactctcatgtggctaaagagatactgttgcgcgtcctcacactgttccagaatatcaagaactgtttaaagatcgaaggacacctagctgttcagcccacgtttaccgagggaagtctgttcttcctgctccatggtgaagaatgtgcccaaaagattcgcgccctggttgaccatcacgatgcggaggtgaaggaaaaagtcgttacaatcatccctaagatctag

SEQ ID NO: 61077 - DNA, 678 bp, Artificial Sequence
  derived and/or modified sequence
atgggcggacctagaggtgcaggctgggtggccgcaggtctcctgctgggagccggagcctgctattgtatttaccgactgacaagaggaaggcgtagaggcgatagagagctcggcattaggagcagcaaatctgcagaggatctgacggatgggtcctatgacgacgtgctgaatgccgaacagctccagaaattgctgtatctcttggagagtactgaggaccccgtgatcatcgagcgagccctgatcactttgggcaacaatgccgctttctctgtgaaccaggctatcatccgggaacttggaggcatccccatcgttgcaaacaaaataaatcatagtaaccagtccatcaaagaaaaagccctgaatgctctcaacaacttgtccgtaaatgtggagaatcagataaagattaaggtggactcctcttttttgtccctatatgactctcatgtcgctaaagaaattctcttacgagttctgaccttgtttcagaatattaaaaactgtctaaaaattgagggacacctggccgtgcagccaacattcactgagggctcgcttttttttctgctccatggggaggagtgtgcacaaaagatcagggccctcgtagaccatcacgatgccgaagttaaggaaaaagtggttacaatcatcccaaaaatctag

SEQ ID NO: 61078 - DNA, 2266 bp, Artificial Sequence
  derived and/or modified sequence
accgccccgcgctccgctgccaggggcgggagggaggaatggttgcttcacgccccgggggaagagacgggaagctcggctctgggttgcgggccccggcgtctccgcgtggggcgcaccgtccgacccccccctcccggtgtgcagcgccccgcaccgccccgcctcgcctgggagaagccgccgggacgcgccgggctggagtgggcggttataggctttgagctaggccgtttccgggaggcggagctcagaccccatttcctttctccacatccaggtcaggtggcgtttgctgtggcggctaggcccgcgtgcgctggagacctccgcgctggcccccgcgagcctcctgccctggcccggcgctgcggctctgccgcggcggcagcatgggtggcccccggggcgcgggctgggtggcggcgggcctgctgctcggcgcgggcgcctgctactgcatttacaggctgacccggggtcggcggcggggcgaccgcgagctcgggatacgctcttcgaagtccgcagaagacttaactgatggttcatatgatgatgttctaaatgctgaacaacttcagaaactcctttacctgctggagtcaacggaggatcctgtaattattgaaagagctttgattactttgggtaacaatgcagccttttcagttaaccaagctattattcgtgaattgggtggtattccaattgttgcaaacaaaatcaaccattccaaccagagtattaaagagaaagctttaaatgcactaaataacctgagtgtgaatgttgaaaatcaaatcaagataaaggtggattcatcattcctttccctttatgacagccacgtagcaaaggagattcttcttcgagtacttacgctatttcagaatataaagaactgcctcaaaatagaaggccatttagctgtgcagcctactttcactgaaggttcattgtttttcctgttacatggagaagaatgtgcccagaaaataagagctttagttgatcaccatgatgcagaggtgaaggaaaaggttgtaacaataatacccaaaatctgattggtcatatttttccaaagagtaatgcagtctggatataaacgtattttctgtcttccttataaggggattctcccagctgctaaatttaaacagtaaatatcacattttgtcattaacacagctataacttgccgtggttctcagatttattttggactattttgatgccaagtgaatataagagcttgtactgaaaccatttatttctttctattttgctatttgcaaatgcttgttatcttccctacatgaagtggcagtaacctttttcacatttaagctacccttctaccttttgaagtgatttgcagttactcatctgagacagcatcagtatttgactaaatcattgtttcacaactgaatagtcttgttcttttagtagcaacgaaatcctaagctcttgaggccattcacctgccaacctgaccatactgctttcaaaagtcttttctcatcagtagaatctattttggtcacttctagtcaatgaaaaatgtaaacttttaggagagaatgtttcttaggactcacccactccattcaatgttatatataaaatagtgtgatcaatcacaatgtccatctttagacagttggttaaataaattatctggtctttgaaaagaccgtgctgggcgcggtggctcttgcctgtaatcccagcactttgggaggctgaggcgggcagatcacctgagatcgggagtttgagaccaagcctgaccaatatggagaaaccctgtctctactaagaacacaaaattagctgggcatggtggtgcatgcctgtaatcccagctacttgggaggccgaggcaggagaattgcttgaacccgggaggcagaggttgcagtgagctgagatagcgccattgcactccagcctgggcaacaagagcaaaactctgtctcaaaaaaaaaaaaaaatgatggagctccgaatgtgcttaagtggaaagatatctatgaaatatggtggttttttaaaacacaaaaattatagaatatgggatcccgtgtgtgtgtgtgtgtgtttgaatgaaaaatgcttatgtattgacagaacacttctagaatgatacccaaactcctggagtgggagtggggaatgccttctacgtacacactgttctactgtttgaattttttaatatgagcccaaattgtataatctttttttaataaagggg

SEQ ID NO: 61079 - DNA, 678 bp, Artificial Sequence
  derived and/or modified sequence
atgggcggccccagaggcgccggctgggtggccgccggcctgctgctgggcgccggcgcctgctactgcatctacagactgaccagaggcagaagaagaggcgacagagagctgggcatcagaagcagcaagagcgccgaggacctgaccgacggcagctacgacgacgtgctgaacgccgagcagctgcagaagctgctgtacctgctggagagcaccgaggaccccgtgatcatcgagagagccctgatcaccctgggcaacaacgccgccttcagcgtgaaccaggccatcatcagagagctgggcggcatccccatcgtggccaacaagatcaaccacagcaaccagagcatcaaggagaaggccctgaacgccctgaacaacctgagcgtgaacgtggagaaccagatcaagatcaaggtggacagcagcttcctgagcctgtacgacagccacgtggccaaggagatcctgctgagagtgctgaccctgttccagaacatcaagaactgcctgaagatcgagggccacctggccgtgcagcccaccttcaccgagggcagcctgttcttcctgctgcacggcgaggagtgcgcccagaagatcagagccctggtggaccaccacgacgccgaggtgaaggagaaggtggtgaccatcatccccaagatctag

SEQ ID NO: 61080 - protein, 692 aa, Artificial Sequence
  derived and/or modified sequence
MALVTLQRSPTPSAASSSASNSELEAGSEEDRKLNLSLSESFFMVKGAALFLQQGSSPQGQRSLQHPHKHAGDLPQHLQVMINLLRCEDRIKLAVRLESAWADRVRYMVVVYSSGRQDTEENILLGVDFSSKESKSCTIGMVLRLWSDTKIHLDGDGGFSVSTAGRMHIFKPVSVQAMWSALQVLHKACEVARRHNYFPGGVALIWATYYESCISSEQSCINEWNAMQDLESTRPDSPALFVDKPTEGERTERLIKAKLRSIMMSQDLENVTSKEIRNELEKQMNCNLKELKEFIDNEMLLILGQMDKPSLIFDHLYLGSEWNASNLEELQGSGVDYILNVTREIDNFFPGLFAYHNIRVYDEETTDLLAHWNEAYHFINKAKRNHSKCLVHCKMGVSRSASTVIAYAMKEFGWPLEKAYNYVKQKRSITRPNAGFMRQLSEYEGILDASKQRHNKLWRQQTDSSLQQPVDDPAGPGDFLPETPDGTPESQLPFLDDAAQPGLGPPLPCCFRRLSDPLLPSPEDETGSLVHLEDPEREALLEEAAPPAEVHRPARQPQQGSGLCEKDVKKKLEFGSPKGRSGSLLQVEETEREEGLGAGRWGQLPTQLDQNLLNSENLNNNSKRSCPNGMEVGRARPAGWHTPSLPSHSNWPTSASVVGTTGTRHHTQLIFFYCLLWAPSSHLQGPEGSFTG

SEQ ID NO: 61081 - DNA, 384 bp, Artificial Sequence
  derived and/or modified sequence
atgatctaccccctggacctgttccggaacatcccctggaagcaggggaagtgtttcgcctcactgagtcctgaaggggagcgagccttcgatggaatggaaccactatgccagccaggggcgcgaccggcgttacgagggttacagcacgcttcagactgctaccgactgctgagtcctcccggaagcgggcttgtgggcacgaatccaagcgtgccggcccccagtccacactgcggttgttgtcaagcctggtcaatatcaagctttacattcactggccctactccgttcaagataaattccgaccaggctaccccctgccacctccgatcgcctgagaccatctttcgccagcgggaaataagtaatgaggcgttttag

SEQ ID NO: 61082 - DNA, 444 bp, Artificial Sequence
  derived and/or modified sequence
atgggaggacgccatcatctccaaagacaagtgagtgagtcaatgtcggccctctttcaggcggtgcgactcgagtcagcctgggcagatcgagtgcgatacatggtcgtagtgtacagcagtggcagacaggatacggaggagaatattctattaggggtggatttctccagcaaagaaagcggtttctccgtgtcaactgctggccgtatgcacatttttaaaccggtctccgtgcaagccatgtggtctgcgctgcaggtgctgcacaaagcgtgtgaggtggcacgccggcacaattactttcccggcggcgttgcgctgatatgggctacttactacgagagttgcatcagcagtgagcaatcatgcatcaacgagtggaacgctatgcaggatctagagagcactcggcctgactcaccagccctctttgtagattag

SEQ ID NO: 61083 - DNA, 2079 bp, Artificial Sequence
  derived and/or modified sequence
atggctttagttactctgcagcgctcgcccacgccgtctgcagcttcgtccagcgcatccaacagcgagctggaggccggcagtgaggaagatcgtaaattaaatcttagcttgtcagaatccttttttatggtcaaaggagccgctcttttccttcagcagggatccagtcctcagggacagagatccctgcagcatcctcacaaacacgcaggcgatctgccgcagcacctacaggtgatgatcaatcttttacgatgcgaggatcggatcaagctggccgttagactcgaatcagcttgggccgatcgcgtaagatacatggtggtggtgtactccagtggcagacaggatactgaggagaatattcttctcggtgtggatttttcgtcgaaggagtctaaatcctgtaccattggcatggtgcttcggctgtggtctgacacaaaaattcacctggatggtgacggcggatttagcgtgagcacagctggcaggatgcatatctttaaacctgtgtctgtacaggcaatgtggagcgccttacaggtgctgcacaaggcctgcgaggtcgctaggcgacacaactattttcctggtggagtagccctgatctgggccacctactatgagtcatgcatcagcagcgaacagtcatgtatcaacgagtggaatgcgatgcaggacttggagtcaacccggccggattcgcccgcgctattcgtggataaacccaccgagggggagcgcaccgagagacttatcaaagctaagctccggtcaattatgatgagccaagatctcgaaaatgtaacgtcaaaggagatacgcaacgagctcgaaaagcaaatgaactgcaatttgaaggagctcaaagaatttatagataacgaaatgctactgatcctcggtcagatggacaaacccagcctgatctttgaccatctttatctcggatcagagtggaatgccagcaatttggaggagttgcagggctccggggtggattacattcttaatgtgacccgcgaaatcgacaactttttcccaggactgttcgcctatcacaatatccgggtgtatgacgaagaaactacagatctcctggcacattggaacgaagcctaccacttcattaacaaagctaaaaggaatcactccaagtgcctagtgcattgtaaaatgggcgtgtcccggtccgcttccacggttatcgcttatgccatgaaggaatttggctggccgctggagaaggcgtacaattacgtaaaacagaaacgtagcatcactagaccaaatgctggcttcatgaggcagctgtctgaatatgagggcatcctggacgcctctaagcagagacacaataaactgtggcgccagcaaactgattccagcctgcagcagcctgtggatgacccggccgggcctggtgactttctgcccgagacccccgacgggacccctgagtcccagctcccctttctcgatgatgccgcccagcctggtcttggtcccccactgccatgctgctttaggagactgagtgatccgctattgcccagtcccgaggatgagacagggagtctcgtgcatctagaggaccctgagagagaagctcttctggaagaagcggctcctcccgcagaggtccaccgtccagcgaggcagccccagcagggatcaggcctttgcgagaaggatgttaagaagaagctcgagtttggctctcccaaagggcgatcaggaagtctgctgcaggtagaggagacggaacgggaagagggactgggtgctggacgctggggacaactacccacccagctcgaccaaaatctgctgaactccgagaacctcaataacaactctaagcggtcctgccccaatggcatggaggttggcagagcccgaccggccggatggcacacccctagcctcccatcgcattccaattggccaacttccgcttcagtggtcgggacaaccggcaccaggcaccatacccagctgatctttttctactgcctcctgtgggccccctcctcccaccttcaaggacctgaggggagtttcaccggttag

SEQ ID NO: 61084 - DNA, 444 bp, Artificial Sequence
  derived and/or modified sequence
atgggcggccgccaccacctgcagaggcaggtgtctgagagcatgtctgccctcttccaggccgtgcggctggagagcgcctgggccgacagagtgcgctacatggtggtggtgtacagcagcggccggcaggacacagaggagaacatcctgctgggcgtggacttcagcagcaaggagagcggcttctctgtgtccacagctggccgcatgcacatcttcaagcctgtgtctgtgcaggccatgtggagcgccctgcaggtgctgcacaaggcctgtgaggtggcccggcggcacaactacttccctggaggagtggccctgatctgggccacctactatgagagctgcatcagcagcgagcagagctgcatcaatgagtggaatgccatgcaggacctggagagcaccaggccagacagccctgccctgtttgtggactag

SEQ ID NO: 61085 - DNA, 2079 bp, Artificial Sequence
  derived and/or modified sequence
atggccctggtgaccctgcagaggagccccaccccatctgctgccagcagcagcgccagcaacagcgagctggaggccggcagcgaggaggacaggaagctgaacctgagcctgtctgagagcttcttcatggtgaagggggccgccctcttcctgcagcagggcagcagcccccagggccagaggagcctgcagcacccccacaagcatgctggggacctgccccagcacctgcaggtgatgatcaacctgctgcgctgtgaggaccgcatcaagctggccgtgcggctggagagcgcctgggccgacagagtgcgctacatggtggtggtgtacagcagcggccggcaggacacagaggagaacatcctgctgggcgtggacttcagcagcaaggagagcaagagctgcaccatcggcatggtgctgcggctgtggagcgacaccaagatccacctggatggagatggcggcttctctgtgtccacagctggccgcatgcacatcttcaagcctgtgtctgtgcaggccatgtggagcgccctgcaggtgctgcacaaggcctgtgaggtggcccggcggcacaactacttccctggaggagtggccctgatctgggccacctactatgagagctgcatcagcagcgagcagagctgcatcaatgagtggaatgccatgcaggacctggagagcaccaggccagacagccctgccctgtttgtggacaagcccacagaaggagagaggacagagcggctcatcaaggccaagctgcggagcatcatgatgagccaggacctggagaatgtgaccagcaaggagatcagaaatgagctggagaagcagatgaactgcaacctgaaggagctgaaggagttcatcgacaatgagatgctgctgatcctgggccagatggacaagcccagcctcatctttgaccacctgtacctgggcagcgagtggaatgccagcaacctggaggagctgcagggcagcggcgtggactacatcctgaatgtgacccgggagattgacaacttcttccctggcctgtttgcctaccacaacatccgggtgtatgatgaggagaccacagacctgctggcccactggaatgaggcctaccacttcatcaacaaggccaagaggaaccacagcaagtgcctggtgcactgcaagatgggcgtgagccgcagcgccagcacagtgattgcctatgccatgaaggagtttggctggcccctggagaaggcctacaactacgtgaagcagaagaggagcatcacccggcccaatgccggcttcatgaggcagctgtctgaatatgagggcatcctggatgccagcaagcagaggcacaacaagctgtggaggcagcagacagacagcagcctgcagcagcctgtggatgatcctgctggccctggggacttcctgcctgagaccccagatggcaccccagagagccagctgcccttcctggatgatgctgcccagcccggcctgggcccccccctgccctgctgcttccggcggctgagtgaccccctgctgcccagcccagaagatgagaccggcagcctggtgcacctggaggaccctgagcgggaggccctgctggaggaggccgcccccccagctgaggtgcacaggcctgcccggcagccccagcagggcagcggcctgtgtgagaaggatgtgaagaagaagctggagtttggcagccccaagggccgcagcggcagcctgctgcaggtggaggagacagagcgggaggagggcctgggcgccggccgctggggccagctgcccacccagctggaccagaacctgctgaacagcgagaacctgaacaacaacagcaagaggagctgccccaacggcatggaggtgggccgggcccggcctgctggctggcacacccccagcctgcccagccacagcaactggcccaccagcgcctctgtggtgggcaccaccggcaccaggcaccacacccagctgatcttcttctactgcctgctgtgggcccccagcagccacctgcagggccctgagggcagcttcaccggctag

SEQ ID NO: 61086 - DNA, 444 bp, Artificial Sequence
  derived and/or modified sequence
atgggcggccggcaccacctgcagcggcaggtgagcgagagcatgagcgcactgtttcaggcagttcggctagagagcgcctgggccgaccgcgttcggtatatggttgtcgtttacagcagcggcagacaagatacggaagagaacattctgctcggagttgacttcagctccaaggaatccgggttttctgtctccaccgcaggaaggatgcacatcttcaagccggtgtctgttcaagcgatgtggagcgctctccaggtcctgcacaaggcctgcgaagtggctagacgtcacaattacttcccgggtggcgtggcattaatttgggccacatactacgaaagttgcatttctagcgagcagtcctgcattaatgagtggaacgctatgcaggatctggagtccactcgacctgacagtccggcgctcttcgtcgattag

SEQ ID NO: 61087 - DNA, 2079 bp, Artificial Sequence
  derived and/or modified sequence
atggccctggtgaccctgcagcggagccccacccccagcgccgccagctcctcagcctccaactccgagcttgaggctgggtcagaggaggaccgcaaactcaacctatccttgagcgagagcttctttatggtgaagggagcggccctgtttctgcagcaggggagttcacctcaggggcagaggtcgttacaacacccacacaaacatgctggagacttgccccagcatctacaagtgatgattaacctgctcaggtgcgaggacagaatcaaattggccgtcaggttggaatccgcttgggccgacagggtcagatacatggtagtggtatattcttctggcagacaggacaccgaggagaatatcctgctgggtgttgacttttcatccaaagagagcaagagctgtaccattggaatggtcctacgtctatggagcgataccaaaattcacctagacggggacggaggattcagcgtcagtaccgcaggtagaatgcatattttcaagccggtcagcgtccaagccatgtggagcgctctccaagttctgcacaaggcttgcgaggtggcccgaaggcataattactttcctgggggtgtggccctcatatgggcgacctattatgagagttgcataagctcggagcagagctgcatcaacgagtggaacgcaatgcaggatttggagtctactcggccagactccccagctttgttcgtagataagccaaccgaaggggaaagaactgagagactcataaaggctaagctgaggagtattatgatgagccaggacctcgaaaacgttacatctaaggaaatacgaaatgaacttgagaaacagatgaactgtaacctgaaagaacttaaagagtttattgacaacgagatgctgcttatcttgggacaaatggacaaacccagtctgatcttcgaccacctgtatctggggtcagaatggaatgcatccaatctggaggagttgcaggggagcggggtggattacatcctgaacgtaactcgtgaaattgataatttctttcctggtctgttcgcatatcataatatcagagtgtatgacgaggagaccaccgatctgcttgctcactggaacgaagcataccattttattaacaaagcgaagcgaaaccatagcaaatgcctggtccattgtaaaatgggcgtaagtcggtcggcttctacagtgatcgcgtatgcaatgaaggaatttggctggcctctggagaaagcttacaactatgttaagcagaagcgctctattaccaggccaaatgcgggatttatgcgacagttgtcagagtatgaggggatcctggatgccagcaaacagaggcataacaagctatggaggcagcagaccgatagttcgctgcagcagcccgtagatgatcctgctgggccaggggatttcctgcccgaaacccccgacggcacccctgagtctcagctgccatttctggacgacgccgctcagccaggattgggcccccccctgccatgctgtttccgcagactgtcagacccgctgttgccctctccagaggatgagaccgggtctttggtacacctagaggatcctgaaagggaggccctgttggaggaggcagcccctccagctgaggtacaccgaccggcacgccagccccagcagggaagtgggctctgtgagaaggacgtgaagaagaagctggagttcggctctccgaaagggagaagcgggagcttgctacaggtagaagagactgagcgagaagagggcttgggggcaggtagatggggccagctgccaactcagcttgaccagaatctgctgaactcggaaaatcttaacaacaattccaagcgatcctgcccaaacggaatggaggtgggtagagctcgacctgccggatggcacactccgtccctaccatcccattcaaactggcctacctctgcctcagtagttgggaccacaggcacccggcatcatactcagctgatttttttttattgtctgctttgggcaccatccagccatctgcagggacccgaaggaagcttcacagggtag

SEQ ID NO: 61088 - DNA, 444 bp, Artificial Sequence
  derived and/or modified sequence
atgggcggtcggcaccacctgcaacgacaggtgagcgagagcatgtctgctctattccaggcagtgcgtctcgagagcgcttgggcggaccgcgttcggtatatggttgtggtgtacagctctggcagacaagataccgaagaaaatatcttgctcggtgttgacttttcttcaaaagagtccggcttcagcgtcagcacagccggtcgaatgcacatttttaagccagttagcgtccaggctatgtggtccgctctgcaggttctgcataaagcttgtgaagtggccaggcggcacaattattttcccggaggcgtggccttgatctgggccacctactatgagtcctgcatatcaagtgagcagtcatgcattaatgagtggaatgcaatgcaagatctggagtcaacccgccctgactcaccagctctgttcgttgactag

SEQ ID NO: 61089 - DNA, 2079 bp, Artificial Sequence
  derived and/or modified sequence
atggctcttgtgaccctgcaacgcagtccgaccccatctgctgcttcctctagcgctagcaatagcgagcttgaagccggttccgaggaagacaggaagctcaacctctcactcagcgagtccttcttcatggtgaagggagccgcactattcctgcagcagggctcctccccacagggacagagaagtttacagcatcctcataaacacgctggcgacctcccccagcatttgcaggtcatgataaatctgcttcggtgtgaagacaggataaagctggcggttcggctggagtcagcatgggccgatagagtgcgctacatggtggttgtgtacagcagcggcaggcaagatacagaagaaaacattcttcttggcgtggacttctcgagtaaggagagcaagtcttgcaccattggcatggtcctccgcttgtggagtgatactaaaatccatctggatggcgacggaggtttttctgttagtacagcgggacgcatgcacatttttaaacctgtttctgtacaggcaatgtggtctgctctccaggtgttgcacaaggcctgtgaggtggcccgacgccataactatttccctgggggagtagccctcatctgggccacgtattatgaatcttgtatttccagcgaacagtcgtgtatcaacgagtggaatgccatgcaggacctcgagtccacacgtccagattcacctgccctttttgttgacaaacccaccgagggagagcggactgaaagactgatcaaagcaaaactgcgcagtatcatgatgtcccaggacctggagaatgtaacatctaaagagatccgaaacgaactggagaagcagatgaactgcaatcttaaggagttgaaggaatttatcgataatgagatgttgcttatcttagggcaaatggacaagccctcactgatattcgaccatttgtacctgggctccgaatggaacgcatccaacttggaagagctgcaggggagcggtgtggattatatcctgaacgtgactagagaaatcgacaacttttttcctggcctgttcgcttaccataatattagagtgtatgacgaggagacgaccgacctgcttgcacattggaacgaggcttaccacttcattaacaaagcaaagaggaatcattccaagtgtcttgtccactgtaagatgggcgtcagtcgctccgcgtcaaccgtgatcgcctatgccatgaaagaatttgggtggccgcttgagaaggcctacaattatgtaaagcagaaaaggtcaatcacccgaccaaatgctggttttatgcggcaactctctgagtacgaaggcattctcgacgcttcaaaacagaggcacaacaagctttggagacaacagacagatagcagcctgcagcagccagttgacgaccctgctgggccaggtgatttcttgcccgaaacacctgatggcacgcctgagtcccaacttcctttcttggatgatgcagctcaaccagggttgggaccacctctgccctgctgtttcagacgactgtccgatccactcctgcccagccccgaggacgaaactggaagcctcgttcatttggaggaccccgaaagggaagccttgctcgaggaagcagctcccccagccgaagtgcacaggcctgcacggcagcctcagcagggcagcggcttgtgcgagaaagacgtaaaaaagaaactggagttcggatcccctaagggacgctccggcagtcttttgcaggtagaggaaaccgagcgcgaggagggccttggagcgggtcgttggggacagctgccgacccaacttgaccagaatttgctgaactctgaaaatctcaataataatagcaaacgcagctgtccaaatggtatggaggtgggcagggccaggcctgctgggtggcacacaccctccttgccctcacatagcaattggcctacatccgcatctgtggttgggactaccgggacccggcaccatactcaactcatctttttttattgcctcctgtgggcaccatcttcccatctgcaggggcctgaggggtcctttacaggctag

SEQ ID NO: 61090 - DNA, 2354 bp, Artificial Sequence
  derived and/or modified sequence
cggctccaggaggccccgggcccggcccgggcggcggtggcggtggcggctctagctcgagacgtctgtggcgccctcgcaccgcgccgcagccatggccctggtgaccctgcagcgctcgcccacgcccagcgccgcctcctcctcggccagcaacagcgagttggaggctggcagcgaagaagatcgaaaattaaacctcagcttaagtgagagctttttcatggtgaaaggcgcagccctcttcttacaacagggaagcagccctcaaggccagcggagtcttcagcacccccacaagcatgcaggtgatctgcctcaacatcttcaggtgatgatcaaccttctgcgttgcgaagacagaatcaagctggcagtgcgcctggagagcgcctgggcggaccgggtccggtacatggtggtggtgtacagcagcgggcgccaggacaccgaggagaatatcttgctgggagtggacttttccagtaaggaaagtaaaagctgcaccattgggatggttctccgactgtggagcgacacgaaaatccaccttgatggagatggtgggttcagcgtgagcacagcaggaaggatgcacatatttaagcctgtgtctgtccaggccatgtggtctgccctgcaggtgcttcacaaggcctgcgaagtggcccggaggcacaactacttccccgggggtgtagctctcatctgggctacctactatgagagctgcatcagctccgagcagagctgcatcaacgagtggaacgccatgcaggacctggagtctacgcggcccgactcccccgcgctatttgtggacaagcccactgaaggggaaaggaccgagcgcctcatcaaagccaagctccgaagcatcatgatgagccaggatctagaaaatgtgacttccaaagagattcgtaatgaattagagaaacagatgaattgtaacttgaaggaactcaaggaatttatagacaatgagatgctacttatcttgggacagatggacaagccctcccttatcttcgatcatctttatctcggctctgaatggaatgcatccaatctggaggaactgcagggctcaggggttgattacattttaaatgttaccagagaaatcgataatttttttcctggcttatttgcatatcataacatccgagtctacgatgaagagaccacagacctcctcgcccactggaatgaagcgtatcattttataaacaaagcgaagaggaaccattccaagtgcctggtgcattgcaaaatgggcgtgagtcgctcggcctccacagtcatagcctatgcaatgaaggaattcggctggcctctggaaaaagcatataactatgtaaagcagaagcgcagcatcacgcgccccaacgcgggctttatgaggcagctgtctgagtatgaaggcatcttggatgcaagcaaacagcggcacaacaagctgtggcgtcagcagacagacagcagcctccagcagcctgtggatgaccctgcaggacctggcgacttcttgccagagaccccagatggcaccccggaaagccagctgcccttcttggatgatgccgcccagcccggcttagggccccccctcccctgctgtttccggcgactctcagacccccttctgccttcccctgaggatgaaactggcagcttggtccacctggaggatccggagagggaggctctgttggaggaagctgctccacctgcagaggtgcacaggccggccagacagccccagcaaggttccggactctgtgagaaggatgtgaagaagaaactagagtttgggagtcccaaaggtcggagcggctccttgctgcaggtggaggagacggaaagggaggagggcctgggagcagggaggtgggggcagcttccaacccagctcgatcaaaacctgctcaactcggagaacctaaacaacaacagcaagaggagctgtcccaacggcatggaggtaggcagagcccggcctgcagggtggcacaccccatcccttccatcccactctaattggcctacctcagcctctgtagtagggactacaggcacccgccaccacacccagctgatttttttctattgtctcctctgggcccccagctcccatctccagggacctgagggttctttcacagggtgattctgctggtgggtacgtagtgcataccttatatagcaaattgagaatctgttgggaataacacatatctctgcacaccatcttcaccccatgtaccttattcataccctgggcagggcttccaactcaatttctttttgtgtatgtaaaattaaaacatataatttatcagccaacttca

SEQ ID NO: 61091 - DNA, 444 bp, Artificial Sequence
  derived and/or modified sequence
atgggcggcagacaccacctgcagagacaggtgagcgagagcatgagcgccctgttccaggccgtgagactggagagcgcctgggccgacagagtgagatacatggtggtggtgtacagcagcggcagacaggacaccgaggagaacatcctgctgggcgtggacttcagcagcaaggagagcggcttcagcgtgagcaccgccggcagaatgcacatcttcaagcccgtgagcgtgcaggccatgtggagcgccctgcaggtgctgcacaaggcctgcgaggtggccagaagacacaactacttccccggcggcgtggccctgatctgggccacctactacgagagctgcatcagcagcgagcagagctgcatcaacgagtggaacgccatgcaggacctggagagcaccagacccgacagccccgccctgttcgtggactag

SEQ ID NO: 61092 - DNA, 2079 bp, Artificial Sequence
  derived and/or modified sequence
atggccctggtgaccctgcagagaagccccacccccagcgccgccagcagcagcgccagcaacagcgagctggaggccggcagcgaggaggacagaaagctgaacctgagcctgagcgagagcttcttcatggtgaagggcgccgccctgttcctgcagcagggcagcagcccccagggccagagaagcctgcagcacccccacaagcacgccggcgacctgccccagcacctgcaggtgatgatcaacctgctgagatgcgaggacagaatcaagctggccgtgagactggagagcgcctgggccgacagagtgagatacatggtggtggtgtacagcagcggcagacaggacaccgaggagaacatcctgctgggcgtggacttcagcagcaaggagagcaagagctgcaccatcggcatggtgctgagactgtggagcgacaccaagatccacctggacggcgacggcggcttcagcgtgagcaccgccggcagaatgcacatcttcaagcccgtgagcgtgcaggccatgtggagcgccctgcaggtgctgcacaaggcctgcgaggtggccagaagacacaactacttccccggcggcgtggccctgatctgggccacctactacgagagctgcatcagcagcgagcagagctgcatcaacgagtggaacgccatgcaggacctggagagcaccagacccgacagccccgccctgttcgtggacaagcccaccgagggcgagagaaccgagagactgatcaaggccaagctgagaagcatcatgatgagccaggacctggagaacgtgaccagcaaggagatcagaaacgagctggagaagcagatgaactgcaacctgaaggagctgaaggagttcatcgacaacgagatgctgctgatcctgggccagatggacaagcccagcctgatcttcgaccacctgtacctgggcagcgagtggaacgccagcaacctggaggagctgcagggcagcggcgtggactacatcctgaacgtgaccagagagatcgacaacttcttccccggcctgttcgcctaccacaacatcagagtgtacgacgaggagaccaccgacctgctggcccactggaacgaggcctaccacttcatcaacaaggccaagagaaaccacagcaagtgcctggtgcactgcaagatgggcgtgagcagaagcgccagcaccgtgatcgcctacgccatgaaggagttcggctggcccctggagaaggcctacaactacgtgaagcagaagagaagcatcaccagacccaacgccggcttcatgagacagctgagcgagtacgagggcatcctggacgccagcaagcagagacacaacaagctgtggagacagcagaccgacagcagcctgcagcagcccgtggacgaccccgccggccccggcgacttcctgcccgagacccccgacggcacccccgagagccagctgcccttcctggacgacgccgcccagcccggcctgggcccccccctgccctgctgcttcagaagactgagcgaccccctgctgcccagccccgaggacgagaccggcagcctggtgcacctggaggaccccgagagagaggccctgctggaggaggccgccccccccgccgaggtgcacagacccgccagacagccccagcagggcagcggcctgtgcgagaaggacgtgaagaagaagctggagttcggcagccccaagggcagaagcggcagcctgctgcaggtggaggagaccgagagagaggagggcctgggcgccggcagatggggccagctgcccacccagctggaccagaacctgctgaacagcgagaacctgaacaacaacagcaagagaagctgccccaacggcatggaggtgggcagagccagacccgccggctggcacacccccagcctgcccagccacagcaactggcccaccagcgccagcgtggtgggcaccaccggcaccagacaccacacccagctgatcttcttctactgcctgctgtgggcccccagcagccacctgcagggccccgagggcagcttcaccggctag

SEQ ID NO: 61093 - protein, 703 aa, Artificial Sequence
  derived and/or modified sequence
MARARRAVVGSVRDVSTAATNLFYFTDFCIFLQPTHCFCCPEVSSSNYLSESFFMVKGAALFLQQGSSPQGQRSLQHPHKHAGDLPQHLQVMINLLRCEDRIKLAVRLESAWADRVRYMVVVYSSGRQDTEENILLGVDFSSKESKSCTIGMVLRLWSDTKIHLDGDGGFSVSTAGRMHIFKPVSVQAMWSALQVLHKACEVARRHNYFPGGVALIWATYYESCISSEQSCINEWNAMQDLESTRPDSPALFVDKPTEGERTERLIKAKLRSIMMSQDLENVTSKEIRNELEKQMNCNLKELKEFIDNEMLLILGQMDKPSLIFDHLYLGSEWNASNLEELQGSGVDYILNVTREIDNFFPGLFAYHNIRVYDEETTDLLAHWNEAYHFINKAKRNHSKCLVHCKMGVSRSASTVIAYAMKEFGWPLEKAYNYVKQKRSITRPNAGFMRQLSEYEGILDASKQRHNKLWRQQTDSSLQQPVDDPAGPGDFLPETPDGTPESQLPFLDDAAQPGLGPPLPCCFRRLSDPLLPSPEDETGSLVHLEDPEREALLEEAAPPAEVHRPARQPQQGSGLCEKDVKKKLEFGSPKGRSGSLLQVEETEREEGLGAGRWGQLPTQLDQNLLNSENLNNNSKRSCPNGMEVGRARPAGWHTPSLPSHSNWPTSASVVGTTGTRHHTQLIFFYCLLWAPSSHLQGPEGSFTG

SEQ ID NO: 61094 - DNA, 2112 bp, Artificial Sequence
  derived and/or modified sequence
atggctcgcgctcgtcgggccgtggttggtagcgtcagagacgtgtccacagccgccaccaatttattctactttacagacttttgcattttcctgcaacccacacattgtttctgttgccctgaggtgtccagctctaattaccttagtgaatctttcttcatggtgaaaggcgcggccctgtttcttcagcagggtagttcacctcaggggcagcgctctctccagcatccacataagcacgcaggcgatctccctcagcacttgcaggtcatgattaacctgctgcggtgcgaggaccggatcaagcttgcagtgagattagagtcagcgtgggccgatagagttagatacatggtggtggtctattcaagtggaagacaggatactgaggaaaacatccttctgggagtggacttcagctccaaagaatccaaaagctgcacaattggtatggtgcttaggctgtggtccgataccaaaattcacttagacggcgatggcggcttttccgtgtcaacagctggacgaatgcatatatttaaaccggtatcagttcaagccatgtggtcagctctacaggtgctccataaggcgtgtgaagttgccaggaggcataactacttccccggcggggtagccctaatttgggccacttactacgagtcctgcatctcgtccgagcagtcgtgtataaacgagtggaacgccatgcaagacctcgaatcaacaagacccgattcacctgcactgtttgttgacaagcctactgaaggagaacgaaccgagcgactcatcaaagctaagttgcgttcaatcatgatgtctcaggatctggagaacgtgaccagcaaagaaatccggaatgagctcgagaagcagatgaactgcaatctgaaagagctcaaagagttcatcgataacgaaatgctcctgattttggggcagatggacaaacctagcttaatctttgaccatctgtacctggggtctgagtggaacgcctctaacctagaagagctgcagggcagtggggtggactatattcttaatgttaccagggagatagataactttttccctgggctcttcgcctatcacaacattagagtctatgatgaggagaccactgatctgctcgcacattggaatgaagcctaccatttcattaacaaagccaagcggaatcacagtaaatgcctggttcactgcaagatgggcgtgagcagaagcgcatccaccgtaatcgcctacgccatgaaggaatttggctggcccctagagaaagcgtacaactacgtaaaacaaaagcgatctattactcggcctaacgcaggattcatgagacaactgtctgaatacgaaggcatactggatgcctccaagcagaggcataacaaactttggcgtcagcagactgacagctctttgcagcagccagtcgacgaccctgctgggcccggcgatttcctgcccgaaacgcccgatgggactcctgagtcccagctaccctttctggatgatgctgctcagccagggctaggacctcccctgccttgctgtttccggcgcctcagcgacccactgctccctagcccagaagacgaaacagggagcctggtgcaccttgaggacccagagcgtgaggccctcctggaggaggccgcaccacccgctgaagtccaccggccagcacgccagccccagcaggggagcggcctctgtgagaaagatgtcaaaaaaaaactagaattcggctccccaaaggggcgcagtggctcattgctgcaagtagaagaaactgagagggaggaagggctcggagcaggtaggtggggacagctgcccactcagctcgatcaaaaccttctcaactccgagaatctcaacaataacagcaagcgttcttgtccgaatggcatggaggtgggaagggctagacctgctggctggcacactccgagtctcccgtctcacagtaactggcccaccagtgcttccgtagtcggtactactggcacccggcaccacactcagctgatattcttctattgtctactctgggccccgtcaagccatcttcagggccctgaggggtccttcaccggctag

SEQ ID NO: 61095 - DNA, 2112 bp, Artificial Sequence
  derived and/or modified sequence
atggcccgggccaggagagctgtggtgggctctgtgagagatgtgtccacagctgccaccaacctcttctacttcacagacttctgcatcttcctgcagcccacccactgcttctgctgcccagaggtgagcagcagcaactacctgtctgagagcttcttcatggtgaagggagctgccctcttcctgcagcagggcagcagcccccagggccagaggagcctgcagcacccccacaagcacgccggggacctgccccagcacctgcaggtgatgatcaacctgctgcgctgtgaagatcgcatcaagctggccgtgcggctggagagcgcctgggccgacagagtgcgctacatggtggtggtgtacagcagcggccggcaggacacagaggagaacatcctgctgggcgtggacttcagcagcaaggagagcaagagctgcaccatcggcatggtgctgcggctgtggagcgacaccaagatccacctggatggagatggcggcttctctgtgtccacagctggccgcatgcacatcttcaagcctgtgtctgtgcaggccatgtggagcgccctgcaggtgctgcacaaggcctgtgaggtggcccggcggcacaactacttccctgggggcgtggccctgatctgggccacctactatgagagctgcatcagcagcgagcagagctgcatcaatgagtggaatgccatgcaggacctggagagcaccaggccagacagccctgccctgtttgtggacaagcccacagaaggagagaggacagagcggctcatcaaggccaagctgcggagcatcatgatgagccaggacctggagaatgtgaccagcaaggagatcagaaatgagctggagaagcagatgaactgcaacctgaaggagctgaaggagttcatcgacaatgagatgctgctgatcctgggccagatggacaagcccagcctcatctttgaccacctgtacctgggcagcgagtggaatgccagcaacctggaggagctgcagggcagcggcgtggactacatcctgaatgtgacccgggagattgacaacttcttccctggcctgtttgcctaccacaacatccgggtgtatgatgaggagaccacagacctgctggcccactggaatgaggcctaccacttcatcaacaaggccaagaggaaccacagcaagtgcctggtgcactgcaagatgggcgtgagccgcagcgccagcaccgtcatcgcctatgccatgaaggagtttggctggcccctggagaaggcctacaactacgtgaagcagaagaggagcatcacccggcccaatgccggcttcatgaggcagctgtctgaatatgagggcatcctggatgccagcaagcagaggcacaacaagctgtggaggcagcagacagacagcagcctgcagcagcctgtggatgatcctgctggccctggggacttcctgcctgagaccccagatggcaccccagagagccagctgcccttcctggatgatgctgcccagcccggcctgggcccccccctgccctgctgcttccggcggctgagtgaccccctgctgcccagcccagaagatgaaacaggcagcctggtgcacctggaggaccctgagcgggaggccctgctggaggaggccgcccctcctgctgaggtgcacaggcctgcccggcagccccagcagggcagcggcctgtgtgagaaggatgtgaagaagaagctggagtttggcagccccaagggccgcagcggcagcctgctgcaggtggaggagacagagcgggaggagggcctgggcgccggccgctggggccagctgcccacccagctggaccagaacctgctgaacagcgagaacctgaacaacaacagcaagaggagctgccccaacggcatggaggtgggccgggcccggcctgctggctggcacacccccagcctgcccagccacagcaactggcccaccagcgcctctgtggtgggcaccaccggcaccaggcaccacacccagctgatcttcttctactgcctgctgtgggcccccagcagccacctgcagggccctgagggcagcttcaccggctag

SEQ ID NO: 61096 - DNA, 2112 bp, Artificial Sequence
  derived and/or modified sequence
atggcccgggcccggcgggccgtggtgggcagcgtgcgggacgtgtcaaccgctgccactaacctcttttactttacagacttctgtatcttcctccagcctacccactgtttttgctgccctgaggttagtagctccaactacctcagcgagagtttcttcatggtcaagggcgccgcactgtttctgcagcagggaagttctccccaaggacagcggagcctgcagcacccacacaaacatgcaggggaccttcctcagcacctgcaagtgatgataaacctattgcgatgcgaggacaggatcaaactggctgttagattggaatcagcctgggctgatcgcgtacgttacatggttgtcgtctatagttcgggacgccaagacacagaagaaaacattcttctgggggtggatttctcgtcaaaggaatctaagagctgtacaattgggatggtgcttcgcctatggtcagatactaagatccatttggatggcgatggcggtttcagcgtcagcactgcaggcaggatgcacatcttcaagcccgtgtcagttcaggcgatgtggtctgctttgcaagttctgcacaaggcttgcgaagtggctcgcaggcacaattactttcccggaggagtagcactgatctgggccacttactacgaaagctgcatctcatccgagcagtcatgcataaacgaatggaatgccatgcaggacctagagagcactagacccgactctcctgcactttttgtggacaagcctaccgagggcgaacgtactgaacggttgattaaagcaaagctcaggagcattatgatgagccaagatctggaaaacgtgacttcaaaggaaattagaaatgaactggagaaacagatgaattgcaacctcaaggagctgaaggagttcatagacaatgagatgctgctgatcttgggacagatggataagcccagcttgatattcgatcatctgtatctaggcagcgaatggaatgcgagcaatctcgaagagcttcagggtagtggagtagactatatccttaacgtgactagggaaatagacaacttctttccagggctgtttgcttatcataatatccgggtgtacgacgaagagacaacagaccttttagcccattggaatgaggcataccactttattaataaggccaagcgtaatcatagcaagtgtctggtccactgtaagatgggcgtgagcagatcggcctccactgtaatagcctatgccatgaaggaattcggttggccactggagaaggcttataactacgttaagcagaagcggagcatcacacgtcctaacgctggatttatgagacagctgagtgaatacgaaggtatccttgacgcttccaagcagagacacaacaaattatggcgacagcaaacagactcaagcttacaacaacccgtcgatgaccccgctggaccgggagacttccttcccgaaactcccgatgggacccccgagtctcagctgccattcttggacgacgcagctcagcccggtctaggccctcctctgccatgctgctttaggcgcctctccgatcctttattgccaagcccggaagatgaaacagggtccctggtgcacctggaagaccccgaaagagaggcgctccttgaagaggccgcccccccagctgaggtccacagacccgcccggcagccgcagcaagggtccggcctgtgtgaaaaagatgtcaagaaaaagctggagttcggatcaccaaagggacgaagcggatccttgctccaggttgaagaaactgagagagaagagggtctcggcgcgggacggtggggtcagctgcccactcaactggaccagaatctactgaactccgagaacttgaacaataattccaaacggtcgtgccccaatggcatggaagtgggaagagcacgtccggctgggtggcacactccaagcctgccaagccacagtaattggcctacctcagcatccgttgtgggtaccacgggtactcgacaccacactcagctcatcttcttctattgcctcctctgggccccttccagccatttacaaggaccggagggctcgtttactgggtag

SEQ ID NO: 61097 - DNA, 2112 bp, Artificial Sequence
  derived and/or modified sequence
atggcccgagcacgtcgggcagtggtgggcagcgtgcgggacgtctcaactgcagcgaccaacttgttttacttcacagacttctgtatctttcttcagcctacccattgcttctgctgtccagaggttagtagctctaactacctgtctgagtctttcttcatggtaaagggagccgcactgttcctgcaacagggatcaagtccccaagggcaacgcagtctgcaacatccacacaaacacgccggagaccttcctcagcacctgcaggtaatgatcaaccttttgagatgcgaagataggataaagctggcagtcagattggagtccgcatgggccgacagggtgcgctatatggttgtagtatactcttccggcaggcaggacaccgaggagaatatcctgttaggtgtggacttttcctccaaggaatcaaagtcttgtaccattggaatggtactgaggttatggagtgatacgaagatccacctggacggcgacggtggctttagcgtttccaccgctggtcggatgcacatcttcaagcctgtatccgttcaggccatgtggtcagcccttcaggtcctgcacaaggcctgtgaagtcgcgcgacggcacaactattttcctggcggagtggccctgatttgggcaacatattatgaatcctgcatatcttctgaacagtcatgtatcaatgaatggaatgccatgcaagacttggagagcacccgacctgattctccagcgctttttgttgacaagcccactgaaggggaacgtactgaaaggctgatcaaagccaagttgcgctccatcatgatgtcgcaggacctggagaacgtgaccagcaaggaaatccggaatgagttggaaaaacaaatgaactgtaacttgaaggagctcaaggaatttatcgacaacgaaatgctcttgatcttgggccaaatggataaaccctctctcatattcgaccacctctacttggggagtgagtggaacgcctccaacttggaagaactccagggatcgggcgtggattatatcttgaatgtcacccgagagatcgataactttttccccggtctctttgcctaccacaatatacgagtctatgatgaagaaacgactgacctgttggctcactggaacgaggcctatcatttcatcaacaaggccaaaagaaatcactccaagtgcctagttcactgtaagatgggagtttcacgctcagcatccaccgttatcgcatacgcaatgaaggagtttggttggcctttggaaaaggcctataattacgtgaaacagaaacgttcaatcactaggccgaacgccggtttcatgcgccagctcagtgagtatgagggaatcttggatgctagcaaacagcggcacaataagttgtggagacaacagaccgacagctcattacagcagcccgtcgatgatccagctggcccaggagatttcctcccagaaacgcctgatggcacgcccgagagtcagctcccctttctggacgacgctgcccagccaggattaggacctcctctcccttgttgcttcaggcgcctgagtgacccacttctcccatcacctgaggatgaaactggttcattggttcacctcgaggatccggaaagagaggcccttctcgaggaggctgccccacctgccgaggtgcatcgaccagcacgccagccccagcagggctctgggctctgtgaaaaggacgtgaagaaaaaactcgagtttgggtctccgaaagggaggagcggatcactgctccaggttgaggagacagagcgcgaggaaggacttggggctgggagatgggggcagttgcctactcaactggaccagaacctgttgaattcagaaaacctcaataataatagcaaaaggtcatgcccaaacggcatggaggttggcagggcacggccagcgggttggcacacaccatccctcccatcacactcaaactggccgacctcagcttcagtggtggggaccaccggcacgcgccaccacacacagctcatttttttctactgcctcctttgggcgcctagtagccatctgcagggacctgaaggatccttcacaggatag

SEQ ID NO: 61098 - DNA, 1937 bp, Artificial Sequence
  derived and/or modified sequence
atgggagggaggcaccacctccaaaggcaggttagtgagagcatgtctgccctgttccaggcagtgcgcctggagagcgcctgggcggaccgggtccggtacatggtggtggtgtacagcagcgggcgccaggacaccgaggagaatatcttgctgggagtggacttttccagtaaggaaagtgggttcagcgtgagcacagcaggaaggatgcacatatttaagcctgtgtctgtccaggccatgtggtctgccctgcaggtgcttcacaaggcctgcgaagtggcccggaggcacaactacttccccgggggtgtagctctcatctgggctacctactatgagagctgcatcagctccgagcagagctgcatcaacgagtggaacgccatgcaggacctggagtctacgcggcccgactcccccgcgctatttgtggacaagcccactgaaggggaaaggaccgagcgcctcatcaaagccaagctccgaagcatcatgatgagccaggatctagaaaatgtgacttccaaagagattcgtaatgaattagagaaacagatgaattgtaacttgaaggaactcaaggaatttatagacaatgagatgctacttatcttgggacagatggacaagccctcccttatcttcgatcatctttatctcggctctgaatggaatgcatccaatctggaggaactgcagggctcaggggttgattacattttaaatgttaccagagaaatcgataatttttttcctggcttatttgcatatcataacatccgagtctacgatgaagagaccacagacctcctcgcccactggaatgaagcgtatcattttataaacaaagcgaagaggaaccattccaagtgcctggtgcattgcaaaatgggcgtgagtcgctcggcctccacagtcatagcctatgcaatgaaggaattcggctggcctctggaaaaagcatataactatgtaaagcagaagcgcagcatcacgcgccccaacgcgggctttatgaggcagctgtctgagtatgaaggcatcttggatgcaagcaaacagcggcacaacaagctgtggcgtcagcagacagacagcagcctccagcagcctgtggatgaccctgcaggacctggcgacttcttgccagagaccccagatggcaccccggaaagccagctgcccttcttggatgatgccgcccagcccggcttagggccccccctcccctgctgtttccggcgactctcagacccccttctgccttcccctgaggatgaaactggcagcttggtccacctggaggatccggagagggaggctctgttggaggaagctgctccacctgcagaggtgcacaggccggccagacagccccagcaaggttccggactctgtgagaaggatgtgaagaagaaactagagtttgggagtcccaaaggtcggagcggctccttgctgcaggtggaggagacggaaagggaggagggcctgggagcagggaggtgggggcagcttccaacccagctcgatcaaaacctgctcaactcggagaacctaaacaacaacagcaagaggagctgtcccaacggcatggaggtaggcagagcccggcctgcagggtggcacaccccatcccttccatcccactctaattggcctacctcagcctctgtagtagggactacaggcacccgccaccacacccagctgatttttttctattgtctcctctgggcccccagctcccatctccagggacctgagggttctttcacagggtgattctgctggtgggtacgtagtgcataccttatatagcaaattgagaatctgttgggaataacacatatctctgcacaccatcttcaccccatgtaccttattcataccctgggcagggcttccaactcaatttctttttgtgtatg

SEQ ID NO: 61099 - DNA, 2432 bp, Artificial Sequence
  derived and/or modified sequence
tttttcagccaaaatatcagaggaagacaagagttccacaagagccatttgcttttcgggtaggactctgaggaggagttggctccccagccctcgtggaagcactcggcagcctcctggcttttcctgatctccatagggagcagatggccagagctcggagggcagttgtagggagcgttagagatgtgagcactgcagccacgaacctcttttattttaccgacttctgcatcttccttcagccaacccactgcttctgctgtccagaggtttccagctcaaattacttaagtgagagctttttcatggtgaaaggcgcagccctcttcttacaacagggaagcagccctcaaggccagcggagtcttcagcacccccacaagcatgcaggtgatctgcctcaacatcttcaggtgatgatcaaccttctgcgttgcgaagacagaatcaagctggcagtgcgcctggagagcgcctgggcggaccgggtccggtacatggtggtggtgtacagcagcgggcgccaggacaccgaggagaatatcttgctgggagtggacttttccagtaaggaaagtaaaagctgcaccattgggatggttctccgactgtggagcgacacgaaaatccaccttgatggagatggtgggttcagcgtgagcacagcaggaaggatgcacatatttaagcctgtgtctgtccaggccatgtggtctgccctgcaggtgcttcacaaggcctgcgaagtggcccggaggcacaactacttccccgggggtgtagctctcatctgggctacctactatgagagctgcatcagctccgagcagagctgcatcaacgagtggaacgccatgcaggacctggagtctacgcggcccgactcccccgcgctatttgtggacaagcccactgaaggggaaaggaccgagcgcctcatcaaagccaagctccgaagcatcatgatgagccaggatctagaaaatgtgacttccaaagagattcgtaatgaattagagaaacagatgaattgtaacttgaaggaactcaaggaatttatagacaatgagatgctacttatcttgggacagatggacaagccctcccttatcttcgatcatctttatctcggctctgaatggaatgcatccaatctggaggaactgcagggctcaggggttgattacattttaaatgttaccagagaaatcgataatttttttcctggcttatttgcatatcataacatccgagtctacgatgaagagaccacagacctcctcgcccactggaatgaagcgtatcattttataaacaaagcgaagaggaaccattccaagtgcctggtgcattgcaaaatgggcgtgagtcgctcggcctccacagtcatagcctatgcaatgaaggaattcggctggcctctggaaaaagcatataactatgtaaagcagaagcgcagcatcacgcgccccaacgcgggctttatgaggcagctgtctgagtatgaaggcatcttggatgcaagcaaacagcggcacaacaagctgtggcgtcagcagacagacagcagcctccagcagcctgtggatgaccctgcaggacctggcgacttcttgccagagaccccagatggcaccccggaaagccagctgcccttcttggatgatgccgcccagcccggcttagggccccccctcccctgctgtttccggcgactctcagacccccttctgccttcccctgaggatgaaactggcagcttggtccacctggaggatccggagagggaggctctgttggaggaagctgctccacctgcagaggtgcacaggccggccagacagccccagcaaggttccggactctgtgagaaggatgtgaagaagaaactagagtttgggagtcccaaaggtcggagcggctccttgctgcaggtggaggagacggaaagggaggagggcctgggagcagggaggtgggggcagcttccaacccagctcgatcaaaacctgctcaactcggagaacctaaacaacaacagcaagaggagctgtcccaacggcatggaggtaggcagagcccggcctgcagggtggcacaccccatcccttccatcccactctaattggcctacctcagcctctgtagtagggactacaggcacccgccaccacacccagctgatttttttctattgtctcctctgggcccccagctcccatctccagggacctgagggttctttcacagggtgattctgctggtgggtacgtagtgcataccttatatagcaaattgagaatctgttgggaataacacatatctctgcacaccatcttcaccccatgtaccttattcataccctgggcagggcttccaactcaatttctttttgtgtatgtaaaattaaaacatataatttatcagcc

SEQ ID NO: 61100 - DNA, 2112 bp, Artificial Sequence
  derived and/or modified sequence
atggccagagccagaagagccgtggtgggcagcgtgagagacgtgagcaccgccgccaccaacctgttctacttcaccgacttctgcatcttcctgcagcccacccactgcttctgctgccccgaggtgagcagcagcaactacctgagcgagagcttcttcatggtgaagggcgccgccctgttcctgcagcagggcagcagcccccagggccagagaagcctgcagcacccccacaagcacgccggcgacctgccccagcacctgcaggtgatgatcaacctgctgagatgcgaggacagaatcaagctggccgtgagactggagagcgcctgggccgacagagtgagatacatggtggtggtgtacagcagcggcagacaggacaccgaggagaacatcctgctgggcgtggacttcagcagcaaggagagcaagagctgcaccatcggcatggtgctgagactgtggagcgacaccaagatccacctggacggcgacggcggcttcagcgtgagcaccgccggcagaatgcacatcttcaagcccgtgagcgtgcaggccatgtggagcgccctgcaggtgctgcacaaggcctgcgaggtggccagaagacacaactacttccccggcggcgtggccctgatctgggccacctactacgagagctgcatcagcagcgagcagagctgcatcaacgagtggaacgccatgcaggacctggagagcaccagacccgacagccccgccctgttcgtggacaagcccaccgagggcgagagaaccgagagactgatcaaggccaagctgagaagcatcatgatgagccaggacctggagaacgtgaccagcaaggagatcagaaacgagctggagaagcagatgaactgcaacctgaaggagctgaaggagttcatcgacaacgagatgctgctgatcctgggccagatggacaagcccagcctgatcttcgaccacctgtacctgggcagcgagtggaacgccagcaacctggaggagctgcagggcagcggcgtggactacatcctgaacgtgaccagagagatcgacaacttcttccccggcctgttcgcctaccacaacatcagagtgtacgacgaggagaccaccgacctgctggcccactggaacgaggcctaccacttcatcaacaaggccaagagaaaccacagcaagtgcctggtgcactgcaagatgggcgtgagcagaagcgccagcaccgtgatcgcctacgccatgaaggagttcggctggcccctggagaaggcctacaactacgtgaagcagaagagaagcatcaccagacccaacgccggcttcatgagacagctgagcgagtacgagggcatcctggacgccagcaagcagagacacaacaagctgtggagacagcagaccgacagcagcctgcagcagcccgtggacgaccccgccggccccggcgacttcctgcccgagacccccgacggcacccccgagagccagctgcccttcctggacgacgccgcccagcccggcctgggcccccccctgccctgctgcttcagaagactgagcgaccccctgctgcccagccccgaggacgagaccggcagcctggtgcacctggaggaccccgagagagaggccctgctggaggaggccgccccccccgccgaggtgcacagacccgccagacagccccagcagggcagcggcctgtgcgagaaggacgtgaagaagaagctggagttcggcagccccaagggcagaagcggcagcctgctgcaggtggaggagaccgagagagaggagggcctgggcgccggcagatggggccagctgcccacccagctggaccagaacctgctgaacagcgagaacctgaacaacaacagcaagagaagctgccccaacggcatggaggtgggcagagccagacccgccggctggcacacccccagcctgcccagccacagcaactggcccaccagcgccagcgtggtgggcaccaccggcaccagacaccacacccagctgatcttcttctactgcctgctgtgggcccccagcagccacctgcagggccccgagggcagcttcaccggctag

SEQ ID NO: 61101 - protein, 323 aa, Artificial Sequence
  derived and/or modified sequence
MSPAAAAEPDGDQQDRHVSKLIFCFFVFGAVLLCVGVLLSIFGFQACQYKPLPDCPMVLKVAGPACAVVGLGAVILARSRAQLQLRAGLQRGQQMDPDRAFICGESRQFAQCLIFGFLFLTSGMLISVLGIWVPGCGSNWAQEPLNETDTGDSEPRMCGFLSLQIMGPLIVLVGLCFFVVAHVKKRNTLNAGQDASEREEGQIQIMEPVQVTVGDSVIIFPPPPPPYFPESSASAVAESPGTNSLLPNENPPSYYSIFNYGTPTSEGAASERDCESIYTISGTNSSSEASHTPHLPSELPPRYEEKENAAATFLPLSSEPSPP

SEQ ID NO: 61102 - DNA, 972 bp, Artificial Sequence
  derived and/or modified sequence
atgagccccgccgccgccgccgagcccgacggcgaccagcaggacagacacgtgagcaagctgatcttctgcttcttcgtgttcggcgccgtgctgctgtgcgtgggcgtgctgctgagcatcttcggcttccaggcctgccagtacaagcccctgcccgactgccccatggtgctgaaggtggccggccccgcctgcgccgtggtgggcctgggcgccgtgatcctggccagaagcagagcccagctgcagctgagagccggcctgcagagaggccagcagatggaccccgacagagccttcatctgcggcgagagcagacagttcgcccagtgcctgatcttcggcttcctgttcctgaccagcggcatgctgatcagcgtgctgggcatctgggtgcccggctgcggcagcaactgggcccaggagcccctgaacgagaccgacaccggcgacagcgagcccagaatgtgcggcttcctgagcctgcagatcatgggccccctgatcgtgctggtgggcctgtgcttcttcgtggtggcccacgtgaagaagagaaacaccctgaacgccggccaggacgccagcgagagagaggagggccagatccagatcatggagcccgtgcaggtgaccgtgggcgacagcgtgatcatcttccccccccccccccccccctacttccccgagagcagcgccagcgccgtggccgagagccccggcaccaacagcctgctgcccaacgagaacccccccagctactacagcatcttcaactacggcacccccaccagcgagggcgccgccagcgagagagactgcgagagcatctacaccatcagcggcaccaacagcagcagcgaggccagccacaccccccacctgcccagcgagctgccccccagatacgaggagaaggagaacgccgccgccaccttcctgcccctgagcagcgagcccagccccccctag

SEQ ID NO: 61103 - DNA, 972 bp, Artificial Sequence
  derived and/or modified sequence
atgagtccagcagcagccgcggagcccgacggggatcagcaggaccgtcacgtctcaaaactgattttctgtttcttcgtgttcggcgcggtgctgttgtgtgtgggtgtccttctgagtatcttcgggtttcaggcctgccagtacaagccactccctgattgtccaatggttttgaaagttgctgggcctgcatgcgccgtggttggcctgggcgctgtgatactcgcacgctctcgggctcagctacagttgagagcaggactccagcgcggacagcagatggatcctgatcgcgcctttatctgcggagaatcccgccagttcgctcagtgtctgatttttggttttctgtttcttacttcaggaatgctgatctccgttctcgggatctgggtgccaggatgtgggtccaactgggcgcaggagccccttaacgagacagacaccggggactcggaaccacgcatgtgtggtttcctgtctctccagataatgggaccattgattgtcctggtcgggctttgcttttttgtggtcgctcatgtgaagaaacgcaacactctgaacgccggccaagatgcttcagagcgagaggagggccagattcagatcatggagcctgtgcaggtcaccgtgggcgacagcgtgattatttttcctcccccacccccgccatactttcctgaaagttccgcttcggcggttgctgaaagccccggtacaaattcacttctgcccaatgaaaatcctccctcctattacagcattttcaattacggaactcccacatcagagggagctgcaagcgaaagagattgtgaatccatctatacgatttcagggacaaactcatcatccgaggcctcccacaccccacatctgccaagtgagcttccaccgagatatgaagaaaaagagaatgccgcggctaccttcctgccacttagttctgagccttccccaccatag

SEQ ID NO: 61104 - DNA, 972 bp, Artificial Sequence
  derived and/or modified sequence
atgagccctgctgctgctgctgagccagatggagaccagcaggacagacatgtgtccaagctgatcttctgcttctttgtgtttggagctgtgctgctgtgtgtgggcgtgctgctgagcatcttcggcttccaggcctgccagtacaagcccctgcctgactgccccatggtgctgaaggtggccggccctgcctgtgctgtggtgggcctgggcgctgtgatcctggcccggagccgggcccagctgcagctgcgggccggcctgcagaggggccagcagatggaccctgaccgggccttcatctgtggggagagccggcagtttgcccagtgcctgatcttcggcttcctgttcctgaccagcggcatgctgatctctgtgctgggcatctgggtgcccggctgcggcagcaactgggcccaggagcccctgaatgaaacagacaccggggacagcgagcccaggatgtgtggcttcctgagcctgcagatcatgggccccctcatcgtgctggtgggcctgtgcttctttgtggtggcccacgtgaagaagaggaacaccctgaatgccggccaggatgccagcgagcgggaggagggccagatccagatcatggagcctgtgcaggtgacagtgggggacagcgtcatcatcttccccccacctcctccaccctacttccctgagagcagcgccagcgctgtggccgagagccctggcaccaacagcctgctgcccaatgaaaatcctccttcctactacagcatcttcaactacggcacccccaccagcgagggcgccgccagcgagcgggactgtgagagcatctacaccatcagcggcaccaacagcagcagcgaggccagccacaccccccacctgcccagcgagctgccccccaggtatgaggagaaggaaaatgctgctgccaccttcctgcccctgagcagcgagcccagccccccatag

SEQ ID NO: 61105 - DNA, 972 bp, Artificial Sequence
  derived and/or modified sequence
atgagccccgccgccgccgccgagcccgacggcgaccagcaggacaggcatgtgagcaaactgattttctgttttttcgtgttcggagctgtgctgctgtgcgtgggggttttgttgtccatctttggtttccaggcttgtcagtacaaaccattgccggactgtccaatggtcctgaaggtcgcaggccccgcttgcgcagtggttggactgggggccgtgatattggcacgttctcgcgcccagctccagttacgagctggacttcaacgtgggcagcagatggaccctgatcgagcctttatctgtggggaatcccggcagtttgcacagtgcctcatctttggcttcctttttctgacaagcggcatgctgatttcggtcctgggtatctgggtgcctggttgcgggagcaactgggcccaagagccacttaacgaaactgatactggcgattcagaaccccgaatgtgtggattcctctcactccaaattatgggccccctgatcgtcctcgtgggcttatgttttttcgtcgtagctcatgtgaagaagaggaatactctaaacgcaggacaagacgcttccgagcgcgaagagggccagattcagattatggagccagtgcaggtcacagttggcgatagcgtgatcatattccccccccccccaccgccatacttcccagaatcctccgccagtgccgtagcagagagccccgggaccaattctctgttgcctaatgaaaatcctccttcatactactcaatctttaactatggtacaccaacctccgagggcgccgcctccgaacgtgactgcgagagcatatatacgatttctggaacgaacagcagctccgaagcttcccacactcctcaccttccatctgaactaccgccccggtacgaagagaaagaaaatgccgccgccaccttcctgccactctcaagtgaaccatctcccccctag

SEQ ID NO: 61106 - DNA, 972 bp, Artificial Sequence
  derived and/or modified sequence
atgtcaccagccgcagctgccgagcctgatggagatcagcaggatcggcacgtgagtaaactgattttttgtttctttgtgtttggcgctgtgctgttgtgcgttggtgtcctgctgtctatttttggattccaggcatgtcagtacaagcctctacccgattgtccaatggtcctcaaagtagcaggtcccgcatgcgcagtggttggcctcggagcagttatcctggctcgttcccgggctcagcttcagctgagagcaggcctgcagaggggacagcagatggaccccgacagagcattcatttgcggggagagcaggcaattcgctcagtgcctgatatttggctttctttttctgacgtctggtatgctgatcagcgtgctaggcatatgggtccccggatgtgggtctaactgggctcaggagccccttaacgagaccgacaccggggactccgaaccacgtatgtgtggattcttatcactgcagattatggggccactaattgtcctggtggggctttgcttcttcgtggtggcacatgtgaaaaagcgtaacacactcaacgccggtcaggacgctagtgagcgagaagagggtcagatacagatcatggaacccgtgcaggtgacggttggggattcagtgattatctttcctcctccccctcccccttactttccagagtcgagcgccagcgccgtagcggaatcccctggcactaattctctactcccaaacgaaaatcccccatcctattattccatattcaattacgggactccaacatcagagggcgcagctagtgagagagattgtgagagcatctacacaatctcaggtactaattcttcaagcgaggctagccacacaccccacttgcccagcgagttaccgccaaggtatgaagagaaggaaaatgccgctgcgacattcctacccctgtccagcgagccttctcccccatag

SEQ ID NO: 61107 - DNA, 1247 bp, Artificial Sequence
  derived and/or modified sequence
cgcaccaggacgcgcggtgggtagggtgcagggcggccggcgcagccgaggccgcgtgcggaggcggacgccgcgcccagccagtgcccacagcagcgcggtcagccaggcgccggacccagcttcagagctgctgaaatcttggagggaagaaaacacatcccaccctgcctccgggaaggggcctctcctggacatgtctcctgcagctgctgctgagccagatggggaccagcaggacagacacgtcagcaaactcatcttctgcttctttgtcttcggcgccgtcttgttgtgtgtgggagtcctgctctccatctttgggttccaggcatgccaatataagcccctcccagactgccccatggtgctcaaggtggcggggcctgcatgtgccgtggttggacttggggctgtgatcctggcccgctcccgggcgcaacttcagctccgtgcagggctgcagagaggtcagcagatggaccccgaccgagccttcatctgtggagagagccgccagtttgcccagtgccttatctttgggtttctgttcttgacaagcggcatgctcatcagcgtcctgggcatttgggtccctggatgtggctccaactgggcgcaggaaccgctaaacgagacagacactggcgactcagagccccggatgtgtgggttcctttctctgcagatcatggggcccttgattgtgcttgtgggattgtgtttcttcgtggttgcccatgttaagaagagaaacacgctgaatgctggccaggatgcctctgagagagaagagggacagatccagattatggagcctgtccaggtcactgtaggtgactcggtaataatatttccaccccctccaccaccttactttcctgaatcttcagcttctgcggtcgctgagagtcctggaactaacagtctgcttccgaatgaaaaccccccttcatattacagtattttcaactatgggaccccaacttcagagggtgcagcctctgaaagagactgtgaatctatatataccatttctgggacgaattcatcttctgaggcctcacacactccacatcttccatctgaattgcctcctagatatgaagaaaaagaaaatgctgcagctacattcttgcctctatcttctgagccttccccaccgtaaactatggactctagttcagttttatatgcaatggatcactattttatttaattttttttaaataaaaaatacaatagca

SEQ ID NO: 61108 - protein, 664 aa, Artificial Sequence
  derived and/or modified sequence
MERPEEGKQSPPPQPWGRLLRLGAEEGEPHVLLRKREWTIGRRRGCDLSFPSNKLVSGDHCRIVVDEKSGQVTLEDTSTSGTVINKLKVVKKQTCPLQTGDVIYLVYRKNEPEHNVAYLYESLSEKQGMTQESFEANKENVFHGTKDTSGAGAGRGADPRVPPSSPATQVCFEEPQPSTSTSDLFPTASASSTEPSPAGRERSSSCGSGGGGISPKGSGPSVASDEVSSFASALPDRKTASFSSLEPQDQEDLEPVKKKMRGDGDLDLNGQLLVAQPRRNAQTVHEDVRAAAGKPDKMEETLTCIICQDLLHDCVSLQPCMHTFCAACYSGWMERSSLCPTCRCPVERICKNHILNNLVEAYLIQHPDKSRSEEDVQSMDARNKITQDMLQPKVRRSFSDEEGSSEDLLELSDVDSESSDISQPYVVCRQCPEYRRQAAQPPHCPAPEGEPGAPQALGDAPSTSVSLTTAVQDYVCPLQGSHALCTCCFQPMPDRRAEREQDPRVAPQQCAVCLQPFCHLYWGCTRTGCYGCLAPFCELNLGDKCLDGVLNNNSYESDILKNYLATRGLTWKNMLTESLVALQRGVFLLSDYRVTGDTVLCYCCGLRSFRELTYQYRQNIPASELPVAVTSRPDCYWGRNCRTQVKAHHAMKFNHICEQTRFKN

SEQ ID NO: 61109 - protein, 349 aa, Artificial Sequence
  derived and/or modified sequence
MTQESFGSGGGGISPKGSGPSVASDEVSSFASALPDRKTASFSSLEPQDQEDLEPVKKKMRGDGDLDLNGQLLVAQPRRNAQTVHEDVRAAAGKPDKMEETLTCIICQDLLHDCVSLQPCMHTFCAACYSGWMERSSLCPTCRCPVERICKNHILNNLVEAYLIQHPDKSRSEEDVQSMDARNKITQDMLQPKVRRSFSDEEGSSEDLLELSDVDSESSDISQPYVVCRQCPEYRRQAAQPPHCPAPEGEPGAPQALGDAPSTSVSLTTAVQDYVCPLQGSHALCTCCFQPMPDRRAEREQDPRVAPQQCAVCLQPFCHLYWGCTRTGCYGCLAPFCVSGRQCFPATSL

SEQ ID NO: 61110 - DNA, 1995 bp, Artificial Sequence
  derived and/or modified sequence
atggaacggcctgaggagggaaaacaaagccctccccctcagccgtggggtcgtctgctgcggttgggcgccgaagaaggggaacctcatgtgctcctccgcaaaagagagtggacaatcggtaggaggcgcggctgtgacctgtcttttccttcaaataaactggtgtctggggatcactgcagaatcgtggtggatgaaaagagcggccaggtgactcttgaggataccagtacgagcgggacggtgattaataagctgaaggtggtaaagaagcagacttgtcctctgcagacaggcgacgtcatctacctggtctacaggaagaacgagccagaacataacgtcgcttatctatacgagtcactatccgaaaagcagggtatgacccaggagagcttcgaagcgaataaagagaacgtttttcacggaaccaaggacacctcaggagctggagcggggcgaggcgcagacccacgagtaccaccctccagtcccgctacccaggtgtgttttgaggagccccaacccagtacatcgactagcgacctgttcccaacagcttccgcgtcttcgacggagccctcacctgctgggcgagaacgcagcagctcatgtggatcaggagggggggggatttctcccaaagggagcggcccttccgtcgcctcggatgaagtcagcagctttgcttccgcattaccggataggaagacagcgtcgttttctagcctggagccgcaagatcaggaggatctggagcctgtaaagaagaaaatgagaggagatggggatttagacctcaacggacagcttcttgtggcccagcctaggagaaatgctcaaaccgttcatgaagatgttagggcagccgctggcaaaccagacaagatggaagagactctgacctgcatcatatgccaggacctgttgcatgactgcgtgtctcttcagccgtgtatgcacacattctgtgccgcctgttacagcggctggatggagcgttcttccctctgtcctacatgccgttgcccggtcgaaagaatttgtaagaaccacatccttaacaacttagtggaggcgtatttgattcagcacccggataaaagccgatcagaggaggacgttcagagcatggatgcccggaataaaattactcaggatatgctgcagcccaaggttaggcgctcattctctgatgaagagggatcttcggaagatcttttagagcttagcgatgtcgacagtgagtcttctgatattagtcagccttacgtagtttgccggcaatgtcccgagtacagaagacaggccgcccagccgccccattgcccagcccctgagggagagccaggcgccccacaggctctcggcgacgcccccagcacttctgtttccctgaccacagccgtgcaggactatgtgtgccctttacagggcagccatgcactatgtacttgttgctttcagccaatgccagatcgacgcgcagaacgcgagcaggacccacgcgttgcgccacaacagtgcgcagtctgcctacagccattttgccatctatactggggctgcacgagaacaggatgctatgggtgcctcgcgcctttttgcgagttgaatctcggcgataaatgtctggacggagtgttgaacaacaactcctacgaatctgacatcctcaaaaactacctggctaccaggggtctgacctggaaaaatatgctgaccgaaagccttgtagctctccagaggggtgtatttcttcttagcgattatcgcgtaactggggacaccgtgctttgttattgttgcggcctcagatcttttcgcgaactcacatatcagtatagacagaatatccctgcctctgagctgcccgttgcagtcacctctcgtcctgattgctactggggacgcaattgtcggactcaagtgaaggcgcatcatgcaatgaagtttaatcatatctgtgagcagactcgtttcaaaaactag

SEQ ID NO: 61111 - DNA, 1995 bp, Artificial Sequence
  derived and/or modified sequence
atggagaggcctgaggagggcaagcagagccccccaccccagccctggggccgcctgctgcggctgggcgctgaggagggggagccccacgtgctgctgaggaagcgggagtggaccatcggcagaagaagaggctgtgacctgtccttccccagcaacaagctggtgtctggggaccactgcagaattgtggtggatgagaagagcggccaggtgaccctggaggacaccagcaccagcggcaccgtcatcaacaagctgaaggtggtgaagaagcagacctgccccctgcagacaggagatgtgatctacctggtgtacaggaagaatgaacctgagcacaacgtggcctacctgtatgagagcctgtctgagaagcagggcatgacccaggagagctttgaggccaacaaggaaaatgtgttccacggcaccaaggacaccagcggggccggggccggcagaggagctgacccccgggtgccccccagcagccctgccacccaggtgtgctttgaggagccccagcccagcaccagcaccagtgacctcttccccacagccagcgccagcagcacagagcccagccctgctggccgggagaggagcagcagctgtggcagcggcggcggcggcatcagccccaagggcagcggccccagcgtggccagtgatgaggtgtcctcctttgccagcgccctgcctgacaggaagacagccagcttcagcagcctggagccccaggaccaggaggacctggagcctgtgaagaagaagatgagaggagatggagacctggacctgaatggccagctgctggtggcccagcccaggagaaatgcccagacagtgcatgaagatgtgcgggctgctgctgggaagccagacaagatggaggagaccctgacctgcatcatctgccaggacctgctgcatgactgtgtgtccctgcagccctgcatgcacaccttctgtgccgcctgctacagcggctggatggagaggagcagcctgtgccccacctgccgctgccctgtggagcgcatctgcaagaaccacatcctgaacaacctggtggaggcctacctgatccagcacccagacaagagccgctctgaggaggatgtgcagagcatggatgccaggaacaagatcacccaggacatgctgcagcccaaggtgagaagaagcttcagtgatgaggagggcagcagcgaggacctgctggagctgagtgatgtggacagcgagagcagtgacatcagccagccctacgtggtgtgccggcagtgcccagagtaccgccggcaggccgcccagcccccccactgcccagcccctgagggggagcccggggccccccaggccctgggagatgcccccagcacctctgtgtccctgaccacagctgtgcaggactatgtgtgccccctgcagggcagccacgccctgtgcacctgctgcttccagcccatgccagacagaagagctgagcgggagcaggacccccgggtggccccccagcagtgtgctgtgtgcctgcagcccttctgccacctgtactggggctgcaccaggacaggctgctacggctgcctggcccccttctgtgagctgaacctgggggacaagtgcctggatggagtgctgaacaacaacagctatgaaagtgacatcctgaagaactacctggccacccggggcctgacctggaagaacatgctgacagagagcctggtggccctgcagaggggcgtcttcctgctgagtgactacagagtgactggagacacagtgctgtgctactgctgcggcctgcggagcttccgggagctgacctaccagtaccggcagaacatcccagccagcgagctgcctgtggccgtgaccagcaggccagactgctactggggcaggaactgcaggacccaggtgaaggcccaccacgccatgaagttcaaccacatctgtgagcagacccgcttcaagaactag

SEQ ID NO: 61112 - DNA, 1995 bp, Artificial Sequence
  derived and/or modified sequence
atggagcggcccgaggagggcaagcagagcccccccccccagccctggggaagattgctccggctcggagcagaagaaggagagccgcacgtgcttctcagaaagagggagtggacgattggccggcgtcgcggctgcgacttaagttttccgtcaaataagctggtgtcaggcgaccactgccgcatcgtcgtcgacgagaaatccggccaggtgaccttagaagatacgagcacatcgggcacggtgattaacaaattaaaggtggtgaaaaagcagacctgccctctccagacaggagatgtgatctatctggtctatagaaagaacgagccagagcacaacgtagcctacctgtatgaatctctttcggagaagcagggcatgacgcaggagtcgtttgaggctaacaaggaaaacgtgttccacggcactaaggacacctctggagctggcgccggaaggggggcggatccccgagtgcccccttcgagcccagcaacacaagtgtgcttcgaggagccccagccaagtacatccacatctgatttgtttcccaccgcctccgcatcaagcacagaacccagtccggctggtagagaaaggagcagcagctgcggatctggcggcgggggtataagcccgaaaggaagcggccctagtgtggcctcagatgaagtctcatcctttgcctctgccctgccagatagaaagaccgcgtctttctccagtctggagccgcaggatcaggaggacctggagcctgttaaaaaaaagatgcgtggcgacggagatctagacctgaatggccaactcctggtggcccagcctcggcgaaacgctcagacggtccacgaggacgtgcgcgcggccgcgggaaaacctgataagatggaggagactttaacatgcatcatatgccaagacctcctgcacgattgtgtgtccctacaaccctgcatgcataccttttgcgctgcatgttactcaggctggatggagcgttcctcgctttgccccacctgccgctgcccagtggaaaggatctgcaagaaccacatcctaaataacttagtggaggcctatctgattcagcatcccgataaatcgcgctccgaggaggacgtccagagcatggatgccagaaacaaaatcacacaggacatgttgcagcctaaggtcagaaggagcttctctgacgaagagggatcaagtgaagacctgttggagttatccgacgtggattccgaaagctccgacatctctcagccatatgttgtgtgccgtcagtgtcctgaatacaggcgacaggcggctcagccgccccactgtcctgcaccagaaggggagcctggggctccccaggccttgggcgacgcaccctcgacctccgtgagcctgaccaccgcagtgcaggattatgtctgcccccttcaaggtagccacgccctatgtacgtgctgctttcagcccatgcctgacagacgagcagaaagggaacaggacccacgtgtcgcacctcaacagtgtgccgtgtgcctgcagcccttttgtcatctttactggggttgcacgcgtacgggctgctatggctgtctcgcacccttctgtgagctgaacctaggtgacaagtgcttggacggggtcctgaataacaattcttacgaaagtgacatcctgaaaaactacctcgccacccgtggactcacttggaaaaatatgctgactgagagcctggtggccctgcaacgtggggtgtttctactttctgattacagggtgaccggtgacactgtgctctgttattgttgcggcctccggagctttagggagctgacataccagtaccggcagaacattcctgcttctgagcttcccgtggccgtgactagccgtccagactgctactggggtagaaattgcagaactcaagtcaaggcccatcatgcaatgaaattcaaccacatttgcgagcaaacgagattcaaaaactag

SEQ ID NO: 61113 - DNA, 1995 bp, Artificial Sequence
  derived and/or modified sequence
atggagcgcccagaggaaggaaaacaaagtcctccaccgcagccatggggacgactgctgagactcggtgccgaggagggtgaaccccatgtcctcctccggaaacgggaatggactatcggaaggcgccgaggctgcgacctgtcttttccgtctaacaagctagtgtctggggatcactgcagaattgtcgttgatgaaaagtcagggcaggtcacattggaggatacttcaaccagtgggaccgtgattaataagctcaaagtggtgaaaaaacagacatgtccgctgcagactggcgacgtgatttacctcgtatataggaagaatgaaccggagcacaacgtggcctacctatacgagagtctgagcgagaaacaggggatgacccaagaaagttttgaagccaacaaggaaaatgtgtttcacgggactaaggataccagcggagccggtgccggtcgcggagcggaccctcgtgtgcccccaagctcacctgccacacaggtgtgctttgaagaacctcagccttcaacctcgacctctgacctgttcccaacagcatctgcttcttcaactgagccctcccccgctggcagggagcgctcaagtagttgtgggagtgggggaggcggaatttctccaaaggggagtggaccctcagtggcctccgacgaggtatcctcttttgcatccgcactcccagacaggaaaaccgccagtttttcttcactggaaccacaagaccaagaggacctggagccagtgaaaaagaagatgagaggggacggcgatcttgatctgaatgggcagctgctggtggcacagcctcgccgaaacgcacaaaccgtgcatgaagacgttcgagctgcggcaggcaagcccgacaagatggaagagactcttacctgtattatctgccaggacctgttgcatgactgcgtgtcattgcagccttgcatgcacaccttttgcgcggcttgttattcaggatggatggagcgctctagcttgtgtccaacttgtagatgtcccgtcgagcgaatctgcaaaaaccatattctgaacaatcttgtcgaggcatatttaatacagcatccagacaaatcccggtccgaagaagacgtgcaaagcatggatgccagaaacaagatcacgcaggacatgctgcagccaaaagtgaggaggagcttctcggacgaagagggctcatccgaagacctgctggagctatctgatgttgactccgagtcttccgatattagccaaccctacgttgtttgccgccagtgccctgagtatcgcaggcaggccgctcagccacctcactgccctgctcctgaaggcgagccgggagcgcctcaggccttaggtgatgcccctagtacttcagtgtcgcttacaacagctgtccaggattatgtttgcccgttgcaggggtctcacgctctgtgtacctgttgtttccagcccatgcccgaccgccgtgccgaacgggagcaagatcccagggtagccccacagcagtgtgcagtgtgtttgcaaccgttctgtcacctgtactggggctgcacccggaccggatgttacggctgcctggctccgttttgtgagctgaacctgggagacaaatgtctggacggcgtgctgaataataatagctacgaatccgacattcttaaaaattacctcgcaacccgaggccttacttggaaaaacatgcttacagagtcgcttgtcgccctgcagaggggagtttttctgctatctgactatcgagtgaccggcgacacggtgctttgctactgttgtggccttcgttcattcagggaactaacataccagtaccgccagaatattcccgcatccgagttgccggtggccgtgacaagtagaccagattgctactgggggagaaattgccgaactcaggtgaaggcacatcatgctatgaagttcaaccacatctgcgaacagactcgctttaaaaattag

SEQ ID NO: 61114 - DNA, 2648 bp, Artificial Sequence
  derived and/or modified sequence
gccgcaatgtctcttgacagcggcggcggcgcagccggttccgggttcggcgcggggcggggatgtgaatcccgatggagcggcccgaggaaggcaagcagtcgccgccgccgcagccctggggacggctcctgcgtctgggcgcggaggagggcgagccgcacgtcctcctgaggaagcgggagtggaccatcgggcggagacgaggttgcgacctttccttccccagcaataaactggtctctggagatcactgtagaattgtagtggatgaaaaatcaggtcaggtgacactggaagataccagcaccagtggaacagtgattaacaagctgaaggttgttaagaagcagacatgccctttacagactggggatgtcatctacttggtgtacaggaagaatgaaccggaacacaacgtggcatacctctatgaatctttaagtgaaaagcaaggcatgacacaagaatcctttgaagctaacaaggaaaatgtgttccatgggaccaaagatacctcaggtgcaggtgcagggcgaggggccgatccccgggtccctccgtcgtcgcccgccactcaggtgtgctttgaggaaccacagccatcaacatcgacgtcagacctcttccccacagcctcggcctcttccacggagccttctcctgcagggcgagagcgttcctccagttgtgggtctgggggtggtggcatctcccctaaaggaagtggtccctctgtggcaagtgatgaagtctccagctttgcctcagctctcccagacagaaagactgcgtccttttcgtcgttggaaccccaggatcaggaggatttggagcccgtgaagaagaaaatgagaggagatggggaccttgacctgaacgggcagttgttggtcgcacaaccgcgtagaaatgcccaaaccgtccacgaggacgtcagagcagcggctgggaagccagacaagatggaggagacgctgacatgcatcatctgccaggacctgctgcacgactgcgtgagtttgcagccctgcatgcacacgttctgcgcggcttgctactcgggctggatggagcgctcgtccctgtgtcctacctgccgctgtcccgtggagcggatctgtaaaaaccacatcctcaacaacctcgtggaagcatacctcatccagcatccagacaagagtcgcagtgaagaagatgtgcaaagtatggatgccagaaataaaatcactcaagacatgctgcagcccaaagtcaggcggtctttttctgatgaagaagggagttcagaggacctgctggagctgtcagacgttgacagtgagtcctcagacattagccagccatacgtcgtgtgccggcagtgtcctgagtacagaaggcaggcggcgcagcctccccactgcccagcacccgagggcgagccaggagccccacaggccctgggggatgcaccctccacgtccgtcagcctgacgacagcagtccaggattacgtgtgccctctgcaaggaagccacgccctgtgcacctgctgcttccagcccatgcccgaccggagagcggagcgcgagcaggacccgcgtgtcgcccctcagcagtgtgcggtctgcctgcagcctttctgccacctgtactggggctgcacccggaccggctgctacggctgcctggccccgttttgtgagctcaacctgggtgacaagtgtctggacggcgtgctgaacaacaacagctacgagtcagacatcctgaagaattacctggcaaccagaggtttgacatggaaaaacatgttgaccgagagcctcgtggctctccagcggggagtgtttctgctgtctgattacagagtcacgggagacaccgttctgtgttactgctgtggcctgcgcagcttccgtgagctgacctatcagtatcggcagaacattcctgcttccgagttgccagtggccgtaacatcccgtcctgactgctactggggccgtaactgccgcactcaggtgaaagctcaccacgccatgaaattcaatcatatctgtgaacagacaaggttcaaaaactaagcatccagaggccctgagcagctttcagcactggaggtgaagagagcgtgtttttaaaatacagagacaagcacgtcaaggtgttttcacagccccctgagggaagggacgcagggtctccgacaggtgctctggggtgactcttctgtggagctttaccctctgagtgagaccctccccagagccccgggggccgcagcccgccctcctggtgagcgctgggcagggctcgtggtggcatcagcagcagagacgaagcctttctgtaacatgcggccgtcccgccgagaggggcagttttgctcttttgtacattttccgaaactacagttaaagcagaagtctgtttttaggaaaagtttcaagggagaagggcaagtttatcaaaaacattgtttcaggagaagggagcataagtttacagcctacaggacgtacacaatatcctgctgctgggaaaaccacagcattttatctattttttattttaataggtttggtgcttatcttctaataagatttaaatgtcacaaactgtagcacaaataatataatttataatttacaaattgactaaaa

SEQ ID NO: 61115 - DNA, 1995 bp, Artificial Sequence
  derived and/or modified sequence
atggagagacccgaggagggcaagcagagcccccccccccagccctggggcagactgctgagactgggcgccgaggagggcgagccccacgtgctgctgagaaagagagagtggaccatcggcagaagaagaggctgcgacctgagcttccccagcaacaagctggtgagcggcgaccactgcagaatcgtggtggacgagaagagcggccaggtgaccctggaggacaccagcaccagcggcaccgtgatcaacaagctgaaggtggtgaagaagcagacctgccccctgcagaccggcgacgtgatctacctggtgtacagaaagaacgagcccgagcacaacgtggcctacctgtacgagagcctgagcgagaagcagggcatgacccaggagagcttcgaggccaacaaggagaacgtgttccacggcaccaaggacaccagcggcgccggcgccggcagaggcgccgaccccagagtgccccccagcagccccgccacccaggtgtgcttcgaggagccccagcccagcaccagcaccagcgacctgttccccaccgccagcgccagcagcaccgagcccagccccgccggcagagagagaagcagcagctgcggcagcggcggcggcggcatcagccccaagggcagcggccccagcgtggccagcgacgaggtgagcagcttcgccagcgccctgcccgacagaaagaccgccagcttcagcagcctggagccccaggaccaggaggacctggagcccgtgaagaagaagatgagaggcgacggcgacctggacctgaacggccagctgctggtggcccagcccagaagaaacgcccagaccgtgcacgaggacgtgagagccgccgccggcaagcccgacaagatggaggagaccctgacctgcatcatctgccaggacctgctgcacgactgcgtgagcctgcagccctgcatgcacaccttctgcgccgcctgctacagcggctggatggagagaagcagcctgtgccccacctgcagatgccccgtggagagaatctgcaagaaccacatcctgaacaacctggtggaggcctacctgatccagcaccccgacaagagcagaagcgaggaggacgtgcagagcatggacgccagaaacaagatcacccaggacatgctgcagcccaaggtgagaagaagcttcagcgacgaggagggcagcagcgaggacctgctggagctgagcgacgtggacagcgagagcagcgacatcagccagccctacgtggtgtgcagacagtgccccgagtacagaagacaggccgcccagcccccccactgccccgcccccgagggcgagcccggcgccccccaggccctgggcgacgcccccagcaccagcgtgagcctgaccaccgccgtgcaggactacgtgtgccccctgcagggcagccacgccctgtgcacctgctgcttccagcccatgcccgacagaagagccgagagagagcaggaccccagagtggccccccagcagtgcgccgtgtgcctgcagcccttctgccacctgtactggggctgcaccagaaccggctgctacggctgcctggcccccttctgcgagctgaacctgggcgacaagtgcctggacggcgtgctgaacaacaacagctacgagagcgacatcctgaagaactacctggccaccagaggcctgacctggaagaacatgctgaccgagagcctggtggccctgcagagaggcgtgttcctgctgagcgactacagagtgaccggcgacaccgtgctgtgctactgctgcggcctgagaagcttcagagagctgacctaccagtacagacagaacatccccgccagcgagctgcccgtggccgtgaccagcagacccgactgctactggggcagaaactgcagaacccaggtgaaggcccaccacgccatgaagttcaaccacatctgcgagcagaccagattcaagaactag

SEQ ID NO: 61116 - protein, 663 aa, Artificial Sequence
  derived and/or modified sequence
MERPEEGKQSPPPQPWGRLLRLGAEEGEPHVLLRKREWTIGRRRGCDLSFPSNKLVSGDHCRIVVDEKSGQVTLEDTSTSGTVINKLKVVKKQTCPLQTGDVIYLVYRKNEPEHNVAYLYESLSEKQGMTQESFEANKENVFHGTKDTSGAGAGRGADPRVPPSSPATQVCFEEPQPSTSTSDLFPTASASSTEPSPAGRERSSSCGSGGGGISPKGSGPSVASDEVSSFASALPDRKTASFSSLEPQDQEDLEPVKKKMRGDGDLDLNGQLLVAQPRRNAQTVHEDVRAAAGKPDKMEETLTCIICQDLLHDCVSLQPCMHTFCAACYSGWMERSSLCPTCRCPVERICKNHILNNLVEAYLIQHPGNSRSEEDVQSMDARNKITQDMLQPKVRRSFSDEEGSSEDLLELSDVDSESSDISQPYVVCRQCPEYRRQAAQPPHCPAPEGEPGAPQALGDAPSTSVSLTTVQDYVCPLQGSHALCTCCFQPMPDRRAEREQDPRVAPQQCAVCLQPFCHLYWGCTRTGCYGCLAPFCELNLGDKCLDGVLNNNSYESDILKNYLATRGLTWKNMLTESLVALQRGVFLLSDYRVTGDTVLCYCCGLRSFRELTYQYRQNIPASELPVAVTSRPDCYWGRNCRTQVKAHHAMKFNHICEQTRFKN

SEQ ID NO: 61117 - DNA, 1992 bp, Artificial Sequence
  derived and/or modified sequence
atggaacgacccgaggaaggtaagcagtcaccacctccccagccttggggaagactgttgagattaggcgctgaggagggcgaacctcacgttctgctaaggaagagggaatggactatcggccggcgcagggggtgcgacctgtccttcccttcaaacaagctggtgtccggtgaccattgtcgaattgtggtggatgagaaatcggggcaggtgaccctcgaggatacatccacttccggtacggtgataaacaagctcaaagtcgtgaaaaaacagacatgtcccctgcagacgggcgatgttatttatctggtgtatagaaagaatgagccagaacacaacgtcgcctatttgtatgaatcactcagtgaaaagcagggaatgacccaagaatctttcgaagctaataaggagaacgtgtttcacggcaccaaagatacctccggggccggagccggtcgtggtgccgacccccgggttccaccatccagcccggctacccaggtgtgctttgaggagccacagccctccacatctacgagcgacctgtttcccactgctagtgcatcaagtaccgagccctccccggccggccgggaaagatctagttcttgcggttccggtggtggggggatctctcctaagggcagcggcccctcagtggcttcagacgaagtttcgagtttcgcatcagcactgcccgatcggaaaactgcaagtttttccagcctggagccccaggaccaggaagatctggagccagttaagaagaagatgagaggggacggggacctggacctgaacggccagttactggtggcacaaccccgacggaatgctcagaccgtgcacgaagatgtccgggccgccgctggtaagcctgacaagatggaggaaactctgacatgcattatttgccaggatcttttacacgactgcgtgtctctccagccctgcatgcatactttttgcgctgcatgttattccgggtggatggaaaggtcaagtctctgcccaacttgcaggtgcccggtggaacgaatctgcaagaatcatattcttaacaacctggtcgaagcgtacttgatccagcacccgggaaatagtaggagcgaggaggatgtgcagtcaatggatgcaaggaataaaattacacaggacatgctccagcccaaggtccggcgcagcttctccgacgaagagggaagctcagaagatttgctggagctgagcgacgtggatagtgaaagcagcgacatctctcagccatacgtagtgtgtaggcagtgtccagagtaccgcaggcaggcggcacagcctccccactgcccggctccagaaggagagcctggagcaccccaagcactgggtgatgcacccagtacatctgtatctttgacaactgtgcaagattacgtgtgtcccttacagggcagccacgccctgtgcacctgttgttttcagcccatgccagataggagggccgagagagaacaagacccaagagtggctccccagcagtgcgccgtctgcctccagcccttctgccacctgtactggggatgcacgcgcaccggctgctacgggtgcctcgctcccttctgcgaactcaacctcggggataagtgcctggacggagttctcaacaacaactcgtacgagagtgacatccttaagaattatctcgccacccggggcttgacttggaagaacatgctgacagaaagtttagtcgccctgcagcgtggcgttttcttactctccgattaccgggttactggcgatacagtattgtgctattgttgtggactgcgtagctttcgcgagcttacctatcagtaccgtcagaacatcccagccagcgaactgcctgtggccgtcacctcaagaccagattgctactggggacgtaactgccgaactcaagtaaaggcccaccatgcaatgaaatttaatcatatctgcgagcagacccggttcaaaaattag

SEQ ID NO: 61118 - DNA, 1992 bp, Artificial Sequence
  derived and/or modified sequence
atggagaggcctgaggagggcaagcagagccccccaccccagccctggggccgcctgctgcggctgggcgctgaggagggggagccccacgtgctgctgaggaagcgggagtggaccatcggcagaagaagaggctgtgacctgtccttccccagcaacaagctggtgtctggggaccactgcagaattgtggtggatgagaagagcggccaggtgaccctggaggacaccagcaccagcggcaccgtcatcaacaagctgaaggtggtgaagaagcagacctgccccctgcagacaggagatgtgatctacctggtgtacaggaagaatgaacctgagcacaacgtggcctacctgtatgagagcctgtctgagaagcagggcatgacccaggagagctttgaggccaacaaggaaaatgtgttccacggcaccaaggacaccagcggggccggggccggcagaggagctgacccccgggtgccccccagcagccctgccacccaggtgtgctttgaggagccccagcccagcaccagcaccagtgacctcttccccacagccagcgccagcagcacagagcccagccctgctggccgggagaggagcagcagctgtggcagcggcggcggcggcatcagccccaagggcagcggccccagcgtggccagtgatgaggtgtcctcctttgccagcgccctgcctgacaggaagacagccagcttcagcagcctggagccccaggaccaggaggacctggagcctgtgaagaagaagatgagaggagatggagacctggacctgaatggccagctgctggtggcccagcccaggagaaatgcccagacagtgcatgaagatgtgcgggctgctgctgggaagccagacaagatggaggagaccctgacctgcatcatctgccaggacctgctgcatgactgtgtgtccctgcagccctgcatgcacaccttctgtgccgcctgctacagcggctggatggagaggagcagcctgtgccccacctgccgctgccctgtggagcgcatctgcaagaaccacatcctgaacaacctggtggaggcctacctgatccagcaccctggcaacagccgctctgaggaggatgtgcagagcatggatgccaggaacaagatcacccaggacatgctgcagcccaaggtgagaagaagcttcagtgatgaggagggcagcagcgaggacctgctggagctgagtgatgtggacagcgagagcagtgacatcagccagccctacgtggtgtgccggcagtgcccagagtaccgccggcaggccgcccagcccccccactgcccagcccctgagggggagcccggggccccccaggccctgggagatgcccccagcacctctgtgtccctgaccaccgtgcaggactatgtgtgccccctgcagggcagccacgccctgtgcacctgctgcttccagcccatgccagaccggcgggcagagcgggagcaggacccccgggtggccccccagcagtgtgctgtgtgcctgcagcccttctgccacctgtactggggctgcaccaggacaggctgctacggctgcctggcccccttctgtgagctgaacctgggggacaagtgcctggatggagtgctgaacaacaacagctatgaaagtgacatcctgaagaactacctggccacccggggcctgacctggaagaacatgctgacagagagcctggtggccctgcagaggggcgtcttcctgctgagtgactacagagtgactggagacacagtgctgtgctactgctgcggcctgcgctccttccgggagctgacctaccagtaccggcagaacatcccagccagcgagctgcctgtggccgtgaccagcaggccagactgctactggggcaggaactgcaggacccaggtgaaggcccaccacgccatgaagttcaaccacatctgtgagcagacccgcttcaagaactag

SEQ ID NO: 61119 - DNA, 1992 bp, Artificial Sequence
  derived and/or modified sequence
atggagcggcccgaggagggcaagcagagcccccccccccagccctgggggaggctactgcgcctgggagcggaggagggcgaaccacacgtgctgttgcgaaaacgagaatggactattggtcgtcggagaggctgtgacctgagctttccatccaataaactcgtctccggcgatcattgtcgcatcgttgttgatgagaagagcggccaggtgactctggaagataccagcacatccggaaccgtcattaataaactgaaagtggtgaaaaaacagacatgcccacttcagaccggcgacgtgatctatttagtgtacaggaagaacgagccagagcacaatgtggcttatctgtacgaatccctttccgagaaacagggcatgactcaggagtcatttgaggcaaacaaggaaaatgtgttccatgggaccaaggatacgagcggcgctggggctggaaggggggccgacccccgcgtgcctccctcaagtcccgccacccaggtgtgcttcgaagaaccccagccctctacctcgacctccgacctgttcccgactgcgtccgcaagttccactgagccctcacccgccgggcgcgagcggtcctctagctgcgggtctggaggggggggaatatcccctaaaggctctggcccaagcgtggcctccgacgaagtgtccagctttgcatctgccttaccagaccggaagaccgcctctttctccagtttagagccccaggatcaggaggatctcgagccagtcaagaagaaaatgaggggagatggcgatctggatctgaacgggcagcttctggtagcgcaaccacgacgcaacgctcaaactgtgcacgaggacgtgcgagctgcggcgggcaagcctgacaagatggaagaaacattgacgtgcataatttgccaggacttgttgcatgactgtgtgtctctacaaccctgcatgcacaccttttgcgcagcctgctacagcggttggatggagcgctcatctctgtgccctacatgtaggtgcccagtcgagcgaatttgcaaaaaccatatcctgaacaaccttgttgaggcatacctgattcagcatcccggaaacagccggtccgaggaggacgtgcagtctatggatgcccgtaataaaatcacacaggatatgcttcagcctaaggtaagaaggtccttttctgacgaagagggaagcagtgaggacctcttggaactgtccgacgtggatagcgaaagctccgatatctctcagccatacgttgtctgcagacagtgtcccgaataccgtaggcaggccgcccagccaccccactgccccgcgccagagggcgaacctggcgcgcctcaggcactgggagatgctccctctacaagtgtgagtttgacaacggtacaggactatgtgtgccctctgcagggtagccacgcactgtgtacatgttgttttcagcctatgcctgaccggcgggccgaacgggagcaagacccccgagtggctccgcagcagtgcgcggtatgtcttcagccattctgtcatctctactggggctgtactaggactgggtgttatgggtgcctagccccattctgtgaattaaacctgggtgacaagtgcctggatggtgtgctgaacaacaacagctacgagtctgatattttgaagaattatcttgctaccaggggtctgacctggaaaaacatgctcacagagtctctcgtggcacttcagcggggagtcttccttctctcagattaccgagtaactggcgacactgttttatgttattgctgtggcctgcgcagtttcagggagctgacgtatcagtacagacaaaacattcctgccagtgaacttcccgtcgccgtgacaagtcggcctgattgctactgggggaggaattgccggacacaggtgaaggcccatcacgcaatgaagttcaaccacatctgcgagcaaaccaggtttaagaactag

SEQ ID NO: 61120 - DNA, 1992 bp, Artificial Sequence
  derived and/or modified sequence
atggagaggcctgaagaaggcaagcaatcacccccaccacaaccgtggggccgtttgctgcggctcggtgccgaggagggcgaaccacacgtcttgcttcgcaagcgcgaatggactatcgggagacgacgtggttgcgatttgagcttcccctccaacaaactggtatcaggcgatcattgcagaatcgtagtggatgagaagtccggacaagtgaccctggaggatacgtcgacctctggcaccgtgataaacaaactcaaggttgtaaaaaaacagacatgcccacttcagaccggcgacgtaatatatttggtttaccgcaaaaatgagcccgagcataatgtggcttacctttatgagtctctgagcgaaaaacaagggatgacccaggagtcttttgaggccaacaaagagaacgtatttcacggcacgaaggatacatccggcgcaggagctggcagaggcgcagacccacgtgtccccccaagtagtccggcaactcaggtgtgcttcgaggaaccgcaacccagtactagcacatcggatctgtttcccaccgctagcgcaagctcaacggagcctagccctgctggtcgagagaggtcttcgtcctgcggctcaggtggcggtggcatttcacccaaaggctcaggcccatccgttgccagcgacgaggttagcagtttcgcctctgctctgcctgatagaaaaacagcaagtttctcttccttggaacctcaggaccaggaggatctagagcccgtgaagaagaagatgcgtggagacggagatctggacctgaatggccagctgctcgtggctcaaccacgtcggaacgctcagaccgtccatgaagacgtaagggccgctgcaggcaagcctgataaaatggaagaaacccttacttgcatcatttgtcaggacctcctccatgactgcgtctccttgcaaccttgcatgcacacattttgcgctgcctgctactccggctggatggagcgttcttcactgtgcccaacctgtagatgtccagtggagaggatctgcaagaaccatatccttaataacctagtagaggcctatctcatccagcatcctggaaattcccgcagtgaggaggacgtacagagtatggatgcacgcaataagataacgcaggatatgcttcagccaaaagtgcggaggtctttctctgatgaagagggctcatctgaagatctgctggagctgtccgacgtggattccgagtcaagcgatatatcccagccgtacgtcgtgtgcagacagtgtcccgaatatcggagacaggcagcccagcccccacattgtccggctcccgagggagaacctggggctccacaggctctgggggacgctccttccacctcagtgtccttgactactgttcaggactacgtttgcccattacagggaagccatgccttgtgcacttgctgcttccaaccgatgccagaccgccgagccgagcgagagcaggatcctcgggtcgcacctcagcagtgcgccgtctgccttcagccattttgtcacctatactgggggtgtacgaggaccggttgttatgggtgtctggccccattctgtgaactgaatctgggggataagtgcctggacggtgttctgaacaataactcgtacgagagcgatatactcaagaattatttggcaacccgtggcctaacatggaagaacatgcttaccgaatccctggtggcgttgcagaggggtgtttttcttctctcagattacagggtgactggggatacggtgctatgttattgctgcggcctccgctccttcagagagctcacgtatcaatatcggcagaatatcccggcatctgagctgcccgtcgccgtgacctctcgccctgattgttactggggcaggaactgccgcacgcaggtgaaagcccatcacgcaatgaagttcaatcacatttgtgaacagaccagatttaagaactag

SEQ ID NO: 61121 - DNA, 3258 bp, Artificial Sequence
  derived and/or modified sequence
ctcttgacagcggcggcggcgcagccggttccgggttcggcgcggggcggggatgtgaatcccgatggagcggcccgaggaaggcaagcagtcgccgccgccgcagccctggggacggctcctgcgtctgggcgcggaggagggcgagccgcacgtcctcctgaggaagcgggagtggaccatcgggcggagacgaggttgcgacctttccttccccagcaataaactggtctctggagatcactgtagaattgtagtggatgaaaaatcaggtcaggtgacactggaagataccagcaccagtggaacagtgattaacaagctgaaggttgttaagaagcagacatgccctttacagactggggatgtcatctacttggtgtacaggaagaatgaaccggaacacaacgtggcatacctctatgaatctttaagtgaaaagcaaggcatgacacaagaatcctttgaagctaacaaggaaaatgtgttccatgggaccaaagatacctcaggtgcaggtgcagggcgaggggccgatccccgggtccctccgtcgtcgcccgccactcaggtgtgctttgaggaaccacagccatcaacatcgacgtcagacctcttccccacagcctcggcctcttccacggagccttctcctgcagggcgagagcgttcctccagttgtgggtctgggggtggtggcatctcccctaaaggaagtggtccctctgtggcaagtgatgaagtctccagctttgcctcagctctcccagacagaaagactgcgtccttttcgtcgttggaaccccaggatcaggaggatttggagcccgtgaagaagaaaatgagaggagatggggaccttgacctgaacgggcagttgttggtcgcacaaccgcgtagaaatgcccaaaccgtccacgaggacgtcagagcagcggctgggaagccagacaagatggaggagacgctgacatgcatcatctgccaggacctgctgcacgactgcgtgagtttgcagccctgcatgcacacgttctgcgcggcttgctactcgggctggatggagcgctcgtccctgtgtcctacctgccgctgtcccgtggagcggatctgtaaaaaccacatcctcaacaacctcgtggaagcatacctcatccagcatccaggcaatagtcgcagtgaagaagatgtgcaaagtatggatgccagaaataaaatcactcaagacatgctgcagcccaaagtcaggcggtctttttctgatgaagaagggagttcagaggacctgctggagctgtcagacgttgacagtgagtcctcagacattagccagccatacgtcgtgtgccggcagtgtcctgagtacagaaggcaggcggcgcagcctccccactgcccagcacccgagggcgagccaggagccccacaggccctgggggatgcaccctccacgtccgtcagcctgacgacagtccaggattacgtgtgccctctgcaaggaagccacgccctgtgcacctgctgcttccagcccatgcccgaccggagagcggagcgcgagcaggacccgcgtgtcgcccctcagcagtgtgcggtctgcctgcagcctttctgccacctgtactggggctgcacccggaccggctgctacggctgcctggccccgttttgtgagctcaacctgggtgacaagtgtctggacggcgtgctgaacaacaacagctacgagtcagacatcctgaagaattacctggcaaccagaggtttgacatggaaaaacatgttgaccgagagcctcgtggctctccagcggggagtgtttctgctgtctgattacagagtcacgggagacaccgttctgtgttactgctgtggcctgcgcagcttccgtgagctgacctatcagtatcggcagaacattcctgcttccgagttgccagtggccgtaacatcccgtcctgactgctactggggccgtaactgccgcactcaggtgaaagctcaccacgccatgaaattcaatcatatctgtgaacagacaaggttcaaaaactaagcatccagaggccctgagcagctttcagcactggaggtgaagagagcgtgtttttaaaatacagagacaagcacgtcaaggtgttttcacagccccctgagggaagggacgcagggtctccgacaggtgctctggggtgactcttctgtggagctttaccctctgagtgagaccctccccagagccccgggggccgcagcccgccctcctggtgagcgctgggcagggctcgtggtggcatcagcagcagagacgaagcctttctgtaacatgcggccgtcccgccgagaggggcagttttgctcttttgtacattttccgaaactacagttaaagcagaagtctgtttttaggaaaagtttcaagggagaagggcaagtttatcaaaaacattgtttcaggagaagggagcataagtttacagcctacaggacgtacacaatatcctgctgctgggaaaaccacagcattttatctattttttattttaataggtttggtgcttatcttctaataagatttaaatgtcacaaactgtagcacaaataatataatttataatttacaaattgactaaaattgggtatagtatggtatttgaaagaataagcatatgcttctgtttattaaaaaaagaaaccttccaatgtccaaaactgctaaccctcgacgtggccgccaagttagtcgctccttgctaaccggtgagtgaccgcggccccgagcctggggctggacgcaggtcccaggacatgctgctcccttgtgtgagtgaccgcggccccgagcctggggctggacgcaggtcccaggacgtgctgctcccttgtgtgagtgaccacggccccaagcccagggctggaggcaggtcccaggacgcgccgctccctcatgctgcccgggcccttcctccaagaccctacagagcctgaggggcaccttggcttccgcctgtgctagctttgccatgtcatctggaataatacttgaaattttgatttttggaaaaaaaagttttttatcttttgttgaaatcacctgttatccttgtttgtaaactgataacttttttgcttcttctcaggaatacagttttcaactgttgtcttgctcttgatagaaactgagaagcagcaatctgtatttgtggaggaaagtcctctcttttgcatattctaataaatgagccgcgtttgctcctc

SEQ ID NO: 61122 - DNA, 1992 bp, Artificial Sequence
  derived and/or modified sequence
atggagagacccgaggagggcaagcagagcccccccccccagccctggggcagactgctgagactgggcgccgaggagggcgagccccacgtgctgctgagaaagagagagtggaccatcggcagaagaagaggctgcgacctgagcttccccagcaacaagctggtgagcggcgaccactgcagaatcgtggtggacgagaagagcggccaggtgaccctggaggacaccagcaccagcggcaccgtgatcaacaagctgaaggtggtgaagaagcagacctgccccctgcagaccggcgacgtgatctacctggtgtacagaaagaacgagcccgagcacaacgtggcctacctgtacgagagcctgagcgagaagcagggcatgacccaggagagcttcgaggccaacaaggagaacgtgttccacggcaccaaggacaccagcggcgccggcgccggcagaggcgccgaccccagagtgccccccagcagccccgccacccaggtgtgcttcgaggagccccagcccagcaccagcaccagcgacctgttccccaccgccagcgccagcagcaccgagcccagccccgccggcagagagagaagcagcagctgcggcagcggcggcggcggcatcagccccaagggcagcggccccagcgtggccagcgacgaggtgagcagcttcgccagcgccctgcccgacagaaagaccgccagcttcagcagcctggagccccaggaccaggaggacctggagcccgtgaagaagaagatgagaggcgacggcgacctggacctgaacggccagctgctggtggcccagcccagaagaaacgcccagaccgtgcacgaggacgtgagagccgccgccggcaagcccgacaagatggaggagaccctgacctgcatcatctgccaggacctgctgcacgactgcgtgagcctgcagccctgcatgcacaccttctgcgccgcctgctacagcggctggatggagagaagcagcctgtgccccacctgcagatgccccgtggagagaatctgcaagaaccacatcctgaacaacctggtggaggcctacctgatccagcaccccggcaacagcagaagcgaggaggacgtgcagagcatggacgccagaaacaagatcacccaggacatgctgcagcccaaggtgagaagaagcttcagcgacgaggagggcagcagcgaggacctgctggagctgagcgacgtggacagcgagagcagcgacatcagccagccctacgtggtgtgcagacagtgccccgagtacagaagacaggccgcccagcccccccactgccccgcccccgagggcgagcccggcgccccccaggccctgggcgacgcccccagcaccagcgtgagcctgaccaccgtgcaggactacgtgtgccccctgcagggcagccacgccctgtgcacctgctgcttccagcccatgcccgacagaagagccgagagagagcaggaccccagagtggccccccagcagtgcgccgtgtgcctgcagcccttctgccacctgtactggggctgcaccagaaccggctgctacggctgcctggcccccttctgcgagctgaacctgggcgacaagtgcctggacggcgtgctgaacaacaacagctacgagagcgacatcctgaagaactacctggccaccagaggcctgacctggaagaacatgctgaccgagagcctggtggccctgcagagaggcgtgttcctgctgagcgactacagagtgaccggcgacaccgtgctgtgctactgctgcggcctgagaagcttcagagagctgacctaccagtacagacagaacatccccgccagcgagctgcccgtggccgtgaccagcagacccgactgctactggggcagaaactgcagaacccaggtgaaggcccaccacgccatgaagttcaaccacatctgcgagcagaccagattcaagaactag

SEQ ID NO: 61123 - protein, 652 aa, Artificial Sequence
  derived and/or modified sequence
MERPEEGKQSPPPQPWGRLLRLGAEEGEPHVLLRKREWTIGRRRGCDLSFPSNKLVSGDHCRIVVDEKSGQVTLEDTSTSGTVINKLKVVKKQTCPLQTGDVIYLVYRKNEPEHNVAYLYESLSEKQGMTQESFDTSGAGAGRGADPRVPPSSPATQVCFEEPQPSTSTSDLFPTASASSTEPSPAGRERSSSCGSGGGGISPKGSGPSVASDEVSSFASALPDRKTASFSSLEPQDQEDLEPVKKKMRGDGDLDLNGQLLVAQPRRNAQTVHEDVRAAAGKPDKMEETLTCIICQDLLHDCVSLQPCMHTFCAACYSGWMERSSLCPTCRCPVERICKNHILNNLVEAYLIQHPDKSRSEEDVQSMDARNKITQDMLQPKVRRSFSDEEGSSEDLLELSDVDSESSDISQPYVVCRQCPEYRRQAAQPPHCPAPEGEPGAPQALGDAPSTSVSLTTAVQDYVCPLQGSHALCTCCFQPMPDRRAEREQDPRVAPQQCAVCLQPFCHLYWGCTRTGCYGCLAPFCELNLGDKCLDGVLNNNSYESDILKNYLATRGLTWKNMLTESLVALQRGVFLLSDYRVTGDTVLCYCCGLRSFRELTYQYRQNIPASELPVAVTSRPDCYWGRNCRTQVKAHHAMKFNHICEQTRFKN

SEQ ID NO: 61124 - protein, 223 aa, Artificial Sequence
  derived and/or modified sequence
MERPEEGKQSPPPQPWGRLLRLGAEEGEPHVLLRKREWTIGRRRGCDLSFPSNKLVSGDHCRIVVDEKSGQVTLEDTSTSGTVINKLKVVKKQTCPLQTGDVIYLVYRKNEPEHNVAYLYESLSEKQGMTQESFDTSGAGAGRGADPRVPPSSPATQVCFEEPQPSTSTSDLFPTASASSTEPSPAGRERSSSCGSGGGGISPKGSGPSVASDEVSSFASALP

SEQ ID NO: 61125 - DNA, 1959 bp, Artificial Sequence
  derived and/or modified sequence
atggagcgacctgaagagggcaagcaatctccgcctccgcaaccttggggacgtctcctccgtttgggcgcagaagagggcgagccccatgtgctgctgcgaaaacgggagtggacgatcgggaggcggagggggtgcgatctctcttttccaagtaataaacttgtttcaggggaccattgccggatcgtcgtcgacgaaaagtccgggcaagtgacactggaggatacgtctacatctggtactgtcatcaacaaacttaaggtggtgaagaagcagacttgtcctctgcagacaggagacgtgatttacctggtgtacagaaagaatgagccagaacacaatgtcgcatacctgtacgagtcgctatctgagaagcaaggaatgacccaggaaagctttgacaccagcggtgccggcgccggccggggagctgaccctcgggtgcccccgtcgagtcctgccactcaagtgtgctttgaggaaccccagccatcaacatctaccagtgaccttttccccactgcttctgcttcatctacagagcctagccccgctggcagagagagaagttcgagctgcggctccggtggggggggaatatcgcccaagggatcagggccttccgtggcgtccgacgaagtgtctagttttgcatccgcgctacccgacagaaagacagcatcctttagctcacttgagccacaagaccaggaggacttggaacccgtcaaaaagaagatgcggggcgacggtgatctcgacctaaacggacagctactcgtagctcagcctcggagaaatgctcagactgtccatgaggacgtccgtgccgccgccggaaaacctgataagatggaggagaccctgacttgcatcatctgccaggaccttctccacgactgcgtatcactgcaaccctgcatgcacacattttgtgccgcttgttattctggatggatggagcgctcttccctgtgtcccacatgcaggtgtccagtagagcgtatttgtaagaaccatatcttaaacaaccttgttgaggcctatctgatacagcaccccgataaatctcggagcgaggaggacgtgcagtcgatggacgcccgcaacaaaataacacaggacatgctgcagccaaaggtgcggaggagtttctccgatgaggaagggtcctcagaggatctcttggagctttcggacgtggactccgagtcctccgatatctctcaaccttatgtggtgtgtagacagtgccctgaatatagaagacaggctgcgcagcctccacattgccccgcacccgagggcgagccaggggctccccaagcgttaggcgatgcaccttcaaccagcgtgtccctcacaaccgccgtccaggattatgtgtgccccctgcaaggatcccacgctctctgcacctgctgcttccagccaatgcctgaccgccgggcagagcgggagcaggacccaagggttgccccccaacagtgtgccgtgtgtttacaaccattctgtcatctgtactggggatgtacgcgtacaggctgttacgggtgcctggcccccttttgcgaactaaaccttggcgataagtgcttagatggcgtgctgaacaataattcatacgaatctgacatcctcaaaaattatctagccaccagagggctcacgtggaagaacatgctcacagaaagtttggtggcactacagaggggagtctttctgctctcagactaccgggtcactggggatacagtgttatgttattgttgtgggctgaggtccttccgtgaactgacgtaccaataccgtcaaaatattcctgcatctgagctgccagtcgctgtaacgagccgccctgactgttattggggacggaactgccgcacccaggttaaggcccatcacgccatgaaatttaaccatatatgcgaacaaactagattcaaaaactag

SEQ ID NO: 61126 - DNA, 672 bp, Artificial Sequence
  derived and/or modified sequence
atggaacgccccgaggagggaaagcaatctccaccacctcagccatggggccgcctcctccggcttggggccgaagaaggcgaacctcacgtgttgctgagaaaaagggagtggactatcggacggcggagaggttgcgaccttagctttccaagcaataaactggtatccggtgatcattgcaggattgtggtggacgagaagtctggtcaggttaccttagaggatacctccacctcgggaactgtgatcaacaagctcaaggtggtgaagaaacagacttgtccattgcagaccggagacgtgatatacctggtgtatcgcaagaacgagcctgagcacaatgttgcttacctgtatgaaagcctctccgagaagcaggggatgacacaagaatcctttgacacttctggcgctggcgctgggcgcggcgccgatccacgcgttccaccatcgagtccagccactcaggtttgcttcgaagagccacagccctcgacctccaccagtgatttgtttcccaccgcttctgcgtctagcaccgagccctctcccgccggccgggagcgcagttcctcatgtggctcgggcggggggggcatatctcccaaaggctcaggcccctctgtcgcatcagacgaggtgtctagttttgctagcgccctcccttag

SEQ ID NO: 61127 - DNA, 1959 bp, Artificial Sequence
  derived and/or modified sequence
atggagaggcctgaggagggcaagcagagccccccaccccagccctggggccgcctgctgcggctgggcgctgaggagggggagccccacgtgctgctgaggaagcgggagtggaccatcggcagaagaagaggctgtgacctgtccttccccagcaacaagctggtgtctggggaccactgcagaattgtggtggatgagaagagcggccaggtgaccctggaggacaccagcaccagcggcaccgtcatcaacaagctgaaggtggtgaagaagcagacctgccccctgcagacaggagatgtgatctacctggtgtacaggaagaatgaacctgagcacaacgtggcctacctgtatgagagcctgtctgagaagcagggcatgacccaggagagctttgacaccagcggggccggggccggcagaggagctgacccccgggtgccccccagcagccctgccacccaggtgtgctttgaggagccccagcccagcaccagcaccagtgacctcttccccacagccagcgccagcagcacagagcccagccctgctggccgggagaggagcagcagctgtggcagcggcggcggcggcatcagccccaagggcagcggccccagcgtggccagtgatgaggtgtcctcctttgccagcgccctgcctgacaggaagacagccagcttcagcagcctggagccccaggaccaggaggacctggagcctgtgaagaagaagatgagaggagatggagacctggacctgaatggccagctgctggtggcccagcccaggagaaatgcccagacagtgcatgaagatgtgcgggctgctgctgggaagccagacaagatggaggagaccctgacctgcatcatctgccaggacctgctgcatgactgtgtgtccctgcagccctgcatgcacaccttctgtgccgcctgctacagcggctggatggagaggagcagcctgtgccccacctgccgctgccctgtggagcgcatctgcaagaaccacatcctgaacaacctggtggaggcctacctgatccagcacccagacaagagccgctctgaggaggatgtgcagagcatggatgccaggaacaagatcacccaggacatgctgcagcccaaggtgagaagaagcttcagtgatgaggagggcagcagcgaggacctgctggagctgagtgatgtggacagcgagagcagtgacatcagccagccctacgtggtgtgccggcagtgcccagagtaccgccggcaggccgcccagcccccccactgcccagcccctgagggggagcccggggccccccaggccctgggagatgcccccagcacctctgtgtccctgaccacagctgtgcaggactatgtgtgccccctgcagggcagccacgccctgtgcacctgctgcttccagcccatgccagacagaagagctgagcgggagcaggacccccgggtggccccccagcagtgtgctgtgtgcctgcagcccttctgccacctgtactggggctgcaccaggacaggctgctacggctgcctggcccccttctgtgagctgaacctgggggacaagtgcctggatggagtgctgaacaacaacagctatgaaagtgacatcctgaagaactacctggccacccggggcctgacctggaagaacatgctgacagagagcctggtggccctgcagaggggcgtcttcctgctgagtgactacagagtgactggagacacagtgctgtgctactgctgcggcctgcggagcttccgggagctgacctaccagtaccggcagaacatcccagccagcgagctgcctgtggccgtgaccagcaggccagactgctactggggcaggaactgcaggacccaggtgaaggcccaccacgccatgaagttcaaccacatctgtgagcagacccgcttcaagaactag

SEQ ID NO: 61128 - DNA, 672 bp, Artificial Sequence
  derived and/or modified sequence
atggagaggcctgaggagggcaagcagagccccccaccccagccctggggccgcctgctgcggctgggcgctgaggagggggagccccacgtgctgctgaggaagcgggagtggaccatcggcagaagaagaggctgtgacctgtccttccccagcaacaagctggtgtctggggaccactgcagaattgtggtggatgagaagagcggccaggtgaccctggaggacaccagcaccagcggcaccgtcatcaacaagctgaaggtggtgaagaagcagacctgccccctgcagacaggagatgtgatctacctggtgtacaggaagaatgaacctgagcacaacgtggcctacctgtatgagagcctgtctgagaagcagggcatgacccaggagagctttgacaccagcggggccggggccggcagaggagctgacccccgggtgccccccagcagccctgccacccaggtgtgctttgaggagccccagcccagcaccagcaccagtgacctcttccccacagccagcgccagcagcacagagcccagccctgctggccgggagaggagcagcagctgtggcagcggcggcggcggcatcagccccaagggcagcggccccagcgtggccagtgatgaggtgtcctcctttgccagcgccctgccctag

SEQ ID NO: 61129 - DNA, 1959 bp, Artificial Sequence
  derived and/or modified sequence
atggagcggcccgaggagggcaagcagagcccccccccccagccctggggacgcctgttgcgcctgggtgctgaagagggagaaccacacgtattactgcgcaagcgagagtggactattggcagacgaaggggctgcgatctgagcttcccatcaaacaagctggtctctggggatcactgtcgcatcgtggttgacgaaaagtccggtcaggtcacgttggaggatacgtctacgtcagggaccgttatcaataagttgaaggtcgtgaagaaacagacatgccccctgcagaccggcgacgtgatttatctcgtttataggaagaatgagcccgaacacaatgtggcttacctgtacgaaagcttatctgaaaagcaaggaatgactcaggaaagtttcgacaccagcggggccggagccggcaggggtgctgaccctcgagtacctcccagcagtcccgcaacccaggtttgtttcgaggagccacagccatccacctcaaccagtgacctcttccctaccgccagcgcctcctctaccgagccttcccctgccgggcgcgagcggtcgtcgagctgtggctccggcggcggtggaatatcacccaagggttccggtccttcggtcgcaagcgacgaggtcagcagtttcgccagcgcgctgccagacagaaagacagccagtttctcctcactcgaacctcaggaccaagaggatctcgagccggttaaaaaaaagatgcggggagacggagatctcgacctgaacggacaactactcgtagcccaaccacgccggaatgcccagaccgtgcatgaggatgtacgcgctgcagcaggaaaacccgataagatggaggaaactttgacgtgtattatctgccaggatcttctgcacgactgtgtgtccctccagccctgcatgcatactttctgcgccgcctgttacagcgggtggatggaacggagctcactctgtccgacctgtaggtgcccggtggaacgaatatgtaaaaaccatatcctgaacaacttagtcgaagcttatctgatccagcaccccgacaagtcacgctctgaggaggacgtgcaatctatggacgcacgcaataaaattacccaagacatgttacagcctaaagtacggcgatctttttctgatgaggagggttcttccgaagaccttctcgagctcagtgatgtcgattccgagtcttccgacatttcccagccctatgtggtttgtaggcagtgtcccgagtatagacgtcaggctgcacaacccccccactgcccagccccagaaggagaacctggagccccacaggccctgggggacgctccatcaacctcagtttcgctcactaccgccgtccaggattatgtctgtccccttcagggctcccatgcgctgtgcacctgttgctttcaaccaatgccggacaggagggccgagagagagcaagacccacgggtcgctccacagcagtgtgccgtgtgtctccaacctttctgccatttgtactgggggtgtacgcggacgggatgttacggatgcctcgcccccttctgcgaactcaatcttggggacaaatgcctcgacggagtcctcaataataacagctacgagagtgacatcctgaaaaactacctggcaactagaggcctcacctggaagaatatgcttaccgagtccctagtggccctgcagaggggcgtcttcctactctctgactaccgggttaccggcgatactgtgctctgctactgctgtggactgaggagcttcagagagcttacataccagtaccggcagaacatccccgcctccgaactgccagtcgctgtgacttccagaccagactgctattgggggcgaaattgtaggacccaggtgaaggcccaccacgccatgaagtttaatcacatatgcgagcagactaggtttaagaactag

SEQ ID NO: 61130 - DNA, 672 bp, Artificial Sequence
  derived and/or modified sequence
atggagcggcccgaggagggcaagcagagcccccccccccagccctggggccgcctgcttcggctgggtgctgaggaaggagaaccgcatgtcctgctgcggaaacgtgagtggactatcggccgccggagaggttgcgacctgagttttcccagcaataagcttgtaagcggagatcattgcaggattgtggtggatgagaagtccggccaggtgaccctggaggacacctctacctccggtacagtgataaacaaactcaaagtcgtcaaaaagcaaacttgtccgctgcagaccggagatgtgatttacctggtttaccggaaaaatgaacccgagcataatgtagcctatctctacgagagcctgtcagagaagcaaggcatgacacaagaatccttcgatacaagtggagccggcgccggtcgtggcgctgatccccgggtgccaccgtccagtcccgcaacccaagtgtgcttcgaggagccacagcccagcacaagcacatctgatctgttccctaccgcaagcgcatcctccacagaacccagccccgcaggccgcgaacgcagctcctcatgcggatccgggggcggaggaatcagtccaaagggatcaggaccaagcgtggcttcagacgaggtgtcgtcctttgcctcagccttaccatag

SEQ ID NO: 61131 - DNA, 1959 bp, Artificial Sequence
  derived and/or modified sequence
atggaaaggccggaggagggaaaacaaagtccccctccccaaccctgggggaggctactccgccttggtgccgaggagggagaacctcacgtgctgctgcgcaaacgagagtggaccatcggacgcaggcgcggatgcgaccttagcttcccgtccaataaattggtttctggcgatcactgtcgcatcgtagtggacgaaaaatctggccaggtgactcttgaggatacctctacctccgggacggtcatcaacaagctcaaagtcgtcaaaaaacagacctgccctttgcagactggcgacgtgatttacctcgtatatagaaaaaatgagcccgagcacaacgtggcctatttgtacgagagcttgtccgagaagcagggaatgacccaggaatcgtttgatacttctggcgcaggcgctgggaggggagccgacccgagggtgccaccgtcttcccctgccacccaggtatgtttcgaggagcctcagccgtctacatctacctccgatctcttcccaaccgcttccgcatcttctaccgagccttctcctgcgggtcgggagcggtccagtagttgcggatctggtggtggaggcatctctcccaaaggctccggcccaagcgtcgcttccgacgaagtctcctcctttgctagcgcactgcctgaccgtaaaacggctagcttcagcagtttggagccacaggaccaggaagacttagagccggtgaaaaaaaagatgagaggagacggagatctcgatttgaatggacagctgttggtggcacagcctaggcgaaacgctcagaccgttcatgaggatgttagggccgctgctggaaagcctgataagatggaggaaacgctgacatgtataatttgccaagatctattgcacgactgtgtaagcctgcaaccatgtatgcatactttctgcgctgcatgctactcaggttggatggaacggagctcgttgtgtcctacatgtagatgtccagtcgagcgaatctgtaaaaaccacatcctgaacaacctggtcgaggcgtatctgatccagcatcctgataagtcccgctccgaagaggatgtacagtcgatggatgcgaggaataaaataacccaggatatgctccaaccaaaagtcaggcgtagcttcagtgacgaggaggggagcagtgaggacttgctggaattatcggatgtagactctgaaagctcagacattagccagccatatgtggtgtgtcgccaatgcccagaatatcgcaggcaggcggcacagccgcctcactgccccgcaccagagggcgagcctggggctccacaggccctcggagatgctcctagtacgagcgtgtcgcttaccacagccgtgcaggattatgtctgtcctttgcagggatcgcatgctctgtgtacctgttgctttcagccaatgcccgacaggcgggctgaaagggagcaagacccacgtgtcgctcctcagcagtgtgccgtgtgtctgcaacctttctgtcacctctattgggggtgcacacggaccggctgttatggatgtctggcacccttctgcgaactcaatctgggggataagtgtctggacggggtgctaaacaataattcatacgaatcagacatcctgaagaattacctggcaactagagggctcacttggaaaaatatgctgacagagagtcttgtggcacttcagcggggagtgtttttacttagcgattacagggtcactggggacactgttctgtgctattgttgtggactcagaagtttcagggagcttacctatcagtatcgccagaatatcccggcatctgagctgcctgttgccgtaacgtcacgtcccgactgctattggggcaggaactgccggacccaggtgaaggcccatcacgcaatgaaattcaaccacatttgcgagcagacacgcttcaagaattag

SEQ ID NO: 61132 - DNA, 672 bp, Artificial Sequence
  derived and/or modified sequence
atggaaaggcccgaggaaggaaagcagtcacctccacctcaaccatggggtaggctgcttaggcttggcgcagaggaaggcgaacctcatgtgctgctaaggaagcgggaatggactattgggcgacgccgaggctgtgatctctccttccccagcaacaaacttgtgagtggcgaccactgcagaatcgtggtggatgaaaaatccggtcaagtgactttggaggacaccagtactagcggcactgttatcaacaaactgaaggttgttaaaaagcaaacatgcccattgcagacaggcgacgtcatctatctcgtgtaccgtaaaaacgagccagagcacaatgttgcatacctctacgaatccttatccgagaaacagggcatgacacaggagtcatttgatacttccggtgccggagcaggcagaggcgctgaccccagagtgccaccgtcgtcacctgccactcaggtatgtttcgaggagccacagcccagtacaagtacatcagacctgttccctactgcatccgcatcatcgacagaaccgtcacccgctggcagggaacggtctagttcttgtggctcgggaggtgggggaatcagcccaaaagggagtgggccaagcgtcgcctcagatgaggtgagttccttcgccagtgccttgccctag

SEQ ID NO: 61133 - DNA, 3250 bp, Artificial Sequence
  derived and/or modified sequence
ggatcagctgagggagccgcaatgtctcttgacagcggcggcggcgcagccggttccgggttcggcgcggggcggggatgtgaatcccgatggagcggcccgaggaaggcaagcagtcgccgccgccgcagccctggggacggctcctgcgtctgggcgcggaggagggcgagccgcacgtcctcctgaggaagcgggagtggaccatcgggcggagacgaggttgcgacctttccttccccagcaataaactggtctctggagatcactgtagaattgtagtggatgaaaaatcaggtcaggtgacactggaagataccagcaccagtggaacagtgattaacaagctgaaggttgttaagaagcagacatgccctttacagactggggatgtcatctacttggtgtacaggaagaatgaaccggaacacaacgtggcatacctctatgaatctttaagtgaaaagcaaggcatgacacaagaatcctttgatacctcaggtgcaggtgcagggcgaggggccgatccccgggtccctccgtcgtcgcccgccactcaggtgtgctttgaggaaccacagccatcaacatcgacgtcagacctcttccccacagcctcggcctcttccacggagccttctcctgcagggcgagagcgttcctccagttgtgggtctgggggtggtggcatctcccctaaaggaagtggtccctctgtggcaagtgatgaagtctccagctttgcctcagctctcccagacagaaagactgcgtccttttcgtcgttggaaccccaggatcaggaggatttggagcccgtgaagaagaaaatgagaggagatggggaccttgacctgaacgggcagttgttggtcgcacaaccgcgtagaaatgcccaaaccgtccacgaggacgtcagagcagcggctgggaagccagacaagatggaggagacgctgacatgcatcatctgccaggacctgctgcacgactgcgtgagtttgcagccctgcatgcacacgttctgcgcggcttgctactcgggctggatggagcgctcgtccctgtgtcctacctgccgctgtcccgtggagcggatctgtaaaaaccacatcctcaacaacctcgtggaagcatacctcatccagcatccagacaagagtcgcagtgaagaagatgtgcaaagtatggatgccagaaataaaatcactcaagacatgctgcagcccaaagtcaggcggtctttttctgatgaagaagggagttcagaggacctgctggagctgtcagacgttgacagtgagtcctcagacattagccagccatacgtcgtgtgccggcagtgtcctgagtacagaaggcaggcggcgcagcctccccactgcccagcacccgagggcgagccaggagccccacaggccctgggggatgcaccctccacgtccgtcagcctgacgacagcagtccaggattacgtgtgccctctgcaaggaagccacgccctgtgcacctgctgcttccagcccatgcccgaccggagagcggagcgcgagcaggacccgcgtgtcgcccctcagcagtgtgcggtctgcctgcagcctttctgccacctgtactggggctgcacccggaccggctgctacggctgcctggccccgttttgtgagctcaacctgggtgacaagtgtctggacggcgtgctgaacaacaacagctacgagtcagacatcctgaagaattacctggcaaccagaggtttgacatggaaaaacatgttgaccgagagcctcgtggctctccagcggggagtgtttctgctgtctgattacagagtcacgggagacaccgttctgtgttactgctgtggcctgcgcagcttccgtgagctgacctatcagtatcggcagaacattcctgcttccgagttgccagtggccgtaacatcccgtcctgactgctactggggccgtaactgccgcactcaggtgaaagctcaccacgccatgaaattcaatcatatctgtgaacagacaaggttcaaaaactaagcatccagaggccctgagcagctttcagcactggaggtgaagagagcgtgtttttaaaatacagagacaagcacgtcaaggtgttttcacagccccctgagggaagggacgcagggtctccgacaggtgctctggggtgactcttctgtggagctttaccctctgagtgagaccctccccagagccccgggggccgcagcccgccctcctggtgagcgctgggcagggctcgtggtggcatcagcagcagagacgaagcctttctgtaacatgcggccgtcccgccgagaggggcagttttgctcttttgtacattttccgaaactacagttaaagcagaagtctgtttttaggaaaagtttcaagggagaagggcaagtttatcaaaaacattgtttcaggagaagggagcataagtttacagcctacaggacgtacacaatatcctgctgctgggaaaaccacagcattttatctattttttattttaataggtttggtgcttatcttctaataagatttaaatgtcacaaactgtagcacaaataatataatttataatttacaaattgactaaaattgggtatagtatggtatttgaaagaataagcatatgcttctgtttattaaaaaaagaaaccttccaatgtccaaaactgctaaccctcgacgtggccgccaagttagtcgctccttgctaaccggtgagtgaccgcggccccgagcctggggctggacgcaggtcccaggacatgctgctcccttgtgtgagtgaccgcggccccgagcctggggctggacgcaggtcccaggacgtgctgctcccttgtgtgagtgaccacggccccaagcccagggctggaggcaggtcccaggacgcgccgctccctcatgctgcccgggcccttcctccaagaccctacagagcctgaggggcaccttggcttccgcctgtgctagctttgccatgtcatctggaataatacttgaaattttgatttttggaaaaaaaagttttttatcttttgttgaaatcacctgttatccttgtttgtaaactgataacttttttgcttcttctcaggaatacagttttcaactgttgtcttgctcttgatagaaactgagaagcagcaatctgtatttgtggaggaaagtcctctcttttgcatattctaataaatgagccgcgtttgctcctc

SEQ ID NO: 61134 - DNA, 875 bp, Artificial Sequence
  derived and/or modified sequence
cgagggggctgcggcgggcggcgaagggggacctggttgcggccgtgggagggggcgcccgccggcgtccaggccgggctgcggggctgcgtgggcgcgggcggccgggccggggcccgcggggtggggcgggcgccgagtctcggcctctggggtcgggagtctccatgggcgtttccggggtctccgcagatgtgaatcccgatggagcggcccgaggaaggcaagcagtcgccgccgccgcagccctggggacggctcctgcgtctgggcgcggaggagggcgagccgcacgtcctcctgaggaagcgggagtggaccatcgggcggagacgaggttgcgacctttccttccccagcaataaactggtctctggagatcactgtagaattgtagtggatgaaaaatcaggtcaggtgacactggaagataccagcaccagtggaacagtgattaacaagctgaaggttgttaagaagcagacatgccctttacagactggggatgtcatctacttggtgtacaggaagaatgaaccggaacacaacgtggcatacctctatgaatctttaagtgaaaagcaaggcatgacacaagaatcctttgatacctcaggtgcaggtgcagggcgaggggccgatccccgggtccctccgtcgtcgcccgccactcaggtgtgctttgaggaaccacagccatcaacatcgacgtcagacctcttccccacagcctcggcctcttccacggagccttctcctgcagggcgagagcgttcctccagttgtgggtctgggggtggtggcatctcccctaaaggaagtggtccctctgtggcaagtgatgaagtctccagctttgcctcagctctcccaga

SEQ ID NO: 61135 - DNA, 1959 bp, Artificial Sequence
  derived and/or modified sequence
atggagagacccgaggagggcaagcagagcccccccccccagccctggggcagactgctgagactgggcgccgaggagggcgagccccacgtgctgctgagaaagagagagtggaccatcggcagaagaagaggctgcgacctgagcttccccagcaacaagctggtgagcggcgaccactgcagaatcgtggtggacgagaagagcggccaggtgaccctggaggacaccagcaccagcggcaccgtgatcaacaagctgaaggtggtgaagaagcagacctgccccctgcagaccggcgacgtgatctacctggtgtacagaaagaacgagcccgagcacaacgtggcctacctgtacgagagcctgagcgagaagcagggcatgacccaggagagcttcgacaccagcggcgccggcgccggcagaggcgccgaccccagagtgccccccagcagccccgccacccaggtgtgcttcgaggagccccagcccagcaccagcaccagcgacctgttccccaccgccagcgccagcagcaccgagcccagccccgccggcagagagagaagcagcagctgcggcagcggcggcggcggcatcagccccaagggcagcggccccagcgtggccagcgacgaggtgagcagcttcgccagcgccctgcccgacagaaagaccgccagcttcagcagcctggagccccaggaccaggaggacctggagcccgtgaagaagaagatgagaggcgacggcgacctggacctgaacggccagctgctggtggcccagcccagaagaaacgcccagaccgtgcacgaggacgtgagagccgccgccggcaagcccgacaagatggaggagaccctgacctgcatcatctgccaggacctgctgcacgactgcgtgagcctgcagccctgcatgcacaccttctgcgccgcctgctacagcggctggatggagagaagcagcctgtgccccacctgcagatgccccgtggagagaatctgcaagaaccacatcctgaacaacctggtggaggcctacctgatccagcaccccgacaagagcagaagcgaggaggacgtgcagagcatggacgccagaaacaagatcacccaggacatgctgcagcccaaggtgagaagaagcttcagcgacgaggagggcagcagcgaggacctgctggagctgagcgacgtggacagcgagagcagcgacatcagccagccctacgtggtgtgcagacagtgccccgagtacagaagacaggccgcccagcccccccactgccccgcccccgagggcgagcccggcgccccccaggccctgggcgacgcccccagcaccagcgtgagcctgaccaccgccgtgcaggactacgtgtgccccctgcagggcagccacgccctgtgcacctgctgcttccagcccatgcccgacagaagagccgagagagagcaggaccccagagtggccccccagcagtgcgccgtgtgcctgcagcccttctgccacctgtactggggctgcaccagaaccggctgctacggctgcctggcccccttctgcgagctgaacctgggcgacaagtgcctggacggcgtgctgaacaacaacagctacgagagcgacatcctgaagaactacctggccaccagaggcctgacctggaagaacatgctgaccgagagcctggtggccctgcagagaggcgtgttcctgctgagcgactacagagtgaccggcgacaccgtgctgtgctactgctgcggcctgagaagcttcagagagctgacctaccagtacagacagaacatccccgccagcgagctgcccgtggccgtgaccagcagacccgactgctactggggcagaaactgcagaacccaggtgaaggcccaccacgccatgaagttcaaccacatctgcgagcagaccagattcaagaactag

SEQ ID NO: 61136 - DNA, 672 bp, Artificial Sequence
  derived and/or modified sequence
atggagagacccgaggagggcaagcagagcccccccccccagccctggggcagactgctgagactgggcgccgaggagggcgagccccacgtgctgctgagaaagagagagtggaccatcggcagaagaagaggctgcgacctgagcttccccagcaacaagctggtgagcggcgaccactgcagaatcgtggtggacgagaagagcggccaggtgaccctggaggacaccagcaccagcggcaccgtgatcaacaagctgaaggtggtgaagaagcagacctgccccctgcagaccggcgacgtgatctacctggtgtacagaaagaacgagcccgagcacaacgtggcctacctgtacgagagcctgagcgagaagcagggcatgacccaggagagcttcgacaccagcggcgccggcgccggcagaggcgccgaccccagagtgccccccagcagccccgccacccaggtgtgcttcgaggagccccagcccagcaccagcaccagcgacctgttccccaccgccagcgccagcagcaccgagcccagccccgccggcagagagagaagcagcagctgcggcagcggcggcggcggcatcagccccaagggcagcggccccagcgtggccagcgacgaggtgagcagcttcgccagcgccctgccctag

SEQ ID NO: 61137 - protein, 572 aa, Artificial Sequence
  derived and/or modified sequence
MERPEEGKQSPPPQPWGRLLRLGAEEGEPHVLLRKREWTIGRRRGCDLSFPSNKLVSGDHCRIVVDEKSGQVTLEDTSTSGTVINKLKVVKKQTCPLQTGDVIYLVYRKNEPEHRSGGGGISPKGSGPSVASDEVSSFASALPDRKTASFSSLEPQDQEDLEPVKKKMRGDGDLDLNGQLLVAQPRRNAQTVHEDVRAAAGKPDKMEETLTCIICQDLLHDCVSLQPCMHTFCAACYSGWMERSSLCPTCRCPVERICKNHILNNLVEAYLIQHPDKSRSEEDVQSMDARNKITQDMLQPKVRRSFSDEEGSSEDLLELSDVDSESSDISQPYVVCRQCPEYRRQAAQPPHCPAPEGEPGAPQALGDAPSTSVSLTTAVQDYVCPLQGSHALCTCCFQPMPDRRAEREQDPRVAPQQCAVCLQPFCHLYWGCTRTGCYGCLAPFCELNLGDKCLDGVLNNNSYESDILKNYLATRGLTWKNMLTESLVALQRGVFLLSDYRVTGDTVLCYCCGLRSFRELTYQYRQNIPASELPVAVTSRPDCYWGRNCRTQVKAHHAMKFNHICEQTRFKN

SEQ ID NO: 61138 - DNA, 1050 bp, Artificial Sequence
  derived and/or modified sequence
atgacccaggagagcttcggttccggaggcggcggcatctcgcccaaaggaagcggtccttccgtagccagtgacgaagtcagcagctttgcgtccgccttgcctgatcgaaaaacagccagtttctcttcgctggaacctcaggatcaggaggatctggagcccgtgaagaagaaaatgcgcggggacggggacctcgatctgaatggacagctattggtcgcacaacctaggagaaacgcccaaaccgtccatgaggacgtacgagcagccgcgggcaaacctgacaaaatggaggagactctgacctgcattatttgtcaagacctgcttcacgattgcgtatccctgcaaccctgcatgcacaccttttgtgccgcctgctactcgggatggatggaaaggtcaagcctgtgtcccacatgtagatgtcccgtggaacgcatttgtaagaatcatatactcaataatctggttgaagcttacttgatacagcatcctgacaagtcccggtccgaggaggatgtacaaagcatggacgcacgtaacaaaataactcaggacatgctccaacctaaggtccgacgttccttttccgatgaagagggcagctccgaagatcttctcgaactgtccgacgtggactctgagtccagtgacatctcgcagccttacgtcgtgtgtcgccagtgcccagagtacagaagacaggcagcgcaaccaccgcattgccccgcaccagaaggcgagcctggtgcccctcaggctctaggagacgccccctcaacctccgttagcctcaccactgcagtacaggactacgtctgtccattgcagggctcgcatgccttgtgcacttgttgctttcagcctatgcctgatcgaagggcagagcgcgaacaggaccctcgcgtcgccccgcagcaatgcgccgtatgcctgcagcccttctgccacctatattggggctgtacccgaacagggtgttatgggtgtctggcacccttttgtgtctccggaagacagtgcttcccagccacctctttgtag

SEQ ID NO: 61139 - DNA, 1719 bp, Artificial Sequence
  derived and/or modified sequence
atggaacgccccgaggagggaaaacaaagtcctccaccacaaccttggggcaggctcttgcgcttaggggccgaggagggagagccccatgtcttgctcagaaaacgggagtggacgatagggagacggagaggatgtgacttgagtttcccgagcaataagctggttagcggggatcattgcagaatcgtcgtagacgagaaatccggacaagttacactggaggacactagtaccagcggaacagtgattaataagctcaaagtggttaagaagcaaacttgtccgctgcagactggggatgtaatctacctcgtatatagaaaaaatgagcccgagcaccgttccgggggtggcgggattagccctaaggggagcggaccttctgtcgcatctgacgaggtgtcctccttcgcgagtgctctgccggaccggaagacagcctcattctcaagcctggagcctcaggaccaggaggatctcgagcctgtgaagaaaaagatgagaggcgacggtgatctcgacctcaatggtcaacttctcgtggctcagccaagaagaaatgcccagacagtgcacgaagatgttcgcgctgcagccgggaaacccgacaagatggaggagacactgacctgcattatttgccaagacctgctccatgactgtgtaagcctccagccatgtatgcacactttttgcgccgcttgctactcgggttggatggaaaggtcgtctctatgcccgacttgccggtgcccggtcgagcgaatctgtaagaaccatatccttaataatctcgttgaagcctacctgattcagcaccccgacaaatctcggtccgaggaggacgtacaaagcatggacgccaggaacaagatcacccaggacatgctgcagcccaaggtgaggcgcagtttcagcgacgaagagggatcctctgaagatctgctagagctgagtgacgtcgattccgaatcctccgatatctcacaaccttacgtggtctgcagacagtgcccagagtaccggagacaggccgcccaacctccccactgtcccgctcctgagggagaacctggagccccccaggctctgggcgacgccccttcaacctctgtgagcctgaccacagctgtccaggattatgtttgcccactacagggctcgcacgcactgtgcacgtgctgctttcaacccatgccagaccgcagagcagagagggaacaggacccacgtgtggcgcctcagcagtgtgccgtctgccttcaacctttctgtcacctctactgggggtgcacacgtacggggtgctacggttgccttgcaccattttgtgaattgaatttgggagacaagtgcttagatggagtcctgaataataactcctacgagagcgatatcctgaagaactacctggctacacggggactgacatggaagaacatgctgacagaaagtttggtcgcattacagagaggggttttcctattgtcagattatagagtgacaggagacaccgtgctgtgctattgctgtggactgcgttcattcagagaactgacgtaccaatatcgccagaatatcccggcgtctgagctgcctgtcgcagtgacaagccgccccgactgctactggggacggaattgccggacccaggtgaaggcccatcatgctatgaaattcaatcacatttgcgagcaaacgcggtttaaaaattag

SEQ ID NO: 61140 - DNA, 1050 bp, Artificial Sequence
  derived and/or modified sequence
atgacccaggagagctttggcagcggcggcggcggcatcagccccaagggcagcggccccagcgtggccagtgatgaggtgtcctcctttgccagcgccctgcctgacaggaagacagccagcttcagcagcctggagccccaggaccaggaggacctggagcctgtgaagaagaagatgagaggagatggagacctggacctgaatggccagctgctggtggcccagcccaggagaaatgcccagacagtgcatgaagatgtgcgggctgctgctgggaagccagacaagatggaggagaccctgacctgcatcatctgccaggacctgctgcatgactgtgtgtccctgcagccctgcatgcacaccttctgtgccgcctgctacagcggctggatggagaggagcagcctgtgccccacctgccgctgccctgtggagcgcatctgcaagaaccacatcctgaacaacctggtggaggcctacctgatccagcacccagacaagagccgctctgaggaggatgtgcagagcatggatgccaggaacaagatcacccaggacatgctgcagcccaaggtgagaagaagcttcagtgatgaggagggcagcagcgaggacctgctggagctgagtgatgtggacagcgagagcagtgacatcagccagccctacgtggtgtgccggcagtgcccagagtaccgccggcaggccgcccagcccccccactgcccagcccctgagggggagcccggggccccccaggccctgggagatgcccccagcacctctgtgtccctgaccacagctgtgcaggactatgtgtgccccctgcagggcagccacgccctgtgcacctgctgcttccagcccatgccagacagaagagctgagcgggagcaggacccccgggtggccccccagcagtgtgctgtgtgcctgcagcccttctgccacctgtactggggctgcaccaggacaggctgctacggctgcctggcccccttctgtgtgtctggccggcagtgcttccctgccaccagcctgtag

SEQ ID NO: 61141 - DNA, 1719 bp, Artificial Sequence
  derived and/or modified sequence
atggagaggcctgaggagggcaagcagagccccccaccccagccctggggccgcctgctgcggctgggcgctgaggagggggagccccacgtgctgctgaggaagcgggagtggaccatcggcagaagaagaggctgtgacctgtccttccccagcaacaagctggtgtctggggaccactgcagaattgtggtggatgagaagagcggccaggtgaccctggaggacaccagcaccagcggcaccgtcatcaacaagctgaaggtggtgaagaagcagacctgccccctgcagacaggagatgtgatctacctggtgtacaggaagaatgaacctgagcacaggtctgggggcggcggcatcagccccaagggcagcggccccagcgtggccagtgatgaggtgtcctcctttgccagcgccctgcctgacaggaagacagccagcttcagcagcctggagccccaggaccaggaggacctggagcctgtgaagaagaagatgagaggagatggagacctggacctgaatggccagctgctggtggcccagcccaggagaaatgcccagacagtgcatgaagatgtgcgggctgctgctgggaagccagacaagatggaggagaccctgacctgcatcatctgccaggacctgctgcatgactgtgtgtccctgcagccctgcatgcacaccttctgtgccgcctgctacagcggctggatggagaggagcagcctgtgccccacctgccgctgccctgtggagcgcatctgcaagaaccacatcctgaacaacctggtggaggcctacctgatccagcacccagacaagagccgctctgaggaggatgtgcagagcatggatgccaggaacaagatcacccaggacatgctgcagcccaaggtgagaagaagcttcagtgatgaggagggcagcagcgaggacctgctggagctgagtgatgtggacagcgagagcagtgacatcagccagccctacgtggtgtgccggcagtgcccagagtaccgccggcaggccgcccagcccccccactgcccagcccctgagggggagcccggggccccccaggccctgggagatgcccccagcacctctgtgtccctgaccacagctgtgcaggactatgtgtgccccctgcagggcagccacgccctgtgcacctgctgcttccagcccatgccagacagaagagctgagcgggagcaggacccccgggtggccccccagcagtgtgctgtgtgcctgcagcccttctgccacctgtactggggctgcaccaggacaggctgctacggctgcctggcccccttctgtgagctgaacctgggggacaagtgcctggatggagtgctgaacaacaacagctatgaaagtgacatcctgaagaactacctggccacccggggcctgacctggaagaacatgctgacagagagcctggtggccctgcagaggggcgtcttcctgctgagtgactacagagtgactggagacacagtgctgtgctactgctgcggcctgcggagcttccgggagctgacctaccagtaccggcagaacatcccagccagcgagctgcctgtggccgtgaccagcaggccagactgctactggggcaggaactgcaggacccaggtgaaggcccaccacgccatgaagttcaaccacatctgtgagcagacccgcttcaagaactag

SEQ ID NO: 61142 - DNA, 1050 bp, Artificial Sequence
  derived and/or modified sequence
atgacccaggagagcttcggcagcggcggcggcggcatcagccccaaagggtcagggccttcagtcgccagtgacgaggtctccagtttcgcgtctgctctgccagaccggaaaacggcttctttctcttccctcgagcctcaggaccaggaagaccttgagcccgtaaagaagaagatgagaggtgatggagacctggaccttaacggccagctgctggtggcacagccacgcaggaatgctcagacagtacatgaggatgtgcgagcagccgccggtaagcctgataagatggaggaaacactgacgtgtatcatctgccaggacttgcttcatgattgtgtgtcgctgcagccctgcatgcacaccttctgtgcagcatgttatagcggctggatggagagaagcagcttgtgtccaacctgtagatgtccagttgagcgcatatgcaagaaccacatcctgaataacctagtggaagcctatctgatacaacatcctgacaaatcccgcagcgaagaagacgtgcagagcatggatgctcgcaacaagattactcaggatatgctccagcccaaggtgcgtaggtccttcagcgacgaagaaggctcctctgaggacctgctggaattatctgacgtcgatagtgagtccagtgatatttcacaaccttatgtggtctgtcggcagtgtcccgagtacagaaggcaggccgcccagccaccccactgtcccgcaccagagggagaacccggagccccgcaggcgctgggagacgctcccagcacatccgtgagtttaacaacagctgtccaggattatgtgtgccccctccagggctctcacgcactttgcacatgctgcttccaaccaatgccggaccgacgggcagagcgggaacaggacccaagagtggctcctcagcagtgtgcagtgtgcctgcaaccgttctgccatctgtactggggttgtaccaggactggatgctatgggtgtcttgcccctttctgtgtgtccgggcgacagtgcttcccggcaacatccctgtag

SEQ ID NO: 61143 - DNA, 1719 bp, Artificial Sequence
  derived and/or modified sequence
atggagcggcccgaggagggcaagcagagcccccccccccagccctggggtcggctactgagactgggggccgaagagggggaaccacatgtactgctaaggaagagggaatggactattggacgacgccggggatgcgatctgagctttccatctaacaaactcgtgtcaggcgaccattgccggatcgtggttgatgagaagagtgggcaggtcacactggaagatacctcgacatctggaaccgttataaataagctcaaagtcgtcaaaaaacagacatgccccctgcagaccggtgatgtcatctatctggtttataggaagaacgagcctgagcacagatccggcgggggagggattagccccaagggtagcgggccttcggtggccagcgatgaagtctcatcatttgcttcggcgctacccgaccggaaaacagctagcttctccagccttgagcctcaggaccaagaagatctggagccagtcaagaagaagatgcgcggagacggagacctcgacctgaatggccaactgctggtggcccaaccgagaagaaacgctcagaccgtgcatgaagacgtaagagccgcagcagggaaacctgataaaatggaggaaacattgacatgcattatctgccaggacctacttcacgactgtgtctccctgcagccctgcatgcacactttctgtgctgcctgctacagtgggtggatggagcggagtagtctttgtcctacctgtcgatgcccagttgagcggatttgtaaaaaccacatcctgaacaatcttgttgaggcctacttgattcagcacccagacaagagccgttcagaggaggacgtgcagtccatggacgcccgcaacaagatcactcaggatatgctgcagcctaaggtgcggagaagtttttctgacgaagaaggatcatccgaagatcttttggaactttcggacgttgactcagagtcatcagatatcagccaaccatacgtggtgtgtaggcagtgtcccgagtacagacgacaggcagcccaacctccccactgtccagctcctgagggcgagcccggcgcccctcaggctctgggagacgctccaagtactagtgtgtccctaacgactgccgttcaggattatgtctgtcctcttcagggctctcatgcactttgcacctgttgtttccagccaatgccagatagacgcgctgagcgagagcaggaccctcgcgtggccccacagcagtgcgccgtgtgcttacagcccttctgccacctgtactggggatgtacccggacagggtgctacggttgcctggcccctttttgcgaactcaacctgggtgacaaatgtctggatggggtactgaataataatagctacgagagtgacatcctcaaaaactacctggctactcgaggcttgacctggaagaatatgctgactgagtcattggtagctctgcagcgcggagtgttcctgctgtccgattaccgcgtaacgggagatacggtgctttgttattgctgcggcctgcgtagctttagagaactgacttatcagtaccgtcagaacataccagcctccgagctgcccgttgcagtgacaagtcggccagactgttactgggggaggaattgccgcacacaggttaaggcacaccacgccatgaagtttaaccacatatgtgagcagacgcgctttaaaaactag

SEQ ID NO: 61144 - DNA, 1050 bp, Artificial Sequence
  derived and/or modified sequence
atgactcaagaatcatttggctctggtggtggaggcatatcacccaaaggttccggtccatctgtagctagcgatgaggttagctcatttgccagcgctctccccgacagaaagacagcatccttctcatcacttgagcctcaagatcaggaagacctggaaccagtcaagaaaaagatgaggggcgacggggacttagatttaaatgggcagttgctggtggcgcagcctcgccgaaatgcccagacagttcatgaggatgtccgagccgctgcgggaaagccagataaaatggaggaaaccctgacttgtatcatctgtcaggatcttctgcacgactgcgtctctttgcagccttgtatgcacacattttgtgcggcttgctacagtggctggatggaaaggagcagcttgtgcccgacttgtaggtgccccgtagaacgcatctgtaagaaccacatactgaacaatttggtggaggcctacctgatacagcacccggacaagtcgcgcagtgaagaagatgtacagtctatggacgctcgaaacaagatcacacaggatatgttgcagccaaaagtgcgccgatctttcagcgacgaagaaggcagtagcgaggacctcttggagctcagcgatgtggattccgagagctctgatatttcgcaaccatacgtggtctgtaggcaatgccctgaatatcgtaggcaagctgcgcaacccccacattgccccgctcctgagggtgaacccggtgccccacaggcgctcggggatgctcccagtacctccgtgagcctgacgaccgctgtgcaggactatgtgtgtcccttgcagggtagccacgctctgtgcacttgctgctttcagccaatgcctgaccggcgtgcagaacgtgagcaagatccgcgtgtagcccctcaacagtgtgccgtgtgccttcagccattttgtcacctttactggggatgtactagaaccggctgttacgggtgccttgctcctttctgtgtgagcgggagacaatgcttccctgccacaagtctctag

SEQ ID NO: 61145 - DNA, 1719 bp, Artificial Sequence
  derived and/or modified sequence
atggagaggcccgaggagggcaaacaatcacctccacctcagccctggggaagactgttacgactgggcgctgaggagggagagccgcatgtcctgctacggaaacgcgagtggactataggcaggcgacggggttgcgacctatccttccctagtaataaattggtgtcgggtgatcattgcagaatcgtcgttgatgaaaagtctggtcaagtcacactcgaggatacaagcacctccggcaccgtgattaataaactgaaagtggtgaagaaacagacgtgcccattgcaaactggagacgtgatatatctggtttatcgtaagaatgaaccagaacatagatctgggggtggtggcatttcaccgaagggctccgggccaagcgtggccagcgacgaggtgtcctcctttgcttcggcactccccgaccgaaagaccgcttcttttagttcattagagcctcaggaccaagaagacctcgaacctgtcaaaaagaagatgagaggcgacggagatctagatctcaacggccagctcctggtggcccagccacgcaggaatgcccaaaccgtccatgaggacgtccgtgccgctgctggcaagcccgacaaaatggaggaaaccctgacctgcatcatttgtcaggaccttttacacgactgtgtgagcctccagccatgtatgcacacgttttgcgccgcatgctactctggctggatggagcgctcttcattgtgtcctacatgcaggtgtcccgtggagaggatttgcaaaaatcatatattaaataatctcgtcgaagcataccttatccagcatcccgataaaagccgatcagaggaagatgtccaaagcatggatgctcggaataagataactcaggatatgctgcagcctaaagtgaggagaagcttcagtgatgaggaaggctcatccgaggacctgctggaacttagcgacgtggactcagaaagcagcgacatatcccagccatacgttgtctgtcgtcaatgccccgagtaccgcagacaggccgcacaaccaccccattgccctgctcctgaaggcgagccaggcgcacctcaggcgctcggtgacgctcctagtacttccgtttctcttacgactgccgtgcaagactatgtgtgcccgctgcagggcagtcatgcgctctgcacctgttgtttccagcccatgccagatcgccgtgccgagagggagcaggacccgagggtggctcctcagcagtgcgccgtatgcttgcagccgttttgtcacctgtactggggatgtacccgtacaggctgttatgggtgcctagcccctttctgcgaactgaatctcggcgacaagtgcctcgacggagttctgaataataatagttacgaaagcgacattctaaagaactacctagccactcggggattgacctggaaaaacatgttaactgaaagcctcgtcgccctgcagaggggcgtgtttctgcttagcgactaccgcgtcactggagatactgttttgtgttactgctgtggattgcgatccttccgggagctgacctaccagtatcggcagaatatcccagcttctgaactgcccgtggctgtcacaagtagaccggattgttactgggggcgaaactgcagaacccaggtgaaggctcatcatgcgatgaagtttaaccatatatgtgaacagacaaggtttaagaactag

SEQ ID NO: 61146 - DNA, 2990 bp, Artificial Sequence
  derived and/or modified sequence
aatgtctcttgacagcggcggcggcgcagccggttccgggttcggcgcggggcggggatgtgaatcccgatggagcggcccgaggaaggcaagcagtcgccgccgccgcagccctggggacggctcctgcgtctgggcgcggaggagggcgagccgcacgtcctcctgaggaagcgggagtggaccatcgggcggagacgaggttgcgacctttccttccccagcaataaactggtctctggagatcactgtagaattgtagtggatgaaaaatcaggtcaggtgacactggaagataccagcaccagtggaacagtgattaacaagctgaaggttgttaagaagcagacatgccctttacagactggggatgtcatctacttggtgtacaggaagaatgaaccggaacacaggtctgggggtggtggcatctcccctaaaggaagtggtccctctgtggcaagtgatgaagtctccagctttgcctcagctctcccagacagaaagactgcgtccttttcgtcgttggaaccccaggatcaggaggatttggagcccgtgaagaagaaaatgagaggagatggggaccttgacctgaacgggcagttgttggtcgcacaaccgcgtagaaatgcccaaaccgtccacgaggacgtcagagcagcggctgggaagccagacaagatggaggagacgctgacatgcatcatctgccaggacctgctgcacgactgcgtgagtttgcagccctgcatgcacacgttctgcgcggcttgctactcgggctggatggagcgctcgtccctgtgtcctacctgccgctgtcccgtggagcggatctgtaaaaaccacatcctcaacaacctcgtggaagcatacctcatccagcatccagacaagagtcgcagtgaagaagatgtgcaaagtatggatgccagaaataaaatcactcaagacatgctgcagcccaaagtcaggcggtctttttctgatgaagaagggagttcagaggacctgctggagctgtcagacgttgacagtgagtcctcagacattagccagccatacgtcgtgtgccggcagtgtcctgagtacagaaggcaggcggcgcagcctccccactgcccagcacccgagggcgagccaggagccccacaggccctgggggatgcaccctccacgtccgtcagcctgacgacagcagtccaggattacgtgtgccctctgcaaggaagccacgccctgtgcacctgctgcttccagcccatgcccgaccggagagcggagcgcgagcaggacccgcgtgtcgcccctcagcagtgtgcggtctgcctgcagcctttctgccacctgtactggggctgcacccggaccggctgctacggctgcctggccccgttttgtgagctcaacctgggtgacaagtgtctggacggcgtgctgaacaacaacagctacgagtcagacatcctgaagaattacctggcaaccagaggtttgacatggaaaaacatgttgaccgagagcctcgtggctctccagcggggagtgtttctgctgtctgattacagagtcacgggagacaccgttctgtgttactgctgtggcctgcgcagcttccgtgagctgacctatcagtatcggcagaacattcctgcttccgagttgccagtggccgtaacatcccgtcctgactgctactggggccgtaactgccgcactcaggtgaaagctcaccacgccatgaaattcaatcatatctgtgaacagacaaggttcaaaaactaagcatccagaggccctgagcagctttcagcactggaggtgaagagagcgtgtttttaaaatacagagacaagcacgtcaaggtgttttcacagccccctgagggaagggacgcagggtctccgacaggtgctctggggtgactcttctgtggagctttaccctctgagtgagaccctccccagagccccgggggccgcagcccgccctcctggtgagcgctgggcagggctcgtggtggcatcagcagcagagacgaagcctttctgtaacatgcggccgtcccgccgagaggggcagttttgctcttttgtacattttccgaaactacagttaaagcagaagtctgtttttaggaaaagtttcaagggagaagggcaagtttatcaaaaacattgtttcaggagaagggagcataagtttacagcctacaggacgtacacaatatcctgctgctgggaaaaccacagcattttatctattttttattttaataggtttggtgcttatcttctaataagatttaaatgtcacaaactgtagcacaaataatataatttataatttacaaattgactaaaattgggtatagtatggtatttgaaagaataagcatatgcttctgtttattaaaaaaagaaaccttccaatgtccaaaactgctaaccctcgacgtggccgccaagttagtcgctccttgctaaccggtgagtgaccgcggccccgagcctggggctggacgcaggtcccaggacatgctgctcccttgtgtgagtgaccgcggccccgagcctggggctggacgcaggtcccaggacgtgctgctcccttgtgtgagtgaccacggccccaagcccagggctggaggcaggtcccaggacgcgccgctccctcatgctgcccgggcccttcctccaagaccctacagagcctgaggggcaccttggcttccgcctgtgctagctttgccatgtcatctggaataatacttgaaattttgatttttggaaaaaaaagttttttatcttttgttgaaatcacctgttatccttgtttgtaaactgataacttttttgcttcttctcaggaatacagttttcaactgttgtcttgctcttgatagaaactgagaagcagcaatctgtatttgtggaggaaagtcctctcttttgcatattctaataaatgagccgcgtttgctcctc

SEQ ID NO: 61147 - DNA, 1050 bp, Artificial Sequence
  derived and/or modified sequence
atgacccaggagagcttcggcagcggcggcggcggcatcagccccaagggcagcggccccagcgtggccagcgacgaggtgagcagcttcgccagcgccctgcccgacagaaagaccgccagcttcagcagcctggagccccaggaccaggaggacctggagcccgtgaagaagaagatgagaggcgacggcgacctggacctgaacggccagctgctggtggcccagcccagaagaaacgcccagaccgtgcacgaggacgtgagagccgccgccggcaagcccgacaagatggaggagaccctgacctgcatcatctgccaggacctgctgcacgactgcgtgagcctgcagccctgcatgcacaccttctgcgccgcctgctacagcggctggatggagagaagcagcctgtgccccacctgcagatgccccgtggagagaatctgcaagaaccacatcctgaacaacctggtggaggcctacctgatccagcaccccgacaagagcagaagcgaggaggacgtgcagagcatggacgccagaaacaagatcacccaggacatgctgcagcccaaggtgagaagaagcttcagcgacgaggagggcagcagcgaggacctgctggagctgagcgacgtggacagcgagagcagcgacatcagccagccctacgtggtgtgcagacagtgccccgagtacagaagacaggccgcccagcccccccactgccccgcccccgagggcgagcccggcgccccccaggccctgggcgacgcccccagcaccagcgtgagcctgaccaccgccgtgcaggactacgtgtgccccctgcagggcagccacgccctgtgcacctgctgcttccagcccatgcccgacagaagagccgagagagagcaggaccccagagtggccccccagcagtgcgccgtgtgcctgcagcccttctgccacctgtactggggctgcaccagaaccggctgctacggctgcctggcccccttctgcgtgagcggcagacagtgcttccccgccaccagcctgtag

SEQ ID NO: 61148 - DNA, 1719 bp, Artificial Sequence
  derived and/or modified sequence
atggagagacccgaggagggcaagcagagcccccccccccagccctggggcagactgctgagactgggcgccgaggagggcgagccccacgtgctgctgagaaagagagagtggaccatcggcagaagaagaggctgcgacctgagcttccccagcaacaagctggtgagcggcgaccactgcagaatcgtggtggacgagaagagcggccaggtgaccctggaggacaccagcaccagcggcaccgtgatcaacaagctgaaggtggtgaagaagcagacctgccccctgcagaccggcgacgtgatctacctggtgtacagaaagaacgagcccgagcacagaagcggcggcggcggcatcagccccaagggcagcggccccagcgtggccagcgacgaggtgagcagcttcgccagcgccctgcccgacagaaagaccgccagcttcagcagcctggagccccaggaccaggaggacctggagcccgtgaagaagaagatgagaggcgacggcgacctggacctgaacggccagctgctggtggcccagcccagaagaaacgcccagaccgtgcacgaggacgtgagagccgccgccggcaagcccgacaagatggaggagaccctgacctgcatcatctgccaggacctgctgcacgactgcgtgagcctgcagccctgcatgcacaccttctgcgccgcctgctacagcggctggatggagagaagcagcctgtgccccacctgcagatgccccgtggagagaatctgcaagaaccacatcctgaacaacctggtggaggcctacctgatccagcaccccgacaagagcagaagcgaggaggacgtgcagagcatggacgccagaaacaagatcacccaggacatgctgcagcccaaggtgagaagaagcttcagcgacgaggagggcagcagcgaggacctgctggagctgagcgacgtggacagcgagagcagcgacatcagccagccctacgtggtgtgcagacagtgccccgagtacagaagacaggccgcccagcccccccactgccccgcccccgagggcgagcccggcgccccccaggccctgggcgacgcccccagcaccagcgtgagcctgaccaccgccgtgcaggactacgtgtgccccctgcagggcagccacgccctgtgcacctgctgcttccagcccatgcccgacagaagagccgagagagagcaggaccccagagtggccccccagcagtgcgccgtgtgcctgcagcccttctgccacctgtactggggctgcaccagaaccggctgctacggctgcctggcccccttctgcgagctgaacctgggcgacaagtgcctggacggcgtgctgaacaacaacagctacgagagcgacatcctgaagaactacctggccaccagaggcctgacctggaagaacatgctgaccgagagcctggtggccctgcagagaggcgtgttcctgctgagcgactacagagtgaccggcgacaccgtgctgtgctactgctgcggcctgagaagcttcagagagctgacctaccagtacagacagaacatccccgccagcgagctgcccgtggccgtgaccagcagacccgactgctactggggcagaaactgcagaacccaggtgaaggcccaccacgccatgaagttcaaccacatctgcgagcagaccagattcaagaactag

SEQ ID NO: 61149 - protein, 1210 aa, Artificial Sequence
  derived and/or modified sequence
SNIHANHLSLDASSSSSSSSSSSSSSSSSSSSSSVHEPKMDALIIPVTMEVPCDSRGQRMWWAFLASSMVTFFGGLFIILLWRTLKYLWTVCCHCGGKTKEAQKINNGSSQADGTLKPVDEKEEAVAAEVGWMTSVKDWAGVMISAQTLTGRVLVVLVFALSIGALVIYFIDSSNPIESCQNFYKDFTLQIDMAFNVFFLLYFGLRFIAANDKLWFWLEVNSVVDFFTVPPVFVSVYLNRSWLGLRFLRALRLIQFSEILQFLNILKTSNSIKLVNLLSIFISTWLTAAGFIHLVENSGDPWENFQNNQALTYWECVYLLMVTMSTVGYGDVYAKTTLGRLFMVFFILGGLAMFASYVPEIIELIGNRKKYGGSYSAVSGRKHIVVCGHITLESVSNFLKDFLHKDRDDVNVEIVFLHNISPNLELEALFKRHFTQVEFYQGSVLNPHDLARVKIESADACLILANKYCADPDAEDASNIMRVISIKNYHPKIRIITQMLQYHNKAHLLNIPSWNWKEGDDAICLAELKLGFIAQSCLAQGLSTMLANLFSMRSFIKIEEDTWQKYYLEGVSNEMYTEYLSSAFVGLSFPTVCELCFVKLKLLMIAIEYKSANRESRILINPGNHLKIQEGTLGFFIASDAKEVKRAFFYCKACHDDITDPKRIKKCGCKRPKMSIYKRMRRACCFDCGRSERDCSCMSGRVRGNVDTLERAFPLSSVSVNDCSTSFRAFEDEQPSTLSPKKKQRNGGMRNSPNTSPKLMRHDPLLIPGNDQIDNMDSNVKKYDSTGMFHWCAPKEIEKVILTRSEAAMTVLSGHVVVCIFGDVSSALIGLRNLVMPLRASNFHYHELKHIVFVGSIEYLKREWETLHNFPKVSILPGTPLSRADLRAVNINLCDMCVILSANQNNIDDTSLQDKECILASLNIKSMQFDDSIGVLQANSQGFTPPGMDRSSPDNSPVHGMLRQPSITTGVNIPIITELVNDTNVQFLDQDDDDDPDTELYLTQPFACGTAFAVSVLDSLMSATYFNDNILTLIRTLVTGGATPELEALIAEENALRGGYSTPQTLANRDRCRVAQLALLDGPFADLGDGGCYGDLFCKALKTYNMLCFGIYRLRDAHLSTPSQCTKRYVITNPPYEFELVPTDLIFCLMQFDHNAGQSRASLSHSSHSSQSSSKKSSSVHSIPSTANRQNRPKSRESRDKQKYVQEERL

SEQ ID NO: 61150 - protein, 1209 aa, Artificial Sequence
  derived and/or modified sequence
SNIHANHLSLDASSSSSSSSSSSSSSSSSSSSSSVHEPKMDALIIPVTMEVPCDSRGQRMWWAFLASSMVTFFGGLFIILLWRTLKYLWTVCCHCGGKTKEAQKINNGSSQADGTLKPVDEKEEAVAAEVGWMTSVKDWAGVMISAQTLTGRVLVVLVFALSIGALVIYFIDSSNPIESCQNFYKDFTLQIDMAFNVFFLLYFGLRFIAANDKLWFWLEVNSVVDFFTVPPVFVSVYLNRSWLGLRFLRALRLIQFSEILQFLNILKTSNSIKLVNLLSIFISTWLTAAGFIHLVENSGDPWENFQNNQALTYWECVYLLMVTMSTVGYGDVYAKTTLGRLFMVFFILGGLAMFASYVPEIIELIGNRKKYGGSYSAVSGRKHIVVCGHITLESVSNFLKDFLHKDRDDVNVEIVFLHNISPNLELEALFKRHFTQVEFYQGSVLNPHDLARVKIESADACLILANKYCADPDAEDASNIMRVISIKNYHPKIRIITQMLQYHNKAHLLNIPSWNWKEGDDAICLAELKLGFIAQSCLAQGLSTMLANLFSMRSFIKIEEDTWQKYYLEGVSNEMYTEYLSSAFVGLSFPTVCELCFVKLKLLMIAIEYKSANRESRILINPGNHLKIQEGTLGFFIASDAKEVKRAFFYCKACHDDITDPKRIKKCGCKRPKMSIYKRMRRACCFDCGRSERDCSCMSGRVRGNVDTLERAFPLSSVSVNDCSTSFRAFEDEQPSTLSPKKKQRNGGMRNSPNTSPKLMRHDPLLIPGNDQIDNMDSNVKKYDSTGMFHWCAPKEIEKVILTRSEAAMTVLSGHVVVCIFGDVSSALIGLRNLVMPLRASNFHYHELKHIVFVGSIEYLKREWETLHNFPKVSILPGTPLSRADLRAVNINLCDMCVILSANQNNIDDTSLQDKECILASLNIKSMQFDDSIGVLQANSQGFTPPGMDRSSPDNSPVHGMLRQPSITTGVNIPIITELVNDTNVQFLDQDDDDDPDTELYLTQPFACGTAFAVSVLDSLMSATYFNDNILTLIRTLVTGGATPELEALIAEENALRGGYSTPQTLANRDRCRVAQLALLDGPFADLGDGGCYGDLFCKALKTYNMLCFGIYRLRDAHLSTPSQCTKRYVITNPPYEFELVPTDLIFCLMQFDHNAGQSRASLSHSSHSSQSSSKKSSSVHSIPSTANRQNRPKSRESRDKQKKEMVYR

SEQ ID NO: 61151 - DNA, 3633 bp, Artificial Sequence
  derived and/or modified sequence
tcaaatattcatgcgaaccacctgagtctcgatgcctccagctcttccagtagttccagtagttctagttcgtcctcatcctcatcttccagctcatcatctgtccacgagcctaagatggatgcgctgatcattcctgtgacgatggaggtgccatgcgatagcagaggtcagaggatgtggtgggctttcctggctagtagtatggtgacattcttcgggggactctttattattctgttatggaggactctcaaatacctttggactgtatgctgtcactgtggcgggaagacaaaggaggcccagaaaattaataatgggtccagccaggcggatggcactttgaagcccgttgatgaaaaggaagaggccgtcgctgccgaagtcggctggatgacttcggtgaaagattgggccggcgtgatgatatccgcacagactcttactgggcgcgtgctggtcgtactggtattcgccttgtctataggggcactagtgatatatttcattgactccagcaatccgatcgagagctgtcagaatttctataaggactttacgctgcagattgacatggcctttaacgtgttttttctcctatattttggattgcggttcatcgcagctaacgataaattatggttttggctcgaggtcaactccgtggtggacttcttcaccgtaccgcccgtcttcgtgagcgtctacttgaatagaagttggttggggctccgtttcctacgcgccctccggttgatccagttcagcgagatcttgcagttcctgaatattcttaaaaccagtaattcaatcaaacttgtgaatctactgtcaattttcatctctacatggttgactgcagctggcttcatccaccttgtggagaactctggcgatccgtgggagaatttccaaaataatcaggccttgacctactgggagtgcgtttacttactgatggtgacaatgtcgacagtaggatacggagacgtctacgcgaaaacaacactggggagactgtttatggttttctttatcctcgggggcctcgccatgtttgccagttacgttcctgaaatcatagagttgatcggtaacagaaaaaaatacggagggtcttattctgccgttagtgggagaaaacacattgttgtgtgtgggcacattaccctcgagtccgtgtccaatttcctgaaagatttcctgcacaaggatagagacgatgtgaatgttgagattgtgttcctacataacatttccccaaatcttgagttggaagctctgttcaagagacattttacacaagtggagttttatcagggatccgtgcttaacccccacgatctcgctcgcgtgaaaatcgaatcagctgacgcttgtctgatcctggcaaataagtactgtgcagatccagatgctgaagatgcttcaaatattatgcgggtgatctcgatcaaaaactatcatcccaagattcgcatcatcacgcaaatgttgcagtatcataacaaagcacatctcctcaatatcccctcttggaactggaaggagggtgacgatgctatctgtttagctgaactgaaacttggcttcatcgcccagtcttgtctcgcccagggtttaagtactatgctcgccaacctcttcagcatgaggtcgttcatcaagattgaggaggacacctggcagaagtattacctcgaaggagtgtcaaacgaaatgtacacagagtatctatcgagtgctttcgttggcttatcattcccaactgtgtgtgagctgtgcttcgtaaagctgaagctgctcatgatagctatcgaatacaagagcgccaatagggaaagtagaatcctcatcaatcctggaaaccatcttaagattcaggaaggaacactgggtttcttcatagcctcagacgccaaggaagtgaaacgagcatttttttactgcaaggcatgccatgacgatataaccgatcccaaacgaataaaaaagtgcggctgcaagaggcccaagatgtctatttataaacgcatgcggcgcgcatgttgttttgattgtggtagatctgaacgtgactgcagctgtatgtcgggacgcgtgagaggcaacgtcgacacgctagagagggccttccctctgtcctctgtcagcgtcaatgattgttctacctcttttagagccttcgaggacgaacagccaagtacactttccccaaagaaaaaacaacgaaacggaggtatgagaaattcccccaatacgagtcctaagttaatgcggcatgacccactgctgattcccggaaacgaccagatcgacaatatggactctaatgtgaagaagtatgatagtaccggcatgtttcactggtgtgccccaaaggaaatcgaaaaagtgatcctgacaaggtccgaagccgccatgaccgttctgagtggccatgtagtggtctgtatcttcggtgatgtgtcgagtgcactcattggcttgcggaatctggtaatgcccctgagagcgtctaatttccattatcatgagttgaagcatatcgtgtttgtggggtcaattgagtatctgaagcgagagtgggagacacttcataacttcccgaaagtctctatactgcccggcactccactgtcccgtgcggacctccgtgccgtcaatatcaacctgtgtgacatgtgtgtgatcctcagtgcaaatcaaaacaacatagatgatactagtctgcaagataaggagtgcatccttgcttccctgaacataaaatccatgcagtttgatgacagcattggggtgctgcaggcaaattctcaaggtttcaccccacctggcatggaccggagctcccctgataatagccccgtccacgggatgttgcgacaaccgtctatcaccactggtgttaacatccccataatcactgagctagtgaacgatacaaatgtgcagttcctcgaccaagacgatgatgatgatcctgatacagaattatacctcactcagccgttcgcatgcggcacggcatttgcagtatccgtgctcgactcactgatgagcgccacctacttcaatgacaatattctgacactgatccggaccctggtgacgggtggagcaactcctgaactggaagcgctaatagccgaagaaaatgcactccgtgggggctatagtactccccagacgctagctaatagagacaggtgcagagttgcacaattggccctcttagatgggccttttgcagacttgggtgacgggggctgttacggagacctattttgtaaagccctgaagacctacaacatgctatgctttggcatttatagattgcgtgacgcgcacttgagcacaccatcccaatgcacgaaacgctacgtgatcaccaaccccccttacgagttcgaactggtgcccaccgatctgattttctgccttatgcagtttgatcacaacgctggtcaatccagagcctccctttctcactcatcgcactccagccagtccagcagcaaaaagtcgagctctgttcactccatcccttcaacggcaaatcgtcagaatagacctaagtccagagagtccagagacaaacaaaagtacgtgcaggaggaacgcttatag

SEQ ID NO: 61152 - DNA, 3723 bp, Artificial Sequence
  derived and/or modified sequence
atggccaatggcggcggcggcggtggaggctcctctggcggcggggggggcggcggcggatcaagtctgagaatgtcctctaacatacacgccaatcacctcagcttagatgcttccagtagcagcagttccagcagttcctcatcctcctcatctagctcgtcatcaagttcgtcttcggtacacgagcccaagatggatgccctcatcattcccgtgaccatggaggttccatgtgactcacgagggcagcggatgtggtgggcttttctggcgtccagcatggtgacattcttcggaggcctttttatcatactgctttggaggaccctgaagtacctgtggacagtgtgctgccactgcggggggaagacaaaagaggcccagaaaatcaacaacggctcctcccaggcggacggtactctgaaaccagtcgacgagaaggaggaagcagtggcagctgaagtcggctggatgaccagcgttaaagactgggctggcgttatgatctcggcccagaccctcaccggccgggtgctcgtggtgcttgttttcgctctcagcattggagcgctggtcatctactttatcgatagctcaaatccaattgaatcttgccagaatttctataaagattttaccctgcagattgatatggccttcaatgtgttcttcctgctgtactttggcttaaggttcatcgctgctaatgataaactttggttttggctggaagtaaactctgtcgttgattttttcaccgtgccccctgtgttcgtgtctgtgtacttgaacagaagctggctgggcctccgctttcttagagccctgaggctcatccaattcagcgaaatcctacaattcctgaacatcctgaagacatccaattcaatcaagctcgtgaatctgctgagcatattcataagtacctggttgaccgcagccggattcattcatttagtcgaaaactcaggggatccttgggagaattttcagaataatcaggcgctgacttattgggagtgtgtgtatctcctgatggtaactatgagcactgtgggatatggcgatgtctacgccaagactacgctgggccggttatttatggtattctttatacttgggggattggccatgtttgctagctatgtccctgagattattgagctaatcgggaataggaaaaagtatggaggatcatacagtgccgtgtcagggcggaagcatatcgttgtgtgtggccacattacactagagagcgtctcgaattttttgaaagactttctccacaaggatcgagacgatgttaatgtggaaatcgtgtttctgcacaatatcagtcccaacctggagctggaagccctgtttaagagacatttcacccaggtggaattctaccaaggctctgtcctcaacccccatgacctggctcgagtcaagatcgaaagcgcagacgcttgcctaatcttagctaataaatattgcgcggacccggatgcagaagacgcctctaatatcatgagagtcatttcaatcaaaaattatcatcctaaaatcaggatcatcacgcagatgttgcagtatcataacaaagcccatcttttgaatattccctcttggaattggaaagagggtgatgacgctatttgcctggccgagttaaaactgggctttattgctcaaagttgcttggcccaggggctctcaactatgttggccaacctgtttagtatgcggagcttcattaaaatagaggaggacacctggcagaaatattatctggagggcgtgtcgaatgagatgtatacggagtatctgtctagtgcctttgtggggctaagctttccgaccgtttgtgaactctgcttcgtgaaactcaaactattgatgatcgccattgaatataagagcgcgaacagggagtccagaggccggctcagcatcttaataaacccaggtaatcatcttaaaatccaggaggggaccctgggcttttttatagccagcgacgccaaggaggtcaagcgcgccttcttctactgtaaggcgtgtcacgatgatataacagaccccaaacggatcaaaaaatgtggttgtaaacgcccgaagatgtccatttataagaggatgaggagagcctgctgctttgactgtggccgctccgaacgcgattgcagctgcatgtccggtcgagtaaggggaaatgtggatacactagagcgtgcctttcctttatcttcggttagcgtgaatgactgttccacaagttttagggcttttgaggatgaacaaccctcgacgctttcaccaaagaagaagcagagaaatggaggcatgcggaatagccctaacacttcaccgaaacttatgagacatgatcctctgttaatcccgggaaatgaccaaattgacaacatggattccaatgtgaaaaagtacgattcaacaggcatgtttcactggtgcgcaccgaaagagattgagaaagtgatcctaacaagatccgaggctgccatgaccgtactgagcggccatgtggtggtgtgcatttttggggacgtttcatccgctctgattggtctgcggaatcttgtaatgcctttgagggcttccaatttccattaccacgagctcaaacacattgtatttgtgggctctatagagtatcttaagcgcgagtgggaaacacttcataattttcctaaagtgtctatcttgccaggaaccccacttagtagagccgacttgcgggccgtgaatatcaacctgtgtgatatgtgtgtgattctctccgccaaccaaaacaacattgacgacacatctctgcaagacaaggagtgtatcttagcctcactgaatatcaagagtatgcagtttgatgactcaatcggggtgctgcaggcgaatagtcaagggtttacccccccaggcatggacagaagttctccggataactcaccagtccacggaatgcttcgccagccaagcattaccacaggggtgaatatccctatcatcacagagctggtaaacgacactaatgtccagtttctcgaccaggacgatgacgatgatccagacactgagttatacctaacacagccatttgcctgcggaacagcgttcgcggtgagcgtgctggatagtcttatgtcagcaacttacttcaatgataacatcctgaccttgattaggacacttgtcacagggggggccacaccagagctggaagcattaatcgccgaggaaaacgccttgcgcggcggatattccacaccgcagaccctcgccaatcgagatcgctgcagagttgcacagctggccctcctggacggacccttcgcagatctgggagacggtggatgctacggcgaccttttttgtaaggcgctgaaaacctacaatatgctgtgtttcggcatctatcgtttacgggacgctcacctttcaaccccaagccagtgcactaagagatacgtgatcacaaaccctccctacgagttcgagctggtgccaacagatctcatcttctgtttgatgcagttcgaccacaacgccggccagtcccgtgctagcctttctcacagctctcattcaagtcagagctcctcgaaaaaatccagctcagttcattcaatccctagcaccgctaaccgccaaaatagaccgaagagcagggagtctcgggataaacaaaagtacgtgcaggaagagcggttatag

SEQ ID NO: 61153 - DNA, 3633 bp, Artificial Sequence
  derived and/or modified sequence
agcaacatccacgccaaccacctgagcctggatgccagcagcagcagcagcagcagcagcagcagcagcagcagcagcagcagcagcagcagcagcagctctgtgcatgagcccaagatggatgccctgatcatccctgtgaccatggaggtgccctgtgacagccggggccagaggatgtggtgggccttcctggccagctccatggtgaccttctttggaggcctcttcatcatcctgctgtggaggaccctgaagtacctgtggacagtgtgctgccactgcggcggcaagaccaaggaggcccagaagatcaacaacggcagcagccaggctgatggcaccctgaagcctgtggatgagaaggaggaggccgtggccgctgaggtgggctggatgacctctgtgaaggactgggccggcgtgatgatcagcgcccagaccctgaccggccgggtgctggtggtgctggtgtttgccctgagcattggagccctggtgatctacttcatcgacagcagcaaccccatcgagagctgccagaacttctacaaggacttcaccctgcagattgacatggccttcaacgtgttcttcctgctgtacttcggcctgcgcttcatcgccgccaatgacaagctgtggttctggctggaggtgaacagcgtggtggacttcttcaccgtgccccctgtgtttgtgtctgtgtacctgaacagatcctggctgggcctgcgcttcctgcgggccctgcggctcatccagttcagcgagatcctgcagttcctgaacatcctgaagaccagcaacagcatcaagctggtgaacctgctgagcatcttcatcagcacctggctgacagctgctggcttcatccacctggtggagaacagcggggacccctgggagaacttccagaacaaccaggccctgacctactgggagtgtgtgtacctgctgatggtgaccatgagcacagtgggctatggagatgtgtatgccaagaccaccctgggccgcctcttcatggtgttcttcatcctgggcggcctggccatgtttgccagctatgtgcctgagatcatcgagctgattggcaacaggaagaagtatggaggcagctacagcgctgtgtctggcaggaagcacatcgtggtgtgtggccacatcaccctggagagcgtgagcaacttcctgaaggacttcctgcacaaggacagagatgatgtgaatgtggagatcgtgttcctgcacaacatcagccccaacctggagctggaggccctcttcaagaggcacttcacccaggtggagttctaccagggctctgtgctgaacccccatgacctggcccgggtgaagattgaatctgcagatgcctgcctgatcctggccaacaagtactgtgccgaccctgatgctgaagatgccagcaacatcatgagggtcatcagcatcaagaactaccaccccaagatccgcatcatcacccagatgctgcagtaccacaacaaggcccacctgctgaacatccccagctggaactggaaggagggagatgatgccatctgcctggccgagctgaagctgggcttcatcgcccagagctgcctggcccagggcctgagcaccatgctggccaacctcttctccatgaggagcttcatcaagattgaggaggacacctggcagaagtactacctggagggcgtgtccaatgagatgtacacagagtacctgagcagcgcctttgtgggcctgtccttccccaccgtgtgtgagctgtgctttgtgaagctgaagctgctgatgattgccatcgagtacaagagcgccaaccgggagagccgcatcctgatcaaccctggcaaccacctgaagatccaggagggcaccctgggcttcttcatcgccagtgatgccaaggaggtgaagagggccttcttctactgcaaggcctgccatgatgacatcacagaccccaagaggatcaagaagtgtggctgcaagaggcccaagatgagcatctacaagaggatgagaagagcctgctgctttgactgtggccgctctgagcgggactgcagctgcatgagcggccgggtgagaggaaatgtggacaccctggagcgggccttccccctgagctctgtgtctgtgaatgactgcagcaccagcttccgggcctttgaagatgagcagcccagcaccctgagccccaagaagaagcagagaaatggaggcatgaggaacagccccaacaccagccccaagctgatgagacatgaccccctgctgatccctggaaatgaccagattgacaacatggacagcaatgtgaagaagtatgacagcacaggcatgttccactggtgtgcccccaaggagattgagaaggtgatcctgaccaggtctgaggccgccatgacagtgctgagcggccacgtggtggtgtgcatctttggagatgtgagcagcgccctgattggcctgaggaacctggtgatgcccctgcgggccagcaacttccactaccacgagctgaagcacatcgtgtttgtgggcagcattgagtacctgaagcgggagtgggagaccctgcacaacttccccaaggtgtccatcctgcccggcacccccctgagcagagctgacctgcgggctgtgaacatcaacctgtgtgacatgtgtgtgatcctgagcgccaaccagaacaacattgatgacaccagcctgcaggacaaggagtgcatcctggccagcctgaacatcaagtccatgcagtttgatgacagcattggagtgctgcaggccaacagccagggcttcaccccacctggcatggacaggagcagcccagacaacagccctgtgcacggcatgctgcggcagcccagcatcaccactggagtgaacatccccatcatcacagagctggtgaatgacaccaacgtgcagttcctggaccaggatgatgatgatgatcctgacacagagctgtacctgacccagccctttgcctgtggcacagcctttgctgtgtctgtgctggacagcctgatgtctgccacctacttcaatgacaacatcctgaccctcatccgcaccctggtgactggaggagccaccccagagctggaggccctgattgctgaagaaaatgccctgcggggcggctacagcaccccccagaccctggccaacagagaccgctgccgggtggcccagctggccctgctggatggcccctttgctgacctgggagatggcggctgctatggagacctcttctgcaaggccctgaagacctacaacatgctgtgcttcggcatctaccgcctgagagatgcccacctgagcacccccagccagtgcaccaagagatatgtgatcaccaaccccccctatgaatttgagctggtgcccacagacctgatcttctgcctgatgcagtttgaccacaatgccggccagagccgggccagcctgagccacagcagccacagcagccagagcagcagcaagaagagcagctctgtgcacagcatccccagcacagccaaccggcagaaccggcccaagagccgggagagccgggacaagcagaagtatgtgcaggaggagcggctgtag

SEQ ID NO: 61154 - DNA, 3723 bp, Artificial Sequence
  derived and/or modified sequence
atggccaatggaggcggcggcggcggcggcagcagcggcggcggcggcggcggcggcggcagcagcctgaggatgagcagcaacatccacgccaaccacctgagcctggatgccagcagcagcagcagcagcagcagcagcagcagcagcagcagcagcagcagcagcagcagcagctctgtgcatgagcccaagatggatgccctgatcatccctgtgaccatggaggtgccctgtgacagccggggccagaggatgtggtgggccttcctggccagctccatggtgaccttctttggaggcctcttcatcatcctgctgtggaggaccctgaagtacctgtggacagtgtgctgccactgcggcggcaagaccaaggaggcccagaagatcaacaacggcagcagccaggctgatggcaccctgaagcctgtggatgagaaggaggaggccgtggccgctgaggtgggctggatgacctctgtgaaggactgggccggcgtgatgatcagcgcccagaccctgaccggccgggtgctggtggtgctggtgtttgccctgagcattggagccctggtgatctacttcatcgacagcagcaaccccatcgagagctgccagaacttctacaaggacttcaccctgcagattgacatggccttcaacgtgttcttcctgctgtacttcggcctgcgcttcatcgccgccaatgacaagctgtggttctggctggaggtgaacagcgtggtggacttcttcaccgtgccccctgtgtttgtgtctgtgtacctgaacagatcctggctgggcctgcgcttcctgcgggccctgcggctcatccagttcagcgagatcctgcagttcctgaacatcctgaagaccagcaacagcatcaagctggtgaacctgctgagcatcttcatcagcacctggctgacagctgctggcttcatccacctggtggagaacagcggggacccctgggagaacttccagaacaaccaggccctgacctactgggagtgtgtgtacctgctgatggtgaccatgagcacagtgggctatggagatgtgtatgccaagaccaccctgggccgcctcttcatggtgttcttcatcctgggcggcctggccatgtttgccagctatgtgcctgagatcatcgagctgattggcaacaggaagaagtatggaggcagctacagcgctgtgtctggcaggaagcacatcgtggtgtgtggccacatcaccctggagagcgtgagcaacttcctgaaggacttcctgcacaaggacagagatgatgtgaatgtggagatcgtgttcctgcacaacatcagccccaacctggagctggaggccctcttcaagaggcacttcacccaggtggagttctaccagggctctgtgctgaacccccatgacctggcccgggtgaagattgaatctgcagatgcctgcctgatcctggccaacaagtactgtgccgaccctgatgctgaagatgccagcaacatcatgagggtcatcagcatcaagaactaccaccccaagatccgcatcatcacccagatgctgcagtaccacaacaaggcccacctgctgaacatccccagctggaactggaaggagggagatgatgccatctgcctggccgagctgaagctgggcttcatcgcccagagctgcctggcccagggcctgagcaccatgctggccaacctcttctccatgaggagcttcatcaagattgaggaggacacctggcagaagtactacctggagggcgtgtccaatgagatgtacacagagtacctgagcagcgcctttgtgggcctgtccttccccaccgtgtgtgagctgtgctttgtgaagctgaagctgctgatgattgccatcgagtacaagagcgccaaccgggagagccggggccgcctgagcatcctgatcaaccctggcaaccacctgaagatccaggagggcaccctgggcttcttcatcgccagtgatgccaaggaggtgaagagggccttcttctactgcaaggcctgccatgatgacatcacagaccccaagaggatcaagaagtgtggctgcaagaggcccaagatgagcatctacaagaggatgagaagagcctgctgctttgactgtggccgctctgagcgggactgcagctgcatgagcggccgggtgagaggaaatgtggacaccctggagcgggccttccccctgagctctgtgtctgtgaatgactgcagcaccagcttccgggcctttgaagatgagcagcccagcaccctgagccccaagaagaagcagagaaatggaggcatgaggaacagccccaacaccagccccaagctgatgagacatgaccccctgctgatccctggaaatgaccagattgacaacatggacagcaatgtgaagaagtatgacagcacaggcatgttccactggtgtgcccccaaggagattgagaaggtgatcctgaccaggtctgaggccgccatgacagtgctgagcggccacgtggtggtgtgcatctttggagatgtgagcagcgccctgattggcctgaggaacctggtgatgcccctgcgggccagcaacttccactaccacgagctgaagcacatcgtgtttgtgggcagcattgagtacctgaagcgggagtgggagaccctgcacaacttccccaaggtgtccatcctgcccggcacccccctgagcagagctgacctgcgggctgtgaacatcaacctgtgtgacatgtgtgtgatcctgagcgccaaccagaacaacattgatgacaccagcctgcaggacaaggagtgcatcctggccagcctgaacatcaagtccatgcagtttgatgacagcattggagtgctgcaggccaacagccagggcttcaccccacctggcatggacaggagcagcccagacaacagccctgtgcacggcatgctgcggcagcccagcatcaccactggagtgaacatccccatcatcacagagctggtgaatgacaccaacgtgcagttcctggaccaggatgatgatgatgatcctgacacagagctgtacctgacccagccctttgcctgtggcacagcctttgctgtgtctgtgctggacagcctgatgtctgccacctacttcaatgacaacatcctgaccctcatccgcaccctggtgactggaggagccaccccagagctggaggccctgattgctgaagaaaatgccctgcggggcggctacagcaccccccagaccctggccaacagagaccgctgccgggtggcccagctggccctgctggatggcccctttgctgacctgggagatggcggctgctatggagacctcttctgcaaggccctgaagacctacaacatgctgtgcttcggcatctaccgcctgagagatgcccacctgagcacccccagccagtgcaccaagagatatgtgatcaccaaccccccctatgaatttgagctggtgcccacagacctgatcttctgcctgatgcagtttgaccacaatgccggccagagccgggccagcctgagccacagcagccacagcagccagagcagcagcaagaagagcagctctgtgcacagcatccccagcacagccaaccggcagaaccggcccaagagccgggagagccgggacaagcagaagtatgtgcaggaggagcggctgtag

SEQ ID NO: 61155 - DNA, 3633 bp, Artificial Sequence
  derived and/or modified sequence
agcaacatccacgccaaccacctgagcctggacgccagcagcagctcctccagttcttctagctcctcctcctcctcctcatcctcctcttcgagctcctctgtccacgaacccaaaatggatgcacttattattcctgttacaatggaagttccttgcgattcacgagggcagcgtatgtggtgggccttccttgccagctccatggtgaccttcttcggcggcctgttcatcatcctgctgtggcggactctaaaatacctctggacagtctgctgccattgcggggggaagactaaggaggcccaaaagattaataacggaagttcccaggcggatggaacactgaaaccagtggatgagaaagaagaggccgtggccgctgaggtgggttggatgaccagtgtcaaggattgggccggggttatgatttctgcacagaccctcacggggcgggtgctcgtggtcttagtatttgctctctcaattggagctttagtcatctacttcatagactccagtaaccctatcgagtcatgccagaacttttacaaggactttacgttgcaaatagatatggcctttaatgtctttttcctattgtattttggattacggttcatcgcagccaatgacaagttatggttctggcttgaggtcaatagtgtcgtagatttcttcaccgtgcctcccgtgttcgtttcagtatacctgaatcgatcctggttggggctgcgctttctaagggcgctccggctgattcagttctccgagatcctgcagtttctaaacatattgaaaacctctaactcaataaagctggtgaatctactgagcatcttcatttctacgtggctgacagccgccggattcatccacctggtggagaatagcggggacccttgggaaaacttccagaacaatcaggccttgacctattgggagtgtgtctacctgttgatggttacgatgtcgaccgtaggctatggggacgtgtacgcgaagactaccttaggcaggctctttatggtcttcttcattttgggtgggttagctatgttcgcatcctatgtgccagaaatcatagaattgatcggtaacagaaaaaaatatggaggatcctactccgccgtgtccggtagaaaacatatcgtggtgtgcgggcatatcaccctggagagcgtaagcaacttccttaaagatttcttgcacaaggatcgggacgacgtaaacgtcgagatcgtctttctccataatatcagccctaacctcgaacttgaagctctgttcaaaaggcacttcactcaagtcgaattctaccagggatctgttctgaacccgcatgatctagccagagtcaagattgagagtgccgatgcttgcctgatcttagcaaacaaatactgcgcggaccctgatgctgaagatgcatcaaatataatgagggtgataagcattaaaaactaccacccaaagatcaggattatcactcagatgttacagtatcacaataaagctcatctccttaatattccttcttggaactggaaagaaggggacgacgcaatttgtctggcggagctcaagttaggcttcatcgcccagtcctgcctggcccagggcctttctacaatgctcgcaaacttattcagtatgcgatccttcataaaaatcgaggaggatacctggcaaaaatattacttggagggcgtcagtaatgagatgtacaccgaatatctgtcttccgctttcgtggggttgtccttcccaaccgtttgcgagctgtgtttcgtcaagctcaaattactaatgattgccatagaatataagagtgccaatcgggagtctcggattctgatcaatcctggcaatcacctaaaaatacaagaaggaacactgggattcttcatcgctagcgacgcgaaggaggtcaagcgcgcttttttttactgcaaagcatgtcacgacgacattacagatcctaagagaatcaagaagtgtggttgcaaacgccccaagatgagcatttacaagaggatgcgcagggcctgttgctttgattgtggccgctccgagagagattgtagttgcatgtccggcagggtccgcgggaatgtggataccctggagagggcctttcctttgagctctgtttcggtgaacgactgctcaacctcctttcgggcattcgaagacgaacagccgtccaccctgagtcccaagaagaaacagcggaacggtggaatgcgaaatagcccaaacaccagcccaaagcttatgcggcacgacccattactgatccccggaaatgaccagattgataacatggacagtaatgtcaaaaagtacgacagcaccggaatgttccattggtgtgccccaaaggagatcgaaaaggttattctcaccagatccgaggctgccatgaccgtcttgagtggccacgtcgtggtgtgtatattcggagacgtttcaagtgcacttatcggcctgcgaaatcttgtaatgccactgcgggcctcaaacttccactaccatgagttgaagcatatcgtctttgtagggtccatagagtatttgaaaagagagtgggagacactccacaacttcccaaaggttagcatcttgccaggcaccccactgtctcgagccgatctgcgcgccgtgaacattaacctttgcgatatgtgtgttattctgtctgccaaccaaaacaatatagatgacacaagtctgcaagacaaagagtgtatccttgcctctttaaatatcaaatccatgcagttcgacgattcaatcggcgttctgcaggcaaatagtcaggggtttacaccacctgggatggaccgctcctctccagacaactcgcccgtccacggcatgctgagacagcctagcatcacaacaggcgttaatatcccaattatcaccgagctggtgaatgacactaacgtccagttccttgaccaggacgacgacgatgacccagacacagagctgtacctgacccagccatttgcctgtgggacggcttttgcggtgagcgtgttggactcattgatgagcgctacatattttaacgataatatccttacactcattagaacactcgtgactggcggcgcgaccccagagctggaggcgcttattgcggaggagaatgctctgagaggcggttactcgaccccccagaccctggcgaatagggaccggtgcagagtagcacagctggccctccttgatggtccttttgccgatctgggagatggcggctgctacggcgatttgttttgtaaggccctgaaaacatacaatatgctatgctttggtatttatagactgcgggatgctcatctttctacgccctctcagtgtaccaaacgctacgtgataaccaatcccccttatgagtttgagttagtaccaacggacctgattttctgccttatgcagtttgaccacaatgctggccagtcacgggcatcgctgtcacactccagtcattccagccaatcatcctctaagaagagcagttctgtgcacagcattccttcgactgccaaccggcagaaccgcccaaaatctagggagagcagagacaaacagaagtatgtgcaggaagagaggctatag

SEQ ID NO: 61156 - DNA, 3723 bp, Artificial Sequence
  derived and/or modified sequence
atggccaacggcggcggcggcggcggcggcagcagcggcggcggcggggggggtggcggttcatctctcagaatgagttcaaatatacatgccaaccacctgtctttagacgcgtcttcctcatcctctagttcaagtagctcctcgagcagtagttcctcatcatcttcttcaagttccgtgcatgagccaaaaatggatgctttaattatcccagtcacaatggaagtgccctgtgactctaggggacaacggatgtggtgggcattcctggcttccagcatggtcaccttttttggcggtttgttcataatcttactgtggagaacactaaaatacctctggacggtttgttgtcactgcggaggaaaaacgaaggaagctcagaagattaacaatggcagtagccaggcagacgggacactcaaacccgtagatgaaaaggaggaagctgtcgccgcagaggtgggctggatgaccagtgtgaaagactgggctggcgtgatgatatccgcccagaccctgacagggcgcgtactagtggtgctcgtctttgcactttcaatcggggctcttgtgatctactttatcgacagcagcaatccaatagagtcatgccagaacttctataaagacttcaccttgcaaatcgatatggctttcaacgtcttttttctgctgtactttgggctgcggtttattgctgcaaacgacaaactgtggttctggctcgaggtgaactctgtggttgacttttttacagtgccacctgttttcgtctcagtgtacctgaaccggtcctggttagggcttaggttcctccgggcactgcggctcattcagttttcagagatccttcaatttctgaacattttgaaaaccagtaatagtattaagttggttaacctcctgtcaatcttcatcagtacctggctcacagcagccgggttcattcacctcgtggagaatagtggggacccttgggaaaacttccaaaacaaccaggccctgacttattgggaatgcgtgtatcttctaatggtcacaatgtccacagtgggttacggtgacgtttatgcaaagaccacgcttgggcgtctctttatggtgttttttatcctgggcgggctcgctatgtttgcctcttacgtgccggagattatcgagcttatcggcaatcgaaagaagtacggtggtagctattctgctgtttctggccgcaagcacatcgtcgtgtgcgggcatatcaccctggaaagcgtatccaacttcctgaaggacttcttgcacaaagacagagatgatgtgaacgtggaaatcgtttttctgcataacatatctcctaacctagaactggaggcactctttaaaagacatttcactcaggtggagttttaccaaggctcggtgttgaacccacatgacctggcccgcgtaaaaattgagtccgcagacgcctgcctcatcctggccaacaagtactgcgccgaccccgacgccgaggatgcaagtaatatcatgcgggtgatctcaatcaagaattaccatcctaagatccgcatcattacccagatgctacagtatcacaacaaagcgcacctgctgaatattccttcttggaactggaaagagggagacgacgccatttgcctggccgaactgaagcttggctttatagctcagagttgcctcgcacaaggcctgtcaaccatgctagcgaacctcttctcgatgaggtcatttataaagatcgaggaggacacatggcagaaatattacctggaaggcgtatctaatgaaatgtacaccgagtacctgtcgagcgctttcgttggtctgtcatttcctacagtatgcgagctctgcttcgtaaaacttaaactcctgatgattgctattgagtataagagcgccaatagagagtcccgggggaggctaagtatcctcatcaaccctggaaatcacctgaagattcaagagggtaccttaggattctttatcgcctccgacgccaaggaggtgaagagagcgtttttctattgtaaggcctgtcacgatgatatcacggacccgaaaagaattaagaaatgtggctgcaaaagacccaaaatgtctatctacaagcgtatgaggagggcctgttgctttgattgtggcaggtctgaacgagattgttcatgtatgtcagggagggttagaggaaacgtggatacattagagcgcgcctttcctctttcaagcgtgtcggttaacgactgttccaccagtttcagagccttcgaggatgaacagccatccacactatctcccaagaagaagcaacggaacggcggcatgagaaactcccccaacacttcccctaaactgatgagacacgatccgctgttaatccctgggaacgatcagattgacaacatggactctaacgttaagaaatacgatagcacagggatgttccattggtgcgctcccaaagagatagagaaggtgatactcacacggtcagaggcggcgatgactgttctcagtggacacgtcgtggtgtgcatcttcggtgatgtctctagcgcactgattggcctgaggaatctcgtgatgcccttgcgcgcatcgaatttccattatcacgagctcaagcacattgtttttgtgggctcaattgagtatctcaaacgcgagtgggaaactctgcataatttccccaaggttagtatcctgccaggaacccccctctcaagggccgatctgcgggcagttaatatcaacctctgtgacatgtgcgttatcttgtccgccaatcagaacaatatcgacgacactagcctgcaggataaagaatgcatcctcgcctctctgaatatcaaatccatgcagtttgatgatagcatcggcgtgttgcaggcgaattcccaagggttcacgccaccaggcatggatagatctagccccgacaactcacctgtacacggaatgctgcggcaaccgagcatcacaactggagtcaacatcccaattatcactgagctcgtgaatgatacaaacgtgcagttccttgaccaggacgatgatgacgaccccgacaccgaactgtatctgacccagcctttcgcttgcggcactgcatttgcagtgtccgtgctggactctctgatgtctgcaacatacttcaatgataatattctgaccctgattcgaactttagtgacagggggcgccacacccgaactggaagccttgatcgctgaggaaaatgctttacgcggcggctactctacgccccagactttggcaaacagggataggtgtagagtggcccagctcgctttattagacgggccctttgcggacctgggagatggaggctgttatggcgatctcttctgcaaggccctgaaaacatacaatatgctgtgcttcggaatatatagactgcgggatgcacatctctccactccaagccagtgcacaaaaaggtatgtgatcactaatcccccctacgaatttgagctagtgccaacagacctcattttttgtcttatgcagttcgaccacaacgcaggccaatccagagcctcactgtctcactcttctcattctagccagtcaagtagcaagaagtcctcttcggttcactcaatcccgtccaccgccaatagacagaaccgcccaaaatcccgcgaatcaagagacaagcagaagtatgtgcaagaggaacgattgtag

SEQ ID NO: 61157 - DNA, 6018 bp, Artificial Sequence
  derived and/or modified sequence
agcaatatccacgcgaaccatctcagcctagacgcgtcctcctcctcctcctcctcctcttcctcttcttcttcttcctcctcctcttcctcctcgtcctcggtccacgagcccaagatggatgcgctcatcatcccggtgaccatggaggtgccgtgcgacagccggggccaacgcatgtggtgggctttcctggcctcctccatggtgactttcttcgggggcctcttcatcatcttgctctggcggacgctcaagtacctgtggaccgtgtgctgccactgcgggggcaagacgaaggaggcccagaagattaacaatggctcaagccaggcggatggcactctcaaaccagtggatgaaaaagaggaggcagtggccgccgaggtcggctggatgacctccgtgaaggactgggcgggggtgatgatatccgcccagacactgactggcagagtcctggttgtcttagtctttgctctcagcatcggtgcacttgtaatatacttcatagattcatcaaacccaatagaatcctgccagaatttctacaaagatttcacattacagatcgacatggctttcaacgtgttcttccttctctacttcggcttgcggtttattgcagccaacgataaattgtggttctggctggaagtgaactctgtagtggatttcttcacggtgccccccgtgtttgtgtctgtgtacttaaacagaagttggcttggtttgagatttttaagagctctgagactgatacagttttcagaaattttgcagtttctgaatattcttaaaacaagtaattccatcaagctggtgaatctgctctccatatttatcagcacgtggctgactgcagccgggttcatccatttggtggagaattcaggggacccatgggaaaatttccaaaacaaccaggctctcacctactgggaatgtgtctatttactcatggtcacaatgtccaccgttggttatggggatgtttatgcaaaaaccacacttgggcgcctcttcatggtcttcttcatcctcgggggactggccatgtttgccagctacgtccctgaaatcatagagttaataggaaaccgcaagaaatacgggggctcctatagtgcggttagtggaagaaagcacattgtggtctgcggacacatcactctggagagtgtttccaacttcctgaaggactttctgcacaaggaccgggatgacgtcaatgtggagatcgtttttcttcacaacatctcccccaacctggagcttgaagctctgttcaaacgacattttactcaggtggaattttatcagggttccgtcctcaatccacatgatcttgcaagagtcaagatagagtcagcagatgcatgcctgatccttgccaacaagtactgcgctgacccggatgcggaggatgcctcgaatatcatgagagtaatctccataaagaactaccatccgaagataagaatcatcactcaaatgctgcagtatcacaacaaggcccatctgctaaacatcccgagctggaattggaaagaaggtgatgacgcaatctgcctcgcagagttgaagttgggcttcatagcccagagctgcctggctcaaggcctctccaccatgcttgccaacctcttctccatgaggtcattcataaagattgaggaagacacatggcagaaatactacttggaaggagtctcaaatgaaatgtacacagaatatctctccagtgccttcgtgggtctgtccttccctactgtttgtgagctgtgttttgtgaagctcaagctcctaatgatagccattgagtacaagtctgccaaccgagagagccgtatattaattaatcctggaaaccatcttaagatccaagaaggtactttaggatttttcatcgcaagtgatgccaaagaagttaaaagggcatttttttactgcaaggcctgtcatgatgacatcacagatcccaaaagaataaaaaaatgtggctgcaaacggcccaagatgtccatctacaagagaatgagacgggcatgttgttttgattgcggacgttctgagcgtgactgctcatgcatgtcaggccgtgtgcgtggtaacgtggacacccttgagagagccttcccactttcttctgtctctgttaatgattgctccaccagtttccgtgcctttgaagatgagcagccgtcaacactatcaccaaaaaaaaagcaacggaatggaggcatgcggaactcacccaacacctcgcctaagctgatgaggcatgaccccttgttaattcctggcaatgatcagattgacaacatggactccaatgtgaagaagtacgactctactgggatgtttcactggtgtgcacccaaggagatagagaaagtcatcctgactcgaagtgaagctgccatgaccgtcctgagtggccatgtcgtggtctgcatctttggcgacgtcagctcagccctgatcggcctccggaacctggtgatgccgctccgtgccagcaactttcattaccatgagctcaagcacattgtgtttgtgggctctattgagtacctcaagcgggaatgggagacgcttcataacttccccaaagtgtccatattgcctggtacgccattaagtcgggctgatttaagggctgtcaacatcaacctctgtgacatgtgcgttatcctgtcagccaatcagaataatattgatgatacttcgctgcaggacaaggaatgcatcttggcgtcactcaacatcaaatctatgcagtttgatgacagcatcggagtcttgcaggctaattcccaagggttcacacctccaggaatggatagatcctctccagataacagcccagtgcacgggatgttacgtcaaccatccatcacaactggggtcaacatccccatcatcactgaactagtgaacgatactaatgttcagtttttggaccaagacgatgatgatgaccctgatacagaactgtacctcacgcagccctttgcctgtgggacagcatttgccgtcagtgtcctggactcactcatgagcgcgacgtacttcaatgacaatatcctcaccctgatacggaccctggtgaccggaggagccacgccggagctggaggctctgattgctgaggaaaacgcccttagaggtggctacagcaccccgcagacactggccaatagggaccgctgccgcgtggcccagttagctctgctcgatgggccatttgcggacttaggggatggtggttgttatggtgatctgttctgcaaagctctgaaaacatataatatgctttgttttggaatttaccggctgagagatgctcacctcagcacccccagtcagtgcacaaagaggtatgtcatcaccaacccgccctatgagtttgagctcgtgccgacggacctgatcttctgcttaatgcagtttgaccacaatgccggccagtcccgggccagcctgtcccattcctcccactcgtcgcagtcctccagcaagaagagctcctctgttcactccatcccatccacagcaaaccgacagaaccggcccaagtccagggagtcccgggacaaacagaagtacgtgcaggaagagcggctttgatatgtgtatccaccgccactgtgtgaaactgtatctgccactcatttccccagttggtgtttccaacaaagtaactttccctgttttcccctgtagtccccccctttttttttacacatatttgcatatgtatgatagtgtgcatgtggttgtcatttttatttcaccaccataaaacccttgagcacaacagcaaataagcagacggaccaaaagttatttatgattctgggggaaaaataacccaaaggcatgctccagacataaatagctcactgcaggaacgagttcacagattagaagggagcacttgtgatcaacgtcagttaggcagagcaagtttatttaatgtaaaagaaaagttgattctgatttatcaggattatcagggtgctttgggttttgattttgttgttgttgttgttttcctttctttctttttttatacacacaataagttagcacatgtttatttgaaacaagcaaccaaacagcaatgaaaacatattgattgtttccagtctctgggccgaagtattgcgaagcatttgaaaagctttcacgatttgtgtagatgattatgaaggacctgcttgttgcaagagaacatcagtgatttttttagttactcaccaaggccttttgtcccagagccagttccctctgggagttcttatgaacatttctcaccttaatatggaggagagaatagtattccaatcatggatgtatcaaattctagtcatttagtttaagtgaaaagaggtttgattgcatattaaattgttattctgtctccttatgttgccatatgaatagctattttttttctttcacttttgacatttgggatgaaaagccatatgtatcataaatatcagatgtaagtcattaaaaactgccttcctgggacttttacatcttttaaaaggtgaattacttaccttatgtacagaataaataatgctcaggaaagagcaagtatttttccatgcattctcaggggatctttttactcccctttgtttgattagttagggccccaatgccaggtaggaggaagggctggggcaatggtagagtgagaggaagacaaacccagctgcagatcatgcttttctaggagccgacatgctaaataaattagaatgtaggaggatcagccacagttgactcaacaaagacaaaagccagccaccaccttcaactgttggcacagctgtgcggtgctggctgtcccaatgcagaaagctggtgggaaggaattcctcatcatcactttctttaatgtagccaatttaggcagggtaatgacggcaatagagagctgctccttgtcattatgagacgtgggataagaagagtgcaacagtgagccaaacacattttggtatagttatttttttcttcttttgttttctttcttttttaacacttagtaagcatgagaggagaggtagaaaaatacccttttttcaacatatagttgtcagatgctttgtgcatgcaaatcatgctttaggcagtgcggtatttcttaaaaactggccaattcaccataaccaatttcccttatggatggactaggctggtatatacatatttgaaaagttttacttcaaagaattccatcgaatagaataggggtaaaagggaggaggaaaacatgtcacagctgtaccatctctaaaaaggtgtttttatggtgaatgttttggatttagattttggatcccccgtcccctcaagcatgatagttttggatatttgcttgctgtgtgaattgacaagcacttttactgacaaatggtgaggctcagtcagaacctccaccctcccccacaccaaagacaggggcagcgtagtattcaaaccagtattgtggtggggaataattgtatacatgtaaattatcaagccctatgagtggaagaattttttcaaattatttttgtccctctatatattgatttatattatgtataactatctctttatataaactatatataattatatatatataactatataattatatatatataactatatatataactatatatatgtatcccctagtattggatcatgaagagctcttcatgcattctttgcaaaggaggttataaagttacgccctcagaacatttataactataagaatgtgccagttaaagtgctcaacaggaaatatgacagtttaaaagcattgtaaaactcacatagcttacttctctctctaaagtgcaacaaggatgaatagaatgggccaaggtatgacaattaatggttctgcatgacctagccactgctgggggttttcttctataacgttgtccttgtgaaaacttttgtgaaattaaaaaaaaaggagttacaaat

SEQ ID NO: 61158 - DNA, 3723 bp, Artificial Sequence
  derived and/or modified sequence
atggcaaatggtggcggcggcggcggcggcagcagcggcggcggcggcggcggcggaggcagcagtcttagaatgagtagcaatatccacgcgaaccatctcagcctagacgcgtcctcctcctcctcctcctcctcttcctcttcttcttcttcctcctcctcttcctcctcgtcctcggtccacgagcccaagatggatgcgctcatcatcccggtgaccatggaggtgccgtgcgacagccggggccaacgcatgtggtgggctttcctggcctcctccatggtgactttcttcgggggcctcttcatcatcttgctctggcggacgctcaagtacctgtggaccgtgtgctgccactgcgggggcaagacgaaggaggcccagaagattaacaatggctcaagccaggcggatggcactctcaaaccagtggatgaaaaagaggaggcagtggccgccgaggtcggctggatgacctccgtgaaggactgggcgggggtgatgatatccgcccagacactgactggcagagtcctggttgtcttagtctttgctctcagcatcggtgcacttgtaatatacttcatagattcatcaaacccaatagaatcctgccagaatttctacaaagatttcacattacagatcgacatggctttcaacgtgttcttccttctctacttcggcttgcggtttattgcagccaacgataaattgtggttctggctggaagtgaactctgtagtggatttcttcacggtgccccccgtgtttgtgtctgtgtacttaaacagaagttggcttggtttgagatttttaagagctctgagactgatacagttttcagaaattttgcagtttctgaatattcttaaaacaagtaattccatcaagctggtgaatctgctctccatatttatcagcacgtggctgactgcagccgggttcatccatttggtggagaattcaggggacccatgggaaaatttccaaaacaaccaggctctcacctactgggaatgtgtctatttactcatggtcacaatgtccaccgttggttatggggatgtttatgcaaaaaccacacttgggcgcctcttcatggtcttcttcatcctcgggggactggccatgtttgccagctacgtccctgaaatcatagagttaataggaaaccgcaagaaatacgggggctcctatagtgcggttagtggaagaaagcacattgtggtctgcggacacatcactctggagagtgtttccaacttcctgaaggactttctgcacaaggaccgggatgacgtcaatgtggagatcgtttttcttcacaacatctcccccaacctggagcttgaagctctgttcaaacgacattttactcaggtggaattttatcagggttccgtcctcaatccacatgatcttgcaagagtcaagatagagtcagcagatgcatgcctgatccttgccaacaagtactgcgctgacccggatgcggaggatgcctcgaatatcatgagagtaatctccataaagaactaccatccgaagataagaatcatcactcaaatgctgcagtatcacaacaaggcccatctgctaaacatcccgagctggaattggaaagaaggtgatgacgcaatctgcctcgcagagttgaagttgggcttcatagcccagagctgcctggctcaaggcctctccaccatgcttgccaacctcttctccatgaggtcattcataaagattgaggaagacacatggcagaaatactacttggaaggagtctcaaatgaaatgtacacagaatatctctccagtgccttcgtgggtctgtccttccctactgtttgtgagctgtgttttgtgaagctcaagctcctaatgatagccattgagtacaagtctgccaaccgagagagccgtggcaggctcagtatattaattaatcctggaaaccatcttaagatccaagaaggtactttaggatttttcatcgcaagtgatgccaaagaagttaaaagggcatttttttactgcaaggcctgtcatgatgacatcacagatcccaaaagaataaaaaaatgtggctgcaaacggcccaagatgtccatctacaagagaatgagacgggcatgttgttttgattgcggacgttctgagcgtgactgctcatgcatgtcaggccgtgtgcgtggtaacgtggacacccttgagagagccttcccactttcttctgtctctgttaatgattgctccaccagtttccgtgcctttgaagatgagcagccgtcaacactatcaccaaaaaaaaagcaacggaatggaggcatgcggaactcacccaacacctcgcctaagctgatgaggcatgaccccttgttaattcctggcaatgatcagattgacaacatggactccaatgtgaagaagtacgactctactgggatgtttcactggtgtgcacccaaggagatagagaaagtcatcctgactcgaagtgaagctgccatgaccgtcctgagtggccatgtcgtggtctgcatctttggcgacgtcagctcagccctgatcggcctccggaacctggtgatgccgctccgtgccagcaactttcattaccatgagctcaagcacattgtgtttgtgggctctattgagtacctcaagcgggaatgggagacgcttcataacttccccaaagtgtccatattgcctggtacgccattaagtcgggctgatttaagggctgtcaacatcaacctctgtgacatgtgcgttatcctgtcagccaatcagaataatattgatgatacttcgctgcaggacaaggaatgcatcttggcgtcactcaacatcaaatctatgcagtttgatgacagcatcggagtcttgcaggctaattcccaagggttcacacctccaggaatggatagatcctctccagataacagcccagtgcacgggatgttacgtcaaccatccatcacaactggggtcaacatccccatcatcactgaactagtgaacgatactaatgttcagtttttggaccaagacgatgatgatgaccctgatacagaactgtacctcacgcagccctttgcctgtgggacagcatttgccgtcagtgtcctggactcactcatgagcgcgacgtacttcaatgacaatatcctcaccctgatacggaccctggtgaccggaggagccacgccggagctggaggctctgattgctgaggaaaacgcccttagaggtggctacagcaccccgcagacactggccaatagggaccgctgccgcgtggcccagttagctctgctcgatgggccatttgcggacttaggggatggtggttgttatggtgatctgttctgcaaagctctgaaaacatataatatgctttgttttggaatttaccggctgagagatgctcacctcagcacccccagtcagtgcacaaagaggtatgtcatcaccaacccgccctatgagtttgagctcgtgccgacggacctgatcttctgcttaatgcagtttgaccacaatgccggccagtcccgggccagcctgtcccattcctcccactcgtcgcagtcctccagcaagaagagctcctctgttcactccatcccatccacagcaaaccgacagaaccggcccaagtccagggagtcccgggacaaacagaagtacgtgcaggaagagcggctttga

SEQ ID NO: 61159 - DNA, 3633 bp, Artificial Sequence
  derived and/or modified sequence
tccaatatccatgccaaccatctgtcattagatgcaagctctagttcaagctctagttccagctccagctcttcctcttcctcatcctcctcctcgtcaagtgtgcacgaacctaaaatggatgcccttatcatcccggtgacaatggaggtcccttgcgattctaggggtcaacgaatgtggtgggctttcctcgcatctagtatggtgactttcttcggcggtctattcataatcctactgtggcgaactttgaagtacctgtggactgtgtgctgccattgtggcggaaaaacaaaggaggcacagaaaattaacaatgggagtagccaagccgacgggacgctcaaaccggtggatgagaaggaggaggccgtggccgcagaagttggatggatgacctccgtcaaggattgggctggcgtgatgattagcgcccagactctgactggacgggtactggtggtgctcgtgttcgctctctccatcggagcgctggtaatctactttatagacagttctaatccaattgagagttgccagaatttttataaggacttcaccctccaaatagacatggcgtttaacgttttttttctgttgtactttgggttacggttcatcgccgcaaacgacaagctgtggttttggctggaagtgaattctgtagtcgatttctttaccgtgcctcccgtgttcgtgagtgtctatctgaaccgctcctggctgggtctgagatttcttagggcccttcgccttattcaatttagtgagatcctgcagttcctgaatattctgaaaacgtctaacagcattaagttggtgaacctgctgagtatcttcataagcacctggctgacagccgctggctttatccacttagttgaaaactcaggtgacccctgggagaatttccagaacaatcaagctctgacctattgggaatgtgtgtacctgttaatggtcacgatgtcaactgtgggatacggcgatgtgtatgccaaaacaacgcttggacggctcttcatggttttctttattttaggaggcctggccatgtttgcttcatacgtgccagaaatcatcgaactcattgggaatagaaagaaatacggcggatcatattccgcagtaagtggccgtaagcacatcgtagtgtgcggccacattaccctggagagcgtgtcgaacttcttgaaggacttcttgcacaaggacagagatgatgtgaatgtggaaatagtcttcctccacaacatctctcctaacctggagttagaagccctctttaagagacatttcacgcaggtggagttctaccagggttcggtgctgaaccctcacgacctcgccagggtcaagatcgaatctgccgacgcctgcttaatcctcgctaataagtactgcgctgaccccgacgctgaggacgcatctaacatcatgcgggttatcagtattaaaaactaccatccgaagattaggataatcactcagatgctgcaatatcacaataaagcacatctgctcaatatcccatcgtggaattggaaggaaggcgatgacgccatatgtttggcagagctcaaactcggcttcatcgctcagagttgcttagctcagggacttagcacgatgctcgccaatcttttttccatgagaagcttcatcaagatcgaagaggacacctggcaaaagtactacttggaaggagtcagcaatgagatgtacacagaatatctctcttcagctttcgtaggcctcagctttcccactgtgtgcgaactatgctttgttaagctgaaattactcatgatcgcaatcgaatacaagtcagccaacagggagtcccggatcttgatcaaccccggaaaccatttgaaaatccaggaaggcaccctcggattctttattgcaagtgatgctaaagaagtgaagcgagcctttttctactgtaaggcttgccacgacgatattaccgatccaaagcgcataaagaagtgtggctgcaagagaccaaagatgtccatctacaaaaggatgcgtcgcgcatgttgcttcgactgtggcaggtcggaacgggattgtagttgcatgagcggtagggtcagaggcaatgtcgacacactggaaagagcattccctctctcgtctgtaagcgtaaacgactgctccacaagtttccgtgcctttgaggatgagcaaccttctacactcagtccaaaaaaaaagcagagaaacggtggtatgcgcaacagtcccaatacctctcctaaacttatgcgacacgatccactgttaatcccgggtaatgatcagatcgacaacatggactctaatgtgaagaagtacgactcaactggcatgtttcattggtgtgccccaaaggagatcgagaaggtgatcttaacaagatctgaagctgccatgacggtgctttctggacacgtggtggtctgtattttcggcgacgtgtcctccgcccttatcggactgcggaatctagtcatgcccctgcgggcttcaaatttccattaccacgagctaaagcacatcgtgtttgttggaagcatcgagtacctgaaacgcgaatgggaaacgctgcacaacttccctaaggtctcaatcttgcccggaacaccgctctctcgagctgatctgagggctgtcaatatcaacctgtgtgacatgtgcgtaatcttaagtgccaaccagaacaatatagacgacacctcgcttcaggacaaagaatgtatcttagcctcgctgaatattaagtctatgcagttcgacgactctatcggcgtgctacaagccaacagtcagggattcaccccccctggcatggaccgtagctctccggataactctcccgttcatggcatgcttaggcaaccgtccattacaacgggtgtgaacatccccatcatcacagaactagtgaacgacacaaatgtgcagttcctcgaccaggacgatgacgacgatcctgataccgaactgtacctcactcagccgttcgcatgtggcacagctttcgccgtctccgtcctagattccctgatgtccgccacttactttaacgataatattctcactctgattcggaccctggtgaccggcggtgccacccccgagctggaagcactgatcgccgaggaaaacgctctgcgcggaggatattccacaccccagacccttgctaaccgggatcggtgccgggtggctcagttagccttactcgatggaccattcgccgatctgggagacggcggatgctacggggacctgttttgcaaagccctgaaaacgtataacatgttgtgtttcggcatttatagactgagggacgcccatttgtccacccctagccagtgtaccaaacgctatgtgatcaccaatcccccttacgagttcgagcttgtgcctacagacctcatcttctgtctgatgcagtttgaccataacgctggacagtcccgcgctagtctgtcccatagtagccactctagccaatcatcctccaaaaaatccagctctgtacattccataccgtccactgccaaccggcagaataggccaaagtcccgcgagtcccgcgataagcagaagtacgttcaggaggaaagactgtag

SEQ ID NO: 61160 - DNA, 3723 bp, Artificial Sequence
  derived and/or modified sequence
atggccaacgggggtggaggaggcggtggatctagtggcggaggagggggtggaggcggttcgtctctgcgaatgtcaagtaatattcatgccaaccacctctctctggacgcgagttcaagctcatcttcatctagctctagcagctcgtctagcagctcaagttccagcagctcgagcgtgcatgagccaaagatggatgcgcttattatccctgtgaccatggaagtgccttgtgactcgagaggacagagaatgtggtgggcgtttcttgccagcagtatggtgaccttcttcggaggactgtttatcatcctcttatggcgcacattgaaatatctttggactgtctgttgtcattgcggcggaaaaaccaaggaagcacagaaaattaacaatggatcgtctcaggcagacggcaccctcaagcccgtggatgagaaggaagaggccgtcgccgcagaggtgggatggatgacttcagtcaaggattgggccggtgtcatgatcagcgcacagacactgacaggcagggtcctggttgtcttagtatttgccctgtcaattggagcccttgttatctattttatagattctagcaatccgatagagtcgtgtcaaaatttttataaggattttacactgcagattgacatggcttttaacgttttttttctgttatatttcgggctccgattcattgctgccaatgacaagctctggttttggctggaagtcaactctgttgtcgacttttttactgtcccgccagttttcgtatccgtatatttgaatcgatcttggcttggcttgagatttctgagagcgcttcgactgattcagttttctgagattctgcaattcctgaacattctcaagacctctaactctatcaagttggtaaatctcctaagcatttttataagcacatggttgacagccgcaggcttcattcatttggtggaaaactccggcgatccttgggagaactttcagaacaaccaggcacttacctattgggagtgtgtctacctgctcatggtgaccatgtctaccgtagggtacggcgatgtctatgcgaagaccacacttggcagactgtttatggtcttctttattttgggtggactagccatgtttgcctcgtatgttccagaaataatcgagttaatcggcaaccgcaagaaatatggcggaagttactctgctgtctcaggaaggaagcacatcgtggtctgtggtcacatcacactggagtctgtgagcaatttcttaaaagattttcttcataaggaccgagacgacgttaacgttgagatagtctttctgcataacatatccccgaatctcgaactggaagccctgttcaagagacactttacccaggtggagttctatcagggctccgtgctaaaccctcacgacttagcacgcgtcaaaattgaatctgccgatgcctgtctgattttagccaacaagtattgcgctgatccagacgcggaggacgctagcaacattatgagggttatcagcattaaaaattatcatcctaagatccggatcattacgcagatgttacagtaccacaataaggctcacctgctgaatattccaagttggaactggaaagaaggggacgacgctatttgtctggcggaactgaaactgggctttatcgcgcagtcgtgcctggctcagggtctgtcgacaatgctggctaatttgtttagcatgaggagttttattaaaatagaggaagacacctggcaaaagtactatctcgaaggagtgtcaaacgagatgtacacagaatacctgagtagcgcttttgtgggactcagtttcccaactgtgtgtgagctttgctttgtgaagctcaaattgctgatgatcgcaatcgaatataaatctgcgaacagggaatcacgcggaaggctgtccattcttatcaaccccggaaaccaccttaaaatccaggaggggacactgggtttctttatcgctagcgacgcaaaggaagtgaaaagggcctttttttattgcaaagcttgccatgacgatataactgatccgaaaaggatcaagaaatgtggatgcaagagaccgaagatgtccatctataaacggatgagaagggcttgctgtttcgactgcgggagatcagagcgtgattgtagctgcatgtccggcagggtaagaggcaatgtggacacattagagagggcctttcccttaagttccgtgtccgttaatgattgcagcacctcctttagggcgttcgaggatgaacagccatcgacattgtcccctaagaagaaacagagaaacggagggatgcgaaatagtcctaacaccagtcccaagctcatgaggcacgaccctctgctgattccagggaacgaccagattgacaatatggactcaaatgttaagaaatacgactcaaccgggatgttccattggtgcgccccaaaggagatcgagaaagtgattttgacaaggtctgaagctgcgatgactgttttaagcggccatgtggtagtgtgtatcttcggtgacgttagtagcgccctcattggattgcggaacttggtaatgcctctgagagcctctaatttccattatcatgaactcaaacatattgtgttcgttgggtctattgagtatttgaagagggagtgggagacattgcacaattttcccaaggtgtcgatactgccgggaaccccactgagccgggctgatttgcgggcagtgaatataaacttatgcgacatgtgcgtgatcctctctgcgaaccaaaataatatagatgacacttccctgcaggataaggaatgcattctcgcctctctcaacatcaaatcaatgcaattcgatgactcaattggggtcctccaagccaacagtcaaggcttcacccctccaggtatggaccgctcaagcccagataattctccagtgcatggtatgctgcggcaacctagcatcactacgggcgtcaacattcctattattactgaattagtgaacgatacaaatgttcagttcttggatcaagacgatgatgatgatccagatacagagctgtacctaacccagcccttcgcctgcgggaccgcctttgctgtttcagtgctggattcgctgatgtctgctacatattttaacgacaatatcctgaccctgatacgcactctggttaccggcggtgccaccccggagctcgaggccctcatcgctgaagagaacgcgctgcggggtggatattctacccctcagaccttagccaacagggatagatgtcgcgtggcccagcttgctttacttgatggaccgttcgccgacttgggtgacggaggctgctatggagatttattctgcaaggctctgaaaacatataatatgttgtgttttggcatttatcggctgcgcgacgcccacttgtcaaccccttcccagtgcacaaaaaggtacgttattaccaacccaccatatgaatttgagcttgtgcccaccgatttaattttttgtctcatgcaattcgaccacaacgccggacagtccagagctagcctgtcccattctagtcatagcagccagtcctctagcaagaagagcagctcagtccattctatcccgtcaactgctaatcgtcagaacaggcccaagagtcgcgagtcccgggacaaacaaaaatacgttcaggaggaaaggctgtag

SEQ ID NO: 61161 - DNA, 3633 bp, Artificial Sequence
  derived and/or modified sequence
agcaacatccacgccaaccacctgagcctggacgccagcagcagcagcagcagcagcagcagcagcagcagcagcagcagcagcagcagcagcagcagcagcgtgcacgagcccaagatggacgccctgatcatccccgtgaccatggaggtgccctgcgacagcagaggccagagaatgtggtgggccttcctggccagcagcatggtgaccttcttcggcggcctgttcatcatcctgctgtggagaaccctgaagtacctgtggaccgtgtgctgccactgcggcggcaagaccaaggaggcccagaagatcaacaacggcagcagccaggccgacggcaccctgaagcccgtggacgagaaggaggaggccgtggccgccgaggtgggctggatgaccagcgtgaaggactgggccggcgtgatgatcagcgcccagaccctgaccggcagagtgctggtggtgctggtgttcgccctgagcatcggcgccctggtgatctacttcatcgacagcagcaaccccatcgagagctgccagaacttctacaaggacttcaccctgcagatcgacatggccttcaacgtgttcttcctgctgtacttcggcctgagattcatcgccgccaacgacaagctgtggttctggctggaggtgaacagcgtggtggacttcttcaccgtgccccccgtgttcgtgagcgtgtacctgaacagaagctggctgggcctgagattcctgagagccctgagactgatccagttcagcgagatcctgcagttcctgaacatcctgaagaccagcaacagcatcaagctggtgaacctgctgagcatcttcatcagcacctggctgaccgccgccggcttcatccacctggtggagaacagcggcgacccctgggagaacttccagaacaaccaggccctgacctactgggagtgcgtgtacctgctgatggtgaccatgagcaccgtgggctacggcgacgtgtacgccaagaccaccctgggcagactgttcatggtgttcttcatcctgggcggcctggccatgttcgccagctacgtgcccgagatcatcgagctgatcggcaacagaaagaagtacggcggcagctacagcgccgtgagcggcagaaagcacatcgtggtgtgcggccacatcaccctggagagcgtgagcaacttcctgaaggacttcctgcacaaggacagagacgacgtgaacgtggagatcgtgttcctgcacaacatcagccccaacctggagctggaggccctgttcaagagacacttcacccaggtggagttctaccagggcagcgtgctgaacccccacgacctggccagagtgaagatcgagagcgccgacgcctgcctgatcctggccaacaagtactgcgccgaccccgacgccgaggacgccagcaacatcatgagagtgatcagcatcaagaactaccaccccaagatcagaatcatcacccagatgctgcagtaccacaacaaggcccacctgctgaacatccccagctggaactggaaggagggcgacgacgccatctgcctggccgagctgaagctgggcttcatcgcccagagctgcctggcccagggcctgagcaccatgctggccaacctgttcagcatgagaagcttcatcaagatcgaggaggacacctggcagaagtactacctggagggcgtgagcaacgagatgtacaccgagtacctgagcagcgccttcgtgggcctgagcttccccaccgtgtgcgagctgtgcttcgtgaagctgaagctgctgatgatcgccatcgagtacaagagcgccaacagagagagcagaatcctgatcaaccccggcaaccacctgaagatccaggagggcaccctgggcttcttcatcgccagcgacgccaaggaggtgaagagagccttcttctactgcaaggcctgccacgacgacatcaccgaccccaagagaatcaagaagtgcggctgcaagagacccaagatgagcatctacaagagaatgagaagagcctgctgcttcgactgcggcagaagcgagagagactgcagctgcatgagcggcagagtgagaggcaacgtggacaccctggagagagccttccccctgagcagcgtgagcgtgaacgactgcagcaccagcttcagagccttcgaggacgagcagcccagcaccctgagccccaagaagaagcagagaaacggcggcatgagaaacagccccaacaccagccccaagctgatgagacacgaccccctgctgatccccggcaacgaccagatcgacaacatggacagcaacgtgaagaagtacgacagcaccggcatgttccactggtgcgcccccaaggagatcgagaaggtgatcctgaccagaagcgaggccgccatgaccgtgctgagcggccacgtggtggtgtgcatcttcggcgacgtgagcagcgccctgatcggcctgagaaacctggtgatgcccctgagagccagcaacttccactaccacgagctgaagcacatcgtgttcgtgggcagcatcgagtacctgaagagagagtgggagaccctgcacaacttccccaaggtgagcatcctgcccggcacccccctgagcagagccgacctgagagccgtgaacatcaacctgtgcgacatgtgcgtgatcctgagcgccaaccagaacaacatcgacgacaccagcctgcaggacaaggagtgcatcctggccagcctgaacatcaagagcatgcagttcgacgacagcatcggcgtgctgcaggccaacagccagggcttcaccccccccggcatggacagaagcagccccgacaacagccccgtgcacggcatgctgagacagcccagcatcaccaccggcgtgaacatccccatcatcaccgagctggtgaacgacaccaacgtgcagttcctggaccaggacgacgacgacgaccccgacaccgagctgtacctgacccagcccttcgcctgcggcaccgccttcgccgtgagcgtgctggacagcctgatgagcgccacctacttcaacgacaacatcctgaccctgatcagaaccctggtgaccggcggcgccacccccgagctggaggccctgatcgccgaggagaacgccctgagaggcggctacagcaccccccagaccctggccaacagagacagatgcagagtggcccagctggccctgctggacggccccttcgccgacctgggcgacggcggctgctacggcgacctgttctgcaaggccctgaagacctacaacatgctgtgcttcggcatctacagactgagagacgcccacctgagcacccccagccagtgcaccaagagatacgtgatcaccaaccccccctacgagttcgagctggtgcccaccgacctgatcttctgcctgatgcagttcgaccacaacgccggccagagcagagccagcctgagccacagcagccacagcagccagagcagcagcaagaagagcagcagcgtgcacagcatccccagcaccgccaacagacagaacagacccaagagcagagagagcagagacaagcagaagtacgtgcaggaggagagactgtag

SEQ ID NO: 61162 - DNA, 3723 bp, Artificial Sequence
  derived and/or modified sequence
atggccaacggcggcggcggcggcggcggcagcagcggcggcggcggcggcggcggcggcagcagcctgagaatgagcagcaacatccacgccaaccacctgagcctggacgccagcagcagcagcagcagcagcagcagcagcagcagcagcagcagcagcagcagcagcagcagcagcgtgcacgagcccaagatggacgccctgatcatccccgtgaccatggaggtgccctgcgacagcagaggccagagaatgtggtgggccttcctggccagcagcatggtgaccttcttcggcggcctgttcatcatcctgctgtggagaaccctgaagtacctgtggaccgtgtgctgccactgcggcggcaagaccaaggaggcccagaagatcaacaacggcagcagccaggccgacggcaccctgaagcccgtggacgagaaggaggaggccgtggccgccgaggtgggctggatgaccagcgtgaaggactgggccggcgtgatgatcagcgcccagaccctgaccggcagagtgctggtggtgctggtgttcgccctgagcatcggcgccctggtgatctacttcatcgacagcagcaaccccatcgagagctgccagaacttctacaaggacttcaccctgcagatcgacatggccttcaacgtgttcttcctgctgtacttcggcctgagattcatcgccgccaacgacaagctgtggttctggctggaggtgaacagcgtggtggacttcttcaccgtgccccccgtgttcgtgagcgtgtacctgaacagaagctggctgggcctgagattcctgagagccctgagactgatccagttcagcgagatcctgcagttcctgaacatcctgaagaccagcaacagcatcaagctggtgaacctgctgagcatcttcatcagcacctggctgaccgccgccggcttcatccacctggtggagaacagcggcgacccctgggagaacttccagaacaaccaggccctgacctactgggagtgcgtgtacctgctgatggtgaccatgagcaccgtgggctacggcgacgtgtacgccaagaccaccctgggcagactgttcatggtgttcttcatcctgggcggcctggccatgttcgccagctacgtgcccgagatcatcgagctgatcggcaacagaaagaagtacggcggcagctacagcgccgtgagcggcagaaagcacatcgtggtgtgcggccacatcaccctggagagcgtgagcaacttcctgaaggacttcctgcacaaggacagagacgacgtgaacgtggagatcgtgttcctgcacaacatcagccccaacctggagctggaggccctgttcaagagacacttcacccaggtggagttctaccagggcagcgtgctgaacccccacgacctggccagagtgaagatcgagagcgccgacgcctgcctgatcctggccaacaagtactgcgccgaccccgacgccgaggacgccagcaacatcatgagagtgatcagcatcaagaactaccaccccaagatcagaatcatcacccagatgctgcagtaccacaacaaggcccacctgctgaacatccccagctggaactggaaggagggcgacgacgccatctgcctggccgagctgaagctgggcttcatcgcccagagctgcctggcccagggcctgagcaccatgctggccaacctgttcagcatgagaagcttcatcaagatcgaggaggacacctggcagaagtactacctggagggcgtgagcaacgagatgtacaccgagtacctgagcagcgccttcgtgggcctgagcttccccaccgtgtgcgagctgtgcttcgtgaagctgaagctgctgatgatcgccatcgagtacaagagcgccaacagagagagcagaggcagactgagcatcctgatcaaccccggcaaccacctgaagatccaggagggcaccctgggcttcttcatcgccagcgacgccaaggaggtgaagagagccttcttctactgcaaggcctgccacgacgacatcaccgaccccaagagaatcaagaagtgcggctgcaagagacccaagatgagcatctacaagagaatgagaagagcctgctgcttcgactgcggcagaagcgagagagactgcagctgcatgagcggcagagtgagaggcaacgtggacaccctggagagagccttccccctgagcagcgtgagcgtgaacgactgcagcaccagcttcagagccttcgaggacgagcagcccagcaccctgagccccaagaagaagcagagaaacggcggcatgagaaacagccccaacaccagccccaagctgatgagacacgaccccctgctgatccccggcaacgaccagatcgacaacatggacagcaacgtgaagaagtacgacagcaccggcatgttccactggtgcgcccccaaggagatcgagaaggtgatcctgaccagaagcgaggccgccatgaccgtgctgagcggccacgtggtggtgtgcatcttcggcgacgtgagcagcgccctgatcggcctgagaaacctggtgatgcccctgagagccagcaacttccactaccacgagctgaagcacatcgtgttcgtgggcagcatcgagtacctgaagagagagtgggagaccctgcacaacttccccaaggtgagcatcctgcccggcacccccctgagcagagccgacctgagagccgtgaacatcaacctgtgcgacatgtgcgtgatcctgagcgccaaccagaacaacatcgacgacaccagcctgcaggacaaggagtgcatcctggccagcctgaacatcaagagcatgcagttcgacgacagcatcggcgtgctgcaggccaacagccagggcttcaccccccccggcatggacagaagcagccccgacaacagccccgtgcacggcatgctgagacagcccagcatcaccaccggcgtgaacatccccatcatcaccgagctggtgaacgacaccaacgtgcagttcctggaccaggacgacgacgacgaccccgacaccgagctgtacctgacccagcccttcgcctgcggcaccgccttcgccgtgagcgtgctggacagcctgatgagcgccacctacttcaacgacaacatcctgaccctgatcagaaccctggtgaccggcggcgccacccccgagctggaggccctgatcgccgaggagaacgccctgagaggcggctacagcaccccccagaccctggccaacagagacagatgcagagtggcccagctggccctgctggacggccccttcgccgacctgggcgacggcggctgctacggcgacctgttctgcaaggccctgaagacctacaacatgctgtgcttcggcatctacagactgagagacgcccacctgagcacccccagccagtgcaccaagagatacgtgatcaccaaccccccctacgagttcgagctggtgcccaccgacctgatcttctgcctgatgcagttcgaccacaacgccggccagagcagagccagcctgagccacagcagccacagcagccagagcagcagcaagaagagcagcagcgtgcacagcatccccagcaccgccaacagacagaacagacccaagagcagagagagcagagacaagcagaagtacgtgcaggaggagagactgtag

SEQ ID NO: 61163 - protein, 1219 aa, Artificial Sequence
  derived and/or modified sequence
MANGGGGGGGSSGGGGGGGGSSLRMSSNIHANHLSLDASSSSSSSSSSSSSSSSSSSSSSVHEPKMDALIIPVTMEVPCDSRGQRMWWAFLASSMVTFFGGLFIILLWRTLKYLWTVCCHCGGKTKEAQKINNGSSQADGTLKPVDEKEEAVAAEVGWMTSVKDWAGVMISAQTLTGRVLVVLVFALSIGALVIYFIDSSNPIESCQNFYKDFTLQIDMAFNVFFLLYFGLRFIAANDKLWFWLEVNSVVDFFTVPPVFVSVYLNRSWLGLRFLRALRLIQFSEILQFLNILKTSNSIKLVNLLSIFISTWLTAAGFIHLVENSGDPWENFQNNQALTYWECVYLLMVTMSTVGYGDVYAKTTLGRLFMVFFILGGLAMFASYVPEIIELIGNRKKYGGSYSAVSGRKHIVVCGHITLESVSNFLKDFLHKDRDDVNVEIVFLHNISPNLELEALFKRHFTQVEFYQGSVLNPHDLARVKIESADACLILANKYCADPDAEDASNIMRVISIKNYHPKIRIITQMLQYHNKAHLLNIPSWNWKEGDDAICLAELKLGFIAQSCLAQGLSTMLANLFSMRSFIKIEEDTWQKYYLEGVSNEMYTEYLSSAFVGLSFPTVCELCFVKLKLLMIAIEYKSANRESRILINPGNHLKIQEGTLGFFIASDAKEVKRAFFYCKACHDDITDPKRIKKCGCKRLEDEQPSTLSPKKKQRNGGMRNSPNTSPKLMRHDPLLIPGNDQIDNMDSNVKKYDSTGMFHWCAPKEIEKVILVTGWMPYLGPRVLMTCLDIGVVCMPTDIQSTSPASIKKFKETRSEAAMTVLSGHVVVCIFGDVSSALIGLRNLVMPLRASNFHYHELKHIVFVGSIEYLKREWETLHNFPKVSILPGTPLSRADLRAVNINLCDMCVILSANQNNIDDTSLQDKECILASLNIKSMQFDDSIGVLQANSQGFTPPGMDRSSPDNSPVHGMLRQPSITTGVNIPIITELVNDTNVQFLDQDDDDDPDTELYLTQPFACGTAFAVSVLDSLMSATYFNDNILTLIRTLVTGGATPELEALIAEENALRGGYSTPQTLANRDRCRVAQLALLDGPFADLGDGGCYGDLFCKALKTYNMLCFGIYRLRDAHLSTPSQCTKRYVITNPPYEFELVPTDLIFCLMQFDHNAGQSRASLSHSSHSSQSSSKKSSSVHSIPSTANRQNRPKSRESRDKQKYVQEERL

SEQ ID NO: 61164 - DNA, 3660 bp, Artificial Sequence
  derived and/or modified sequence
atggctaacggcggcgggggcggcggtgggtcgtccgggggaggcggcggaggcggagggtctagtctgagaatgagctccaatattcacgccaatcaccttagcctggacgcaagctcctcctcgagcagctctagcagctcctccagctcctcgtcatcctctagtagttcttccagcgtgcatgagccaaagatggacgccctgatcatccctgtgacaatggaggttccgtgtgatagtcgtggtcagcgcatgtggtgggctttcctcgctagctcaatggtgacgttcttcggcggattgttcatcattttgctgtggaggacccttaaatatctgtggacggtgtgttgccattgcggcggcaagacaaaggaggcacagaagattaacaacgggtcgagccaggcagatggtaccctgaagcctgtggacgaaaaagaggaagcagtggctgccgaggtcggatggatgactagtgtgaaagattgggctggcgtaatgatttccgctcagacgctgacgggacgcgttctagtcgttctggtgtttgcactatctatcggagctctggtcatctattttatcgattcctccaaccctatcgaatcatgccagaatttttacaaggacttcactttgcagattgacatggcatttaatgtcttcttcctgctgtatttcggtctgcgtttcatcgctgcaaatgataagctgtggttctggctggaagtgaattccgtggtggacttcttcaccgtgcccccagtgtttgtgagtgtttacctgaatagatcctggttaggactgcgctttcttcgcgctttacgtttgatccagttcagtgaaattttgcagttcttaaacatactcaaaacttcgaactcaattaagctggtaaatctactgtccatttttattagcacctggctgaccgcggctggtttcatccacctggtcgaaaatagcggtgatccctgggagaacttccaaaataatcaggccctgacgtactgggagtgtgtatacttactcatggtcaccatgtctacagttggatacggagacgtctatgctaagaccacactcggccggttatttatggtcttcttcatcctgggcggactggctatgttcgcttcatatgttccggaaatcatagaactgattgggaataggaagaagtacggcggcagctatagtgccgtgagtggccggaaacacatagttgtgtgcgggcacatcaccctggaaagcgtgagcaactttctgaaggacttccttcataaggaccgcgatgacgtcaacgtggaaattgtgtttctgcataacatatcccctaacctggaactggaagccctcttcaagcgtcatttcactcaggttgagttttaccaaggaagcgtgctgaacccacatgacctggcaagagtgaaaatcgagagcgccgatgcctgtttgatccttgctaataagtactgtgctgatcctgacgcagaagacgcctctaatattatgagagtgattagtatcaagaactatcaccccaagatacgaatcataactcagatgttacaataccacaacaaagcccacttgctcaacattccttcgtggaactggaaggagggtgacgacgccatatgcctcgctgagttaaagctgggctttatcgcccagtcatgtctagctcagggtctgtccactatgctcgccaacctattctcgatgcggagttttattaagattgaagaggatacatggcagaaatactatcttgagggcgtgtcaaacgaaatgtacacagagtacctgagtagcgcatttgtaggtctgtccttccccaccgtctgcgagctgtgtttcgtcaagctgaaactgctcatgatcgccatcgagtacaaatctgcaaaccgggaatcgcggatcctgatcaaccctggcaaccatctcaagatccaggaaggaacattgggattcttcatagccagcgatgcgaaggaagtgaagagggcatttttttactgtaaagcttgtcatgacgacatcactgaccctaagcgcattaagaagtgcgggtgcaagcggttagaagatgaacagccgagtacactgagtcccaagaagaaacagcgcaacggcggcatgcgcaatagccccaacaccagcccgaaattgatgcggcatgaccccttgctgattcccggcaatgatcagatagataatatggatagcaatgtcaagaaatacgattccacaggcatgtttcactggtgtgcacccaaagagattgagaaggttattcttgtaactgggtggatgccctatctcggtccccgcgtactcatgacatgcctcgacatcggagttgtctgcatgcccactgacatccagtctacatccccagcgtcaatcaaaaaattcaaggaaacacgctcagaggctgctatgactgtattgagcggccacgtggtcgtgtgcatttttggggatgtatcgagcgccttgataggtctaaggaacctcgtgatgccgttgcgggcctcaaactttcattatcacgagctgaagcacatcgtttttgtgggtagcatagagtatctgaagcgggaatgggagacgctgcacaactttccgaaagtgagtatcttgcctggaactcctctgtcacgcgctgatctcagagccgtaaatatcaacttatgtgatatgtgtgtcatcctctccgctaaccagaataatatcgacgatacaagtctccaggataaagagtgcatactcgcctccttaaacatcaagtctatgcagtttgatgattctataggcgtgcttcaggccaacagtcagggtttcactccccccggaatggatcgaagcagtcccgacaactcgccagtgcacgggatgctgaggcaaccatctattacaaccggcgtgaacatccctataatcacagaactcgtgaacgatacaaacgtccagttcctcgatcaggatgatgatgatgaccctgatacagagctgtacctgacacaacctttcgcatgtggtacagcatttgctgtgagcgtgctggatagcctgatgagtgcaacctactttaatgataatattttgacactgatcaggacactcgtaacaggcggtgctacccccgagttggaggccttgatcgcagaagaaaacgctttacgcggcggctactccacaccccagacactcgccaacagggaccggtgcagagttgcccagctagctctgttggatggcccctttgccgaccttggggatggaggttgctacggcgacctcttctgcaaggccctgaagacttataatatgctctgtttcggaatctacagacttagggatgcacatttatctacccctagccagtgcactaagcgctacgtgataacgaacccaccttacgagtttgagttagtgcccaccgacctaatattttgtttgatgcagtttgaccacaacgccggacagtctcgggcctcgctctcccacagttctcattcgtctcagagctcctccaaaaagtcttcatccgttcactccattccttctaccgcaaaccgacagaacagacccaaatcccgggaatctcgggataaacagaagtacgtacaggaagagcgcctctag

SEQ ID NO: 61165 - DNA, 3660 bp, Artificial Sequence
  derived and/or modified sequence
atggccaatggaggcggcggcggcggcggcagcagcggcggcggcggcggcggcggcggcagcagcctgaggatgagcagcaacatccacgccaaccacctgagcctggatgccagcagcagcagcagcagcagcagcagcagcagcagcagcagcagcagcagcagcagcagcagctctgtgcatgagcccaagatggatgccctgatcatccctgtgaccatggaggtgccctgtgacagccggggccagaggatgtggtgggccttcctggccagctccatggtgaccttctttggaggcctcttcatcatcctgctgtggaggaccctgaagtacctgtggacagtgtgctgccactgcggcggcaagaccaaggaggcccagaagatcaacaacggcagcagccaggctgatggcaccctgaagcctgtggatgagaaggaggaggccgtggccgctgaggtgggctggatgacctctgtgaaggactgggccggcgtgatgatcagcgcccagaccctgaccggccgggtgctggtggtgctggtgtttgccctgagcattggagccctggtgatctacttcatcgacagcagcaaccccatcgagagctgccagaacttctacaaggacttcaccctgcagattgacatggccttcaacgtgttcttcctgctgtacttcggcctgcgcttcatcgccgccaatgacaagctgtggttctggctggaggtgaacagcgtggtggacttcttcaccgtgccccctgtgtttgtgtctgtgtacctgaacagatcctggctgggcctgcgcttcctgcgggccctgcggctcatccagttcagcgagatcctgcagttcctgaacatcctgaagaccagcaacagcatcaagctggtgaacctgctgagcatcttcatcagcacctggctgacagctgctggcttcatccacctggtggagaacagcggggacccctgggagaacttccagaacaaccaggccctgacctactgggagtgtgtgtacctgctgatggtgaccatgagcacagtgggctatggagatgtgtatgccaagaccaccctgggccgcctcttcatggtgttcttcatcctgggcggcctggccatgtttgccagctatgtgcctgagatcatcgagctgattggcaacaggaagaagtatggaggcagctacagcgctgtgtctggcaggaagcacatcgtggtgtgtggccacatcaccctggagagcgtgagcaacttcctgaaggacttcctgcacaaggacagagatgatgtgaatgtggagatcgtgttcctgcacaacatcagccccaacctggagctggaggccctcttcaagaggcacttcacccaggtggagttctaccagggctctgtgctgaacccccatgacctggcccgggtgaagattgaatctgcagatgcctgcctgatcctggccaacaagtactgtgccgaccctgatgctgaagatgccagcaacatcatgagggtcatcagcatcaagaactaccaccccaagatccgcatcatcacccagatgctgcagtaccacaacaaggcccacctgctgaacatccccagctggaactggaaggagggagatgatgccatctgcctggccgagctgaagctgggcttcatcgcccagagctgcctggcccagggcctgagcaccatgctggccaacctcttctccatgaggagcttcatcaagattgaggaggacacctggcagaagtactacctggagggcgtgtccaatgagatgtacacagagtacctgagcagcgcctttgtgggcctgtccttccccaccgtgtgtgagctgtgctttgtgaagctgaagctgctgatgattgccatcgagtacaagagcgccaaccgggagagccgcatcctgatcaaccctggcaaccacctgaagatccaggagggcaccctgggcttcttcatcgccagtgatgccaaggaggtgaagagggccttcttctactgcaaggcctgccatgatgacatcacagaccccaagaggatcaagaagtgtggctgcaagaggctggaggatgagcagcccagcaccctgagccccaagaagaagcagagaaatggaggcatgaggaacagccccaacaccagccccaagctgatgagacatgaccccctgctgatccctggaaatgaccagattgacaacatggacagcaatgtgaagaagtatgacagcacaggcatgttccactggtgtgcccccaaggagattgagaaggtgatcctggtgacaggctggatgccctacctgggcccccgggtgctgatgacctgcctggacattggagtggtgtgcatgcccacagacatccagagcaccagccctgccagcatcaagaagttcaaggagaccaggtctgaggccgccatgacagtgctgagcggccacgtggtggtgtgcatctttggagatgtgtcctctgccctgattggcctgaggaacctggtgatgcccctgcgggccagcaacttccactaccacgagctgaagcacatcgtgtttgtgggcagcattgagtacctgaagcgggagtgggagaccctgcacaacttccccaaggtgtccatcctgcccggcacccccctgagcagagctgacctgcgggctgtgaacatcaacctgtgtgacatgtgtgtgatcctgagcgccaaccagaacaacattgatgacaccagcctgcaggacaaggagtgcatcctggccagcctgaacatcaagtccatgcagtttgatgacagcattggagtgctgcaggccaacagccagggcttcaccccacctggcatggacaggagcagcccagacaacagccctgtgcacggcatgctgcggcagcccagcatcaccaccggggtgaacatccccatcatcacagagctggtgaatgacaccaacgtgcagttcctggaccaggatgatgatgatgatcctgacacagagctgtacctgacccagccctttgcctgtggcacagcctttgctgtgtctgtgctggacagcctgatgtctgccacctacttcaatgacaacatcctgaccctcatccgcaccctggtgactggaggagccaccccagagctggaggccctgattgctgaggagaatgccctgcggggcggctacagcaccccccagaccctggccaacagagaccgctgccgggtggcccagctggccctgctggatggcccctttgctgacctgggagatggcggctgctacggggacctcttctgcaaggccctgaagacctacaacatgctgtgcttcggcatctaccgcctgagagatgcccacctgagcacccccagccagtgcaccaagcgctacgtgatcaccaaccccccctatgaatttgagctggtgcccacagacctgatcttctgcctgatgcagtttgaccacaatgccggccagagccgggccagcctgagccacagcagccacagcagccagagcagcagcaagaagagcagctctgtgcacagcatccccagcacagccaaccggcagaaccggcccaagagccgggagagccgggacaagcagaagtatgtgcaggaggagcggctgtag

SEQ ID NO: 61166 - DNA, 3660 bp, Artificial Sequence
  derived and/or modified sequence
atggccaacggcggcggcggcggcggcggcagcagcggcggcggcggtgggggggggggctcatctctgagaatgtcgtcgaacatacacgccaatcacttaagtctggacgcatcttcctccagctccagctccagctcctcaagttcgagttctagcagtagcagttcaagttcctctgttcacgaaccaaagatggatgccctgatcattccagtgaccatggaggtcccatgcgactccaggggccaacgaatgtggtgggccttcctcgccagttccatggtaacttttttcggcgggctgtttatcatcctgctctggaggaccctgaagtacctgtggaccgtttgctgccactgcggcggaaagacaaaggaggctcaaaagatcaataacgggtccagtcaagcagacgggaccctgaagcccgtggacgagaaagaggaggccgtcgccgcagaggtgggctggatgaccagcgtgaaagactgggctggcgttatgatcagcgctcaaactcttaccggcagggtgctggtggtactggtgtttgctcttagcatcggcgccctggtcatctacttcatagactctagcaatcccattgagtcctgtcagaacttctacaaagacttcactttgcagatcgatatggctttcaacgtcttttttttgctgtactttggattgagatttattgcagcaaacgacaaattatggttctggctggaagtgaactctgtggtcgactttttcaccgtgccccccgtgtttgtgtccgtttacctgaatcgtagctggcttggcttaaggtttctccgcgcactgaggctcatacaattttcagagattttgcagtttctgaacattctcaagacatccaatagcattaagctggttaacttgctgtcaatctttatctcaacctggctgaccgccgccggtttcatccacttggtggaaaactctggcgatccatgggagaacttccaaaataaccaggcacttacgtactgggaatgtgtgtacctgcttatggtcacgatgtccacagttggctacggagacgtctacgccaagaccactctcggccggctgttcatggtgttcttcatcctaggtggtctggctatgtttgcgtcctatgtacccgaaattatcgaacttatcggcaatagaaaaaagtatggcggttcttactccgctgtcagcggccgtaagcacatcgtggtgtgtggccacatcaccctggaatccgttagcaacttcctcaaggatttcctgcataaagaccgtgacgacgtgaacgttgagattgtatttctccacaatatttccccaaacctggagttagaagctctgttcaaacgtcatttcacccaggtggagttttaccaggggtctgtgctcaatcctcatgatctcgcgagagtgaagatagaaagcgcagacgcttgtctcattttggctaataagtactgtgcggaccccgatgctgaagatgcaagtaacattatgcgcgtgatcagtattaagaactaccacccaaagatccgcatcatcacacagatgcttcagtatcacaacaaggctcatctcctcaacatcccctcctggaactggaaagaaggcgacgacgcgatctgcctggcggaactgaagcttggcttcatagcgcaaagctgtctggctcaggggctgagcaccatgttagctaatttattctctatgcgttccttcatcaaaattgaggaagatacgtggcagaagtactacttagagggggtgtccaatgagatgtacaccgagtatctcagttcagcctttgtaggtctcagtttccctacagtgtgcgaactatgttttgtgaagctgaaactccttatgattgcaattgaatacaagtcagccaacagggagtctcgcattctgatcaacccagggaatcacttgaagatccaggagggcaccctgggtttttttattgcatctgatgcaaaagaagttaagagagctttcttctattgtaaagcctgtcatgatgatatcactgatccaaaaaggatcaagaaatgtgggtgcaagagactcgaagacgaacagccatcaactctctctcccaagaaaaaacagcggaatggggggatgcggaacagccctaataccagcccgaaactgatgcggcacgatccactcttgatacccggaaacgatcaaattgacaatatggattcaaacgtgaagaagtacgattcaactgggatgttccattggtgcgccccaaaagaaatcgagaaggtgatactggtgacaggctggatgccttaccttgggccgagggttctaatgacttgtctggatataggcgtggtgtgcatgcctaccgatatccagtccaccagccccgcttcgatcaaaaaattcaaggagacccggtctgaggctgctatgaccgtcctgagtggtcacgtggttgtctgtatctttggcgacgtgagctcagcactcataggactcaggaacctagtgatgccactgcgcgctagcaattttcactaccatgagctcaaacatatcgtgtttgtcggcagcatcgagtacctgaaaagggaatgggagaccctgcacaacttccctaaagtctcaatcctcccaggcacccctctttctagagcagatctgagggccgtgaatatcaatctctgcgacatgtgtgtgatactcagcgccaatcaaaacaacatcgatgacacatctttacaggacaaggaatgtatcctggcgtctctcaacatcaagagcatgcagttcgatgacagcattggcgttctgcaggccaattcccagggatttaccccacctggcatggaccggtctagtcccgataacagtccggtacatgggatgctgagacaaccgagcataacgactggagttaacatccccataatcaccgagctggtcaatgacaccaacgtacagtttctcgaccaggacgatgatgatgaccccgacacggagttgtacctgacgcaaccttttgcctgcggcaccgcctttgcggtttctgtgctggactctttgatgtctgctacttactttaacgataacattctcaccctcattaggacactggtgaccgggggcgctacgccagaactcgaggctttgatcgccgaggagaatgcactgcgcggaggatactccacaccccagacgttagccaatagagacagatgtcgggtggcacaattggcactcctggacgggccattcgctgatctcggagatgggggttgctacggcgacctgttttgcaaggcactgaagacgtataatatgctctgcttcggaatataccgactgagagatgcccatctaagcactccctctcagtgcactaaaagatacgtgatcactaacccaccatatgaattcgaattggtaccaaccgacctgatattctgcctgatgcagttcgaccataatgccggccagtctcgagcaagcctctcacatagttcacatagctcccagagcagttcaaagaaaagttcctcagtacactccattccctcaacagccaatagacagaatagacctaagtccagagaatcacgagacaagcagaaatatgttcaggaggagcgactctag

SEQ ID NO: 61167 - DNA, 3660 bp, Artificial Sequence
  derived and/or modified sequence
atggcaaatggtggcggcggcggcggcggcagcagcggcggcggcggcggcggcggaggcagcagtcttagaatgagtagcaatatccacgcgaaccatctcagcctagacgcgtcctcctcctcctcctcctcctcttcctcttcttcttcttcctcctcctcttcctcctcgtcctcggtccacgagcccaagatggatgcgctcatcatcccggtgaccatggaggtgccgtgcgacagccggggccaacgcatgtggtgggctttcctggcctcctccatggtgactttcttcgggggcctcttcatcatcttgctctggcggacgctcaagtacctgtggaccgtgtgctgccactgcgggggcaagacgaaggaggcccagaagattaacaatggctcaagccaggcggatggcactctcaaaccagtggatgaaaaagaggaggcagtggccgccgaggtcggctggatgacctccgtgaaggactgggcgggggtgatgatatccgcccagacactgactggcagagtcctggttgtcttagtctttgctctcagcatcggtgcacttgtaatatacttcatagattcatcaaacccaatagaatcctgccagaatttctacaaagatttcacattacagatcgacatggctttcaacgtgttcttccttctctacttcggcttgcggtttattgcagccaacgataaattgtggttctggctggaagtgaactctgtagtggatttcttcacggtgccccccgtgtttgtgtctgtgtacttaaacagaagttggcttggtttgagatttttaagagctctgagactgatacagttttcagaaattttgcagtttctgaatattcttaaaacaagtaattccatcaagctggtgaatctgctctccatatttatcagcacgtggctgactgcagccgggttcatccatttggtggagaattcaggggacccatgggaaaatttccaaaacaaccaggctctcacctactgggaatgtgtctatttactcatggtcacaatgtccaccgttggttatggggatgtttatgcaaaaaccacacttgggcgcctcttcatggtcttcttcatcctcgggggactggccatgtttgccagctacgtccctgaaatcatagagttaataggaaaccgcaagaaatacgggggctcctatagtgcggttagtggaagaaagcacattgtggtctgcggacacatcactctggagagtgtttccaacttcctgaaggactttctgcacaaggaccgggatgacgtcaatgtggagatcgtttttcttcacaacatctcccccaacctggagcttgaagctctgttcaaacgacattttactcaggtggaattttatcagggttccgtcctcaatccacatgatcttgcaagagtcaagatagagtcagcagatgcatgcctgatccttgccaacaagtactgcgctgacccggatgcggaggatgcctcgaatatcatgagagtaatctccataaagaactaccatccgaagataagaatcatcactcaaatgctgcagtatcacaacaaggcccatctgctaaacatcccgagctggaattggaaagaaggtgatgacgcaatctgcctcgcagagttgaagttgggcttcatagcccagagctgcctggctcaaggcctctccaccatgcttgccaacctcttctccatgaggtcattcataaagattgaggaagacacatggcagaaatactacttggaaggagtctcaaatgaaatgtacacagaatatctctccagtgccttcgtgggtctgtccttccctactgtttgtgagctgtgttttgtgaagctcaagctcctaatgatagccattgagtacaagtctgccaaccgagagagccgtatattaattaatcctggaaaccatcttaagatccaagaaggtactttaggatttttcatcgcaagtgatgccaaagaagttaaaagggcatttttttactgcaaggcctgtcatgatgacatcacagatcccaaaagaataaaaaaatgtggctgcaaacggcttgaagatgagcagccgtcaacactatcaccaaaaaaaaagcaacggaatggaggcatgcggaactcacccaacacctcgcctaagctgatgaggcatgaccccttgttaattcctggcaatgatcagattgacaacatggactccaatgtgaagaagtacgactctactgggatgtttcactggtgtgcacccaaggagatagagaaagtcatcctggtcacaggctggatgccgtatctgggacctagggttttaatgacttgcctggatattggtgtagtatgcatgccaactgatattcaatcaacatctcctgccagcataaaaaagtttaaggagactcgaagtgaagctgccatgaccgtcctgagtggccatgtcgtggtctgcatctttggcgacgtcagctcagccctgatcggcctccggaacctggtgatgccgctccgtgccagcaactttcattaccatgagctcaagcacattgtgtttgtgggctctattgagtacctcaagcgggaatgggagacgcttcataacttccccaaagtgtccatattgcctggtacgccattaagtcgggctgatttaagggctgtcaacatcaacctctgtgacatgtgcgttatcctgtcagccaatcagaataatattgatgatacttcgctgcaggacaaggaatgcatcttggcgtcactcaacatcaaatctatgcagtttgatgacagcatcggagtcttgcaggctaattcccaagggttcacacctccaggaatggatagatcctctccagataacagcccagtgcacgggatgttacgtcaaccatccatcacaactggggtcaacatccccatcatcactgaactagtgaacgatactaatgttcagtttttggaccaagacgatgatgatgaccctgatacagaactgtacctcacgcagccctttgcctgtgggacagcatttgccgtcagtgtcctggactcactcatgagcgcgacgtacttcaatgacaatatcctcaccctgatacggaccctggtgaccggaggagccacgccggagctggaggctctgattgctgaggaaaacgcccttagaggtggctacagcaccccgcagacactggccaatagggaccgctgccgcgtggcccagttagctctgctcgatgggccatttgcggacttaggggatggtggttgttatggtgatctgttctgcaaagctctgaaaacatataatatgctttgttttggaatttaccggctgagagatgctcacctcagcacccccagtcagtgcacaaagaggtatgtcatcaccaacccgccctatgagtttgagctcgtgccgacggacctgatcttctgcttaatgcagtttgaccacaatgccggccagtcccgggccagcctgtcccattcctcccactcgtcgcagtcctccagcaagaagagctcctctgttcactccatcccatccacagcaaaccgacagaaccggcccaagtccagggagtcccgggacaaacagaagtacgtgcaggaagagcggctttga

SEQ ID NO: 61168 - DNA, 3660 bp, Artificial Sequence
  derived and/or modified sequence
atggccaacgggggtggagggggaggcggatcgtcgggcggtggagggggtggcggtgggagcagtctgaggatgtcctcgaacatccacgcaaatcatctcagtctagacgctagttcatcctcaagttcatcttcttcctcctcgtcgtcttcatcatcttcaagttctagctccagcgtgcacgagcctaaaatggatgcgctcattattcctgttacgatggaagttccgtgtgactctcgtggccagcgcatgtggtgggcctttctagctagcagtatggtgaccttttttggtggattgttcatcatcctgctgtggcgcaccttaaaatatctttggaccgtctgctgtcattgcggaggcaaaacaaaggaagcccaaaagattaataacggttcatcccaggctgatggtacactcaagccagttgacgagaaagaagaagcagtggccgcagaggttgggtggatgacttctgtgaaagactgggccggagtgatgataagcgcccagaccttgactggaagagttctggtggtattggttttcgccctcagtatcggagctcttgtgatctacttcattgactcatccaacccaatagaatcatgtcagaatttttacaaagactttacactacaaattgacatggcctttaacgtgttctttctgctctactttgggctacggttcatcgccgctaatgataagctatggttctggcttgaagtgaacagcgtcgttgacttcttcacagtccctcccgtattcgtcagtgtgtacctgaacaggtcatggcttggcctgcggtttctgagagctctaagattaatccagttctccgaaattctccagtttctgaatatccttaaaacaagtaatagcattaagctcgtaaacctactgtctattttcatctccacctggctcaccgctgccggattcattcacctggttgagaacagtggcgacccatgggaaaatttccagaacaatcaggctttaacttattgggaatgcgtgtatctactcatggtaactatgtccactgttggctatggcgatgtctacgcaaaaacaacattaggtcgattattcatggtcttctttatcttgggtgggctggctatgtttgcctcttacgtccctgaaattatagagctgatcggtaaccggaagaagtacggaggtagctattccgccgtgagcgggcgtaaacacatcgtcgtgtgcggacacataactctggagagcgtatccaatttcctgaaagatttcctgcataaagacagggacgacgtaaacgtcgagattgtttttctccacaatatatctccaaacttagaacttgaagccctatttaagcgtcatttcacgcaagtagaattctaccagggttctgttttgaatcctcatgacctcgctagagtaaagatcgagtctgccgacgcatgcctgatcctcgccaacaagtattgcgccgacccggatgccgaggacgcctccaacattatgcgagtaatcagtatcaaaaattaccatcccaagattagaatcatcacacagatgctgcagtatcacaataaagcccacctgttgaacatcccatcctggaactggaaggagggggacgacgccatctgccttgccgagctcaagctgggttttatagcacagtcctgtctggcacagggtttgtccaccatgctggctaacctcttctccatgcggtcattcatcaagattgaagaggatacgtggcagaagtattacttggagggagtctcaaatgaaatgtacactgagtacctttcgtcggctttcgtgggcctctcattccccacagtgtgtgaactttgctttgtcaagctcaagctgctgatgatcgcgattgagtacaaaagtgctaatcgagagtctaggattctgatcaacccaggaaaccacctgaaaatccaggaaggaacactgggtttttttatcgcttcagatgcgaaggaggtgaagagggcctttttttactgtaaagcatgccacgatgatataaccgatccaaagaggatcaagaaatgtggctgcaagcggttggaagacgagcagccgagcacactaagtcccaagaaaaaacagcggaacggcggaatgcgtaactctcctaacacctcccccaagctcatgcgacatgatccgctcctgatccctggcaacgatcaaatcgacaacatggatagtaatgtcaagaagtacgacagtacagggatgttccactggtgtgctccaaaagaaattgagaaagtgattctggttaccggatggatgccttatcttggaccccgagtcctgatgacttgcttggatataggcgtagtctgtatgcccaccgatatacagtccactagtccggctagcattaagaagtttaaagaaaccaggtctgaagccgctatgactgtgttatcaggtcacgtcgtggtttgcatatttggtgatgtctcctctgctctgatcgggctgcgcaatctggtgatgcctctccgggctagcaattttcactaccacgaactaaaacacattgtcttcgttggctcaatcgaatacctgaaacgtgaatgggaaactctgcacaacttcccaaaagtctcaatactcccgggaactccactgtctcgtgctgatctacgagccgtgaacatcaacttgtgcgatatgtgcgtcattctcagcgccaatcaaaataacatagatgacacatcgcttcaagacaaggagtgtattctggcctccctgaatattaagtccatgcagtttgacgattctatcggggtgttacaagccaattcgcagggttttacccccccaggcatggacaggtcaagccctgataattctcccgtgcatgggatgcttcgccagccctctatcaccacaggggtgaacatccctatcattactgaactcgttaatgataccaatgttcagttcttggatcaagatgacgacgacgaccccgatacagagttgtatctgactcagccattcgcctgtggcacagccttcgccgtctctgtgctcgactcattgatgtctgccacctatttcaatgacaatattctgaccctcatccggacccttgtgacaggtggtgcgacgcccgagctcgaagcccttattgcggaggaaaatgcgctgcgcggagggtatagcaccccccaaaccctcgcaaatcgcgaccgttgccgagttgcacaactcgccttattagacggccctttcgcggacctcggagatgggggttgctatggggatttattctgtaaggcgctgaagacatacaacatgctctgcttcggaatttaccggctccgtgatgcccatttatctacaccatctcagtgcacaaagagatatgtgattactaaccccccatatgagttcgagctcgtgcctacagacctgatattctgcttgatgcagttcgaccataacgctggacagtcccgtgcatccctgtcacacagtagtcatagtagtcagagctctagcaaaaaatccagttccgtccactccattccgtcgactgcgaatagacagaatcggccaaagtctagggagagtagagacaaacagaaatacgtgcaggaggaacggctctag

SEQ ID NO: 61169 - DNA, 3660 bp, Artificial Sequence
  derived and/or modified sequence
atggccaacggcggcggcggcggcggcggcagcagcggcggcggcggcggcggcggcggcagcagcctgagaatgagcagcaacatccacgccaaccacctgagcctggacgccagcagcagcagcagcagcagcagcagcagcagcagcagcagcagcagcagcagcagcagcagcagcgtgcacgagcccaagatggacgccctgatcatccccgtgaccatggaggtgccctgcgacagcagaggccagagaatgtggtgggccttcctggccagcagcatggtgaccttcttcggcggcctgttcatcatcctgctgtggagaaccctgaagtacctgtggaccgtgtgctgccactgcggcggcaagaccaaggaggcccagaagatcaacaacggcagcagccaggccgacggcaccctgaagcccgtggacgagaaggaggaggccgtggccgccgaggtgggctggatgaccagcgtgaaggactgggccggcgtgatgatcagcgcccagaccctgaccggcagagtgctggtggtgctggtgttcgccctgagcatcggcgccctggtgatctacttcatcgacagcagcaaccccatcgagagctgccagaacttctacaaggacttcaccctgcagatcgacatggccttcaacgtgttcttcctgctgtacttcggcctgagattcatcgccgccaacgacaagctgtggttctggctggaggtgaacagcgtggtggacttcttcaccgtgccccccgtgttcgtgagcgtgtacctgaacagaagctggctgggcctgagattcctgagagccctgagactgatccagttcagcgagatcctgcagttcctgaacatcctgaagaccagcaacagcatcaagctggtgaacctgctgagcatcttcatcagcacctggctgaccgccgccggcttcatccacctggtggagaacagcggcgacccctgggagaacttccagaacaaccaggccctgacctactgggagtgcgtgtacctgctgatggtgaccatgagcaccgtgggctacggcgacgtgtacgccaagaccaccctgggcagactgttcatggtgttcttcatcctgggcggcctggccatgttcgccagctacgtgcccgagatcatcgagctgatcggcaacagaaagaagtacggcggcagctacagcgccgtgagcggcagaaagcacatcgtggtgtgcggccacatcaccctggagagcgtgagcaacttcctgaaggacttcctgcacaaggacagagacgacgtgaacgtggagatcgtgttcctgcacaacatcagccccaacctggagctggaggccctgttcaagagacacttcacccaggtggagttctaccagggcagcgtgctgaacccccacgacctggccagagtgaagatcgagagcgccgacgcctgcctgatcctggccaacaagtactgcgccgaccccgacgccgaggacgccagcaacatcatgagagtgatcagcatcaagaactaccaccccaagatcagaatcatcacccagatgctgcagtaccacaacaaggcccacctgctgaacatccccagctggaactggaaggagggcgacgacgccatctgcctggccgagctgaagctgggcttcatcgcccagagctgcctggcccagggcctgagcaccatgctggccaacctgttcagcatgagaagcttcatcaagatcgaggaggacacctggcagaagtactacctggagggcgtgagcaacgagatgtacaccgagtacctgagcagcgccttcgtgggcctgagcttccccaccgtgtgcgagctgtgcttcgtgaagctgaagctgctgatgatcgccatcgagtacaagagcgccaacagagagagcagaatcctgatcaaccccggcaaccacctgaagatccaggagggcaccctgggcttcttcatcgccagcgacgccaaggaggtgaagagagccttcttctactgcaaggcctgccacgacgacatcaccgaccccaagagaatcaagaagtgcggctgcaagagactggaggacgagcagcccagcaccctgagccccaagaagaagcagagaaacggcggcatgagaaacagccccaacaccagccccaagctgatgagacacgaccccctgctgatccccggcaacgaccagatcgacaacatggacagcaacgtgaagaagtacgacagcaccggcatgttccactggtgcgcccccaaggagatcgagaaggtgatcctggtgaccggctggatgccctacctgggccccagagtgctgatgacctgcctggacatcggcgtggtgtgcatgcccaccgacatccagagcaccagccccgccagcatcaagaagttcaaggagaccagaagcgaggccgccatgaccgtgctgagcggccacgtggtggtgtgcatcttcggcgacgtgagcagcgccctgatcggcctgagaaacctggtgatgcccctgagagccagcaacttccactaccacgagctgaagcacatcgtgttcgtgggcagcatcgagtacctgaagagagagtgggagaccctgcacaacttccccaaggtgagcatcctgcccggcacccccctgagcagagccgacctgagagccgtgaacatcaacctgtgcgacatgtgcgtgatcctgagcgccaaccagaacaacatcgacgacaccagcctgcaggacaaggagtgcatcctggccagcctgaacatcaagagcatgcagttcgacgacagcatcggcgtgctgcaggccaacagccagggcttcaccccccccggcatggacagaagcagccccgacaacagccccgtgcacggcatgctgagacagcccagcatcaccaccggcgtgaacatccccatcatcaccgagctggtgaacgacaccaacgtgcagttcctggaccaggacgacgacgacgaccccgacaccgagctgtacctgacccagcccttcgcctgcggcaccgccttcgccgtgagcgtgctggacagcctgatgagcgccacctacttcaacgacaacatcctgaccctgatcagaaccctggtgaccggcggcgccacccccgagctggaggccctgatcgccgaggagaacgccctgagaggcggctacagcaccccccagaccctggccaacagagacagatgcagagtggcccagctggccctgctggacggccccttcgccgacctgggcgacggcggctgctacggcgacctgttctgcaaggccctgaagacctacaacatgctgtgcttcggcatctacagactgagagacgcccacctgagcacccccagccagtgcaccaagagatacgtgatcaccaaccccccctacgagttcgagctggtgcccaccgacctgatcttctgcctgatgcagttcgaccacaacgccggccagagcagagccagcctgagccacagcagccacagcagccagagcagcagcaagaagagcagcagcgtgcacagcatccccagcaccgccaacagacagaacagacccaagagcagagagagcagagacaagcagaagtacgtgcaggaggagagactgtag

SEQ ID NO: 61170 - protein, 891 aa, Artificial Sequence
  derived and/or modified sequence
MSYFGEHFWGEKNHGFEVLYHSVKQGPISTKELADFIRERATIEETYSKAMAKLSKLASNGTPMGTFAPLWEVFRVSSDKLALCHLELTRKLQDLIKDVLRYGEEQLKTHKKCKEEVVSTLDAVQVLSGVSQLLPKSRENYLNRCMDQERLRRESTSQKEMDKAETKTKKAAESLRRSVEKYNSARADFEQKMLDSALRFQAMEETHLRHMKALLGSYAHSVEDTHVQIGQVHEEFKQNIENVSVEMLLRKFAESKGTGREKPGPLDFEAYSAAALQEAMKRLRGAKAFRLPGLSRREREPEPPAAVDFLEPDSGTCPEVDEEGFTVRPDVTQNSTAEPSRFSSSDSDFDDEEPRKFYVHIKPAPARAPACSPEAAAAQLRATAGSLILPPGPGGTMKRHSSRDAAGKPQRPRSAPRTSSCAERLQSEEQVSKNLFGPPLESAFDHEDFTGSSSLGFTSSPSPFSSSSPENVEDSGLDSPSHAAPGPSPDSWVPRPGTPQSPPSCRAPPPEARGIRAPPLPDSPQPLASSPGPWGLEALAGGDLMPAPADPTAREGLAAPPRRLRSRKVSCPLTRSNGDLSRSLSPSPLGSSAASTALERPSFLSQTGHGVSRGPSPVVLGSQDALPIATAFTEYVHAYFRGHSPSCLARVTGELTMTFPAGIVRVFSGTPPPPVLSFRLVHTTAIEHFQPNADLLFSDPSQSDPETKDFWLNMAALTEALQRQAEQNPTASYYNVVLLRYQFSRPGPQSVPLQLSAHWQCGATLTQVSVEYGYRPGATAVPTPLTNVQILLPVGEPVTNVRLQPAATWNLEEKRLTWRLPDVSEAGGSGRLSASWEPLSGPSTPSPVAAQFTSEGTTLSGVDLELVGSGYRMSLVKRRFATAAPPQGCTW

SEQ ID NO: 61171 - DNA, 3214 bp, Artificial Sequence
  derived and/or modified sequence
cgcgccgcagccgcggagggaggggcggggcgggctccggtgtcagcgaccaagccgcaggtggcggcgagcgcggggctcggcccgagctcaggagatggggaaactgaggcacggagctggacagtgactcagacaccaggagctgcctggagtggagctgagagctcaggtctgggctcagccagtccagagtgcaaatctactgtcccttcctagctgtgtgatcttggcaagcactggacggggcctgcaggggtctccacagagaccatcaggatgtcgtattttggggagcatttttggggcgagaaaaatcatggctttgaggtcctgtaccacagcgtgaagcaggggcccatctccaccaaggagctggcggacttcatccgggagagggccaccatcgaggagacctactcgaaggcgatggcgaaactctccaagctggccagcaacgggacccccatggggaccttcgccccgctctgggaggtcttccgcgtctcctcggacaagctggcgctgtgccacctggaactgacacggaagttacaggatctcatcaaggacgttctccgctacggcgaggaacagctcaagacccacaagaagtgcaaggaggaagtggtgagcaccttggatgctgtgcaggtactctcgggcgtcagccagctcctgcccaagtcccgcgagaactacctgaaccgttgcatggaccaggagcggctgcggagggagagtaccagccagaaggagatggacaaggcggagactaaaaccaagaaggcggcagagagcctgcggcgctcagtggaaaaatacaactcagcccgagctgactttgagcagaagatgctggactcagccctgcgcttccaagccatggaggagacacacctgaggcacatgaaggcactgctgggctcatatgctcactcggtggaggacacgcacgtgcagattgggcaggtgcatgaggaatttaagcagaacatcgagaacgtcagcgtggagatgctactcaggaagtttgcagagagtaagggcacaggccgggagaagcctggacctctggacttcgaggcatacagtgcggctgccctgcaggaagcgatgaaacgtttgcggggagccaaggcctttcgccttccaggactaagccggcgggagcgggagccagagccacctgcagctgtagatttcctggagcccgattcagggacatgtccagaggtggatgaagaaggtttcactgtccggcctgatgtgacccagaacagcacggccgagccctcccgtttctcgtccagcgactccgacttcgacgatgaagagccccgcaagttctatgtgcacatcaagcctgccccggcccgggctccagcctgcagccccgaggcagcagcggcacagctcagggccaccgcgggcagcctcatccttcctcctggcccagggggcaccatgaaacgccattcttcacgggacgctgctgggaaaccccagagacctcggtctgcccccagaaccagcagctgtgcagagagattgcagtcagaggagcaggtgtccaagaacctctttgggccgcccctggagtcagcctttgaccacgaagattttacaggctctagcagcctgggcttcacctccagcccctcccctttctcctcctcgtcgcccgaaaacgtggaggattccggcctggactctccgtcccacgcggcacctggcccctccccagattcctgggtcccccgcccaggcaccccgcagagcccgcccagctgtagggcgccacccccagaggccaggggtatccgggcaccgcctctgccagactcgccgcagcccctcgcctcgtctccaggcccctgggggctggaggccttggccggaggagacctgatgcctgcacctgctgaccccacagccagggagggcctggcagccccacccaggagacttcgctctaggaaggtgtcctgccctctcacacgtagcaatggggacctgtctcgttccctgagcccctccccactgggctcttcagccgccagcactgccttggaacggcccagcttcttatcccagacaggacacggagtctcccggggtccgagccctgtggtcctgggctcccaggatgccctgcccatagccacagccttcacagagtatgtccacgcctacttccgtggccacagccccagctgcctggctcgagtaactggggagctgaccatgaccttccctgctggcatcgtgcgtgtgttcagcgggaccccaccaccacctgtcctcagcttccggcttgtacacacaaccgctattgagcacttccagcccaacgccgatctgctgttcagtgacccctcccagagtgaccctgagaccaaagacttctggctcaacatggcagctctgaccgaagccctgcagcgccaggcagagcagaaccccactgcctcctactacaacgtggtgctgctgcgataccagttctcccgcccgggtccccagtctgtgcctctgcagctcagtgcccactggcagtgtggagccaccctcacccaggtctcagtggagtacggctaccggcccggtgccacggctgtgcccacaccactcacgaacgtccagatcctgctgcctgtgggggagcctgtgaccaacgtccgcttgcagccggctgccacctggaacctggaggagaagcggctcacttggaggcttccagatgtgtccgaggcaggcggttctggccgcctctctgccagctgggagccgctctcagggcccagcacacccagccccgtggctgcacagttcaccagcgaggggaccactctgtcgggcgtggacttggaactggtgggcagcggttaccgcatgtcgctggtgaagaggaggtttgccacagctgcacccccacagggatgtacctggtgagctgctgaacccgcaaatgctgctgccccagctctacactgcgccctggtgctggctgaccaccccctgccctcctgccggaccctggggcctcccaccccagcctccctgaggcccatactccacggagaggagccccatgcccagcctggctgagcccgagattcgctcctccccctcatgccaaccccacacaggtcccggccttttaatgttctttgaataaacactttattttctaataaaataaaaaaggaaa

SEQ ID NO: 61172 - DNA, 2676 bp, Artificial Sequence
  derived and/or modified sequence
atgtcttattttggagaacacttctggggtgaaaaaaatcacgggttcgaagtattgtatcactcggtgaaacagggtcccatctctacgaaggagttggctgattttattagggagagagctactatcgaggaaacgtactcaaaagctatggctaagcttagtaagttggcgtcaaatggcactcccatggggacctttgcgcctttatgggaggtcttcagggtgagctcggacaagttagccctgtgtcacctagaactgacacgcaagctacaggatctgatcaaggatgttttacggtatggcgaggagcaactgaagacacataaaaagtgtaaggaagaagtggtgtctactctagacgcggttcaggtgttatcgggagtgtctcaactgctcccgaagtccagggaaaactatctaaaccgttgtatggaccaggagcggttgagacgcgaatctacgtcccagaaggaaatggataaggccgaaacaaaaacgaagaaagccgcggagtcactgcggcgctcagtcgagaaatacaactctgcccgtgcggactttgagcagaagatgctggattcagccctgagatttcaggcaatggaagaaactcatttaaggcatatgaaggccctcttggggagctatgctcatagtgtagaggatacgcatgttcagatcgggcaggtccacgaagagttcaaacaaaatatcgaaaatgtgagtgtagagatgctgttaagaaaatttgccgaatccaaaggaacaggtagggaaaagccaggaccattggatttcgaagcgtatagtgcagcggctctgcaggaggccatgaaaaggctcaggggcgccaaggcgttcagattacctggcctcagtcgtagggaacgggaacctgaaccccctgcggcggtggacttcctcgagcccgattccggtacttgtccagaggtggacgaagaaggattcactgttcgtccagacgtgacccagaacagtaccgcagagccgagtagattcagtagtagcgattccgactttgacgatgaggagccccggaagttctacgttcatattaagcccgcccccgcacgagctcctgcttgtagcccggaggcagccgcagcgcagctgagagctacagctggttcgctgattctgccgccaggtcccggaggcacaatgaagcggcactcaagccgggatgctgctggcaaaccgcagaggccgaggtctgcgccgcgcacaagcagttgtgctgagcgtctgcaaagcgaagaacaggtgtccaaaaacctcttcgggcctcctctggaatctgcttttgaccatgaggattttaccggaagcagtagtcttgggtttactagttccccctcccctttctcctcaagctctcctgagaacgtcgaagactctgggctggactccccctcccacgctgctccagggcctagccccgattcgtgggtccccaggcctggaacacctcagtctcccccaagctgtcgggctccccctcccgaagcccggggtattcgagcgccgcctcttccagactcacctcagccattagcctccagtcccggaccctggggcctcgaagctctcgccggaggtgacttgatgcctgcgcctgcggatcccacggcacgggagggcctggccgctccacccaggagactccggtctcgcaaagtgagctgccctctcacacgaagcaatggagacctcagccggagtttgagcccctccccgctcggctctagcgctgcctctaccgccttggaacggccttccttcctaagccagacagggcatggagtgtcgagaggccccagcccagtggtcctgggctcccaggacgctctccccatagccaccgctttcaccgaatatgtacacgcctatttccggggacattctcccagctgtttggccagggtcactggcgagttgaccatgacatttccagcgggaatcgtccgggtcttctcaggtactccccccccccccgtcctgtccttccgtttggttcataccacggccatcgaacactttcagcctaacgccgacctcttgttttccgatccgtctcagagcgacccagaaactaaagacttttggctgaacatggcagcactcaccgaggcgcttcagagacaagcggagcagaatccgactgcctcttactacaatgtcgtccttcttcgctaccagttttcccgaccaggtccacagtcagtgccactgcaactgtcagcgcattggcagtgcggagcaactctgacacaagtgtcagtggagtatggataccgtcctggagccacggctgtgcccacccccttgactaatgtccaaatactcttacctgtaggagagcccgtcaccaacgtccgcctgcagcccgcggccacctggaacctggaggaaaaaagattaacctggcggttgcccgacgtgtctgaagcaggtggatcgggcagactgtcagcgtcttgggaaccacttagtggcccttctactcccagtcccgtggcggcacagttcacgagcgaaggaaccacactctccggagtggatcttgaacttgtcggctctggttaccgcatgagcctggtgaagcgtaggtttgcgacagcagcccctccccagggatgtacgtggtag

SEQ ID NO: 61173 - DNA, 2676 bp, Artificial Sequence
  derived and/or modified sequence
atgagctactttggagagcacttctggggcgagaagaaccacggctttgaggtgctgtaccacagcgtgaagcagggccccatcagcaccaaggagctggccgacttcatccgggagcgggccaccatcgaggagacctacagcaaggccatggccaagctgagcaagctggccagcaatggcacccccatgggcacctttgcccccctgtgggaggtgttccgggtgtccagtgacaagctggccctgtgccacctggagctgaccaggaagctgcaggacctgatcaaggatgtgctgcgctacggggaggagcagctgaagacccacaagaagtgcaaggaggaggtggtgtccaccctggatgctgtgcaggtgctgagcggcgtgtcccagctgctgcccaagagccgggagaactacctgaaccgctgcatggaccaggagcggctgcggcgggagagcaccagccagaaggagatggacaaggccgagaccaagaccaagaaggctgctgagagcctgcggcgctctgtggagaagtacaacagcgcccgggctgactttgagcagaagatgctggacagcgccctgcgcttccaggccatggaggagacccacctgcggcacatgaaggccctgctgggcagctatgcccacagcgtggaggacacccacgtgcagatcggccaggtgcatgaggagttcaagcagaacattgaaaatgtgtctgtggagatgctgctgaggaagtttgctgagagcaagggcaccggccgggagaagccaggccccctggactttgaggcctacagcgctgctgccctgcaggaggccatgaagaggctgcggggggccaaggccttccggctgcccggcctgagccggcgggagcgggagcctgagcccccagctgctgtggacttcctggagccagacagcggcacctgcccagaggtggatgaggagggcttcaccgtgcggccagatgtgacccagaacagcacagctgagcccagccgcttcagcagcagtgacagcgactttgatgatgaggagcccaggaagttctacgtgcacatcaagccagccccagcccgggccccagcctgcagccctgaggccgctgctgcccagctgcgggccacagctggcagcctcatcctgcccccaggccctgggggcaccatgaagaggcacagcagcagagatgctgctgggaagccccagaggcccaggtctgcccccaggaccagcagctgtgccgagcggctgcagagcgaggagcaggtgtccaagaacctgtttggcccccccctggagagcgcctttgaccacgaggacttcaccggcagcagcagcctgggcttcaccagcagccccagccccttcagcagcagcagcccagaaaatgtggaggacagcggcctggacagccccagccatgctgcccctggccccagcccagacagctgggtgccccggcccggcaccccccagagcccccccagctgccgggcccctcctcctgaggcccggggcatccgggccccacccctgcctgacagcccccagcccctggccagcagccctggcccctggggcctggaggccctggccggcggggacctgatgcctgccccagctgaccccacagcccgggagggcctggccgccccaccccggcggctgcggagcaggaaggtgtcctgccccctgaccaggagcaatggagacctgagccgcagcctgagccccagccccctgggcagcagcgctgccagcacagccctggagcggcccagcttcctgagccagacaggccatggagtgtcccggggccccagccctgtggtgctgggcagccaggatgccctgcccatcgccacagccttcacagaatatgtgcacgcctacttccggggccacagccccagctgcctggcccgggtgactggagagctgaccatgaccttccctgctggcatcgtgcgggtcttcagcggcaccccacctcctcctgtgctgtccttccggctggtgcacaccacagccatcgagcacttccagcccaatgctgacctgctcttcagtgaccccagccagagcgaccctgagaccaaggacttctggctgaacatggccgccctgacagaggccctgcagaggcaggccgagcagaaccccacagccagctactacaacgtggtgctgctgcgctaccagttcagccggcccggcccccagagcgtgcccctgcagctgagcgcccactggcagtgtggggccaccctgacccaggtgtctgtggagtatggctacagacctggggccacagctgtgcccacccccctgaccaacgtgcagatcctgctgcctgtgggggagcctgtgaccaacgtgcggctgcagcctgctgccacctggaacctggaggagaagaggctgacctggaggctgcctgatgtgtctgaggccggcggcagcggccgcctgagcgcctcctgggagcccctgagcggccccagcacccccagccctgtggccgcccagttcaccagcgagggcaccaccctgagcggcgtggacctggagctggtgggcagcggctacaggatgagcctggtgaagagaagatttgccacagctgccccaccccagggctgcacctggtag

SEQ ID NO: 61174 - DNA, 2676 bp, Artificial Sequence
  derived and/or modified sequence
atgagctacttcggcgagcacttctggggcgagaagaaccacggctttgaagtcctttatcacagcgtgaagcagggtcctatatcaacaaaagagctagctgattttatcagggaaagagccaccatcgaagagacttattccaaagctatggccaaactgagcaagttagccagcaacgggacccctatggggacattcgcacctctctgggaagtctttcgtgtctcatccgacaagttggccctgtgtcaccttgagctgactcgcaaactgcaggacctgatcaaggacgtcctgaggtacggggaggagcagctcaaaacacacaaaaagtgcaaggaagaagtcgtctcaactttagatgccgtgcaagtgctttcgggagtgtctcagctgttaccaaagagtcgggagaattatctcaacaggtgcatggatcaggagagactgcggcgcgagtccacaagccagaaagaaatggataaggccgaaactaaaaccaagaaggctgcagaatcactgcgtcggtcagtagaaaagtacaactccgctagggcagatttcgagcagaaaatgctggacagcgccctgagatttcaggcaatggaagagacccaccttaggcacatgaaggccctacttgggtcctatgctcattcggtcgaagatacacacgttcagattggccaagtgcacgaggaattcaaacagaacatagaaaacgtgagcgtcgagatgctactccgcaagtttgcagaatccaaaggcactgggcgcgagaaaccaggaccattagattttgaggcttactcagccgccgcccttcaggaggccatgaagcggctcaggggtgccaaggcgtttaggcttccaggactatcacggcgggaacgggagcccgaacctccagcagccgtggattttctggaacccgatagtggcacctgtcccgaggtggatgaggaagggtttactgttcgcccagatgtcacccagaactctacagcagaaccctcccgattcagcagctctgattccgacttcgacgatgaggagccaagaaaattttatgttcatataaaacccgcacctgcacgcgccccagcttgctcccctgaagccgccgccgcgcagctaagagccacggctggaagcctaatcctgcctccaggccctgggggaacaatgaaaagacactcatcgagggacgccgccgggaaacctcaacggcctcgatcagctccccgcacatcaagttgcgcggagagactccagtctgaggagcaagttagtaaaaacctgttcggtccccccctcgagagcgctttcgatcatgaagacttcactggtagtagttctctcggcttcacaagcagtccctctccttttagctcatccagccctgagaatgttgaggatagcggcttggacagccccagccacgccgctccagggccttcccccgattcgtgggtcccacgtcctggcaccccgcaaagtcctccctcttgtagagctcctccccctgaagccaggggtatccgcgcgccacctctgccagactctccccagcctctagctagcagccctggcccttggggactagaggccctagctggtggagaccttatgcccgcccccgccgaccccacagcacgcgagggcctcgctgccccgccccggaggcttagatctaggaaagtgtcatgtcccctgactagaagtaatggggacttaagccgatccctgagtccctcacctctggggtcctccgccgcgtctactgcccttgaacggccgtcattcctgagccagaccggacatggagtcagccgcggcccttcgcctgtcgttcttggaagccaggatgccctgcccattgccacagcatttaccgagtacgtacacgcctacttcaggggacacagtccctcatgcctcgctcgcgtgacaggggaactgacaatgaccttcccagccggcatcgttagggtattcagcggcacaccaccccctcccgtcctctcatttcgtctcgtgcacacaaccgcaattgagcacttccagccaaatgccgacctgcttttctccgatccatcccaatccgacccggagacaaaagatttctggctcaacatggccgcccttaccgaggctttacagaggcaggccgaacagaatccaactgcatcctactataatgtagtcctgcttcgctaccagttctcacggccgggccctcagtccgtgccgttgcagctttctgctcattggcagtgcggggcaacactcactcaggtgtctgttgagtatggatacaggcccggggccaccgccgtacctactccactgaccaacgtgcagatcctgttacccgttggggaacctgtgacgaatgtcagacttcagccagcggccacgtggaatttagaggagaagcgcctgacgtggcggctgcccgacgtcagcgaagcaggtggtagtggaaggttatcggccagctgggagcctctgagtggcccatcaacaccgagccctgtggccgcccagtttacaagcgaaggcacaactctaagtggtgtggatttggagttggttgggagcgggtacagaatgtccctggttaaaaggcgattcgccacagctgctccgccacagggatgtacatggtag

SEQ ID NO: 61175 - DNA, 2676 bp, Artificial Sequence
  derived and/or modified sequence
atgagctattttggagagcatttctggggcgagaaaaatcacggattcgaggtcctctaccactctgtcaagcaggggccaatttcaacgaaggaactggcagacttcatacgtgagcgagctaccatcgaggagacctacagcaaggctatggcaaagctctcgaagctcgcctctaatggcactccgatgggcacgttcgcccctctgtgggaagtgttccgggtcagttccgacaaactggccctgtgtcacctcgaactgaccagaaagctgcaggacctcataaaggatgtgttgaggtacggagaagagcaattgaaaacccataagaaatgcaaagaagaggtcgtctctaccctggatgcggttcaggttctatctggagtgtcgcaacttctaccgaagtccagagagaactaccttaaccgatgtatggatcaagagcggctgaggcgtgagtcaacctcccaaaaagagatggacaaggccgaaacgaagacaaaaaaggccgcagaatcactgcgtcgatcagttgagaagtataactctgctagggctgactttgaacagaagatgcttgacagcgcccttcgattccaggccatggaagagacgcatctccggcacatgaaggccctcctgggaagctacgcacacagcgtggaagatacccacgtgcagattgggcaggtacacgaagagttcaaacagaacattgaaaacgtctctgtggaaatgcttctcagaaaattcgcagagagcaaaggaacagggagggagaagcctggtccccttgatttcgaagcctattctgcggctgccctacaggaggccatgaaacggctacgtggcgctaaagcttttcggctgccaggactttcccggcgtgaacgggagccagagccgccagccgctgtggacttcctcgagcccgattcaggcacgtgtcccgaggttgatgaggagggttttaccgtgagaccagatgtgacacagaatagtactgcggaaccctcaagattcagctcaagtgactctgactttgatgatgaggaacctaggaagttttatgttcatatcaagcccgctcccgctagagctcctgcttgtagcccagaagccgctgctgcccagctccgggctacagccggttctctgatcctccctcccggtccgggaggaaccatgaagcgccattctagtagagacgctgcgggtaaaccgcaaaggcccaggtcagctccccgaaccagtagttgtgcagagagacttcagtcagaagagcaggtgagtaagaacttatttgggcctccactggagtcagcattcgaccatgaagactttaccggttcaagtagtctgggattcacatctagcccctccccctttagctcttccagtccagagaacgttgaagacagtggcctcgattctccgtcccatgctgcacccggaccatcccccgatagttgggtgcctagaccagggacaccacagtcacccccttcatgcagagcacctcctcccgaggcacgaggaatcagggcgcctcccctgcctgattccccgcagccattagcttccagccctgggccatggggactggaggccctggccggaggcgacctgatgcctgcaccagccgaccccaccgcccgtgaggggctggcggctcctccaagaaggctgaggagtcggaaagtgtcttgtccactgactcgaagcaacggcgatctgtctcgctccctgtccccctctccattagggtcctctgccgcatcgacggccttggaacgtccatccttccttagtcaaacgggtcatggagtgtcgcgcggaccatctcccgtcgtgcttggatctcaagatgctctgcccatcgccactgcctttaccgaatacgtacacgcgtacttccggggtcactctccttcctgcttggcaagggtcacaggtgaattgaccatgaccttcccagccggtatcgtgagggttttttctggaaccccccctccccctgtgctgtcatttagactggtgcatacgaccgcgatcgagcactttcaacccaatgcagacctcctttttagtgacccaagccagagtgatcccgagacaaaagatttttggttaaatatggctgcattaaccgaagccttgcagcgtcaagccgaacagaatcctacagcgtcgtactataacgtcgttcttttgcgctatcagttttcccgacctggaccccagagtgttcctctgcagttatccgctcattggcagtgtggggcaacattaacgcaagtttctgttgagtacgggtacagacctggtgccacagccgttcctacccccctgacaaatgtacagatcctgctgcccgtcggcgaacctgttaccaacgtccgcctccaacctgccgcaacttggaatttggaagagaaaagactcacatggcggctcccagacgtgagcgaggctggaggttccggcagactttctgctagttgggaaccgctcagtgggccaagcactccttcccccgtggcggcacaatttacatccgaaggaacaacacttagtggcgtcgacctggagctggtggggagtggatacagaatgtccctggtgaaaagaaggtttgccaccgccgcaccaccccaggggtgtacttggtag

SEQ ID NO: 61176 - DNA, 2676 bp, Artificial Sequence
  derived and/or modified sequence
atgagctacttcggcgagcacttctggggcgagaagaaccacggcttcgaggtgctgtaccacagcgtgaagcagggccccatcagcaccaaggagctggccgacttcatcagagagagagccaccatcgaggagacctacagcaaggccatggccaagctgagcaagctggccagcaacggcacccccatgggcaccttcgcccccctgtgggaggtgttcagagtgagcagcgacaagctggccctgtgccacctggagctgaccagaaagctgcaggacctgatcaaggacgtgctgagatacggcgaggagcagctgaagacccacaagaagtgcaaggaggaggtggtgagcaccctggacgccgtgcaggtgctgagcggcgtgagccagctgctgcccaagagcagagagaactacctgaacagatgcatggaccaggagagactgagaagagagagcaccagccagaaggagatggacaaggccgagaccaagaccaagaaggccgccgagagcctgagaagaagcgtggagaagtacaacagcgccagagccgacttcgagcagaagatgctggacagcgccctgagattccaggccatggaggagacccacctgagacacatgaaggccctgctgggcagctacgcccacagcgtggaggacacccacgtgcagatcggccaggtgcacgaggagttcaagcagaacatcgagaacgtgagcgtggagatgctgctgagaaagttcgccgagagcaagggcaccggcagagagaagcccggccccctggacttcgaggcctacagcgccgccgccctgcaggaggccatgaagagactgagaggcgccaaggccttcagactgcccggcctgagcagaagagagagagagcccgagccccccgccgccgtggacttcctggagcccgacagcggcacctgccccgaggtggacgaggagggcttcaccgtgagacccgacgtgacccagaacagcaccgccgagcccagcagattcagcagcagcgacagcgacttcgacgacgaggagcccagaaagttctacgtgcacatcaagcccgcccccgccagagcccccgcctgcagccccgaggccgccgccgcccagctgagagccaccgccggcagcctgatcctgccccccggccccggcggcaccatgaagagacacagcagcagagacgccgccggcaagccccagagacccagaagcgcccccagaaccagcagctgcgccgagagactgcagagcgaggagcaggtgagcaagaacctgttcggcccccccctggagagcgccttcgaccacgaggacttcaccggcagcagcagcctgggcttcaccagcagccccagccccttcagcagcagcagccccgagaacgtggaggacagcggcctggacagccccagccacgccgcccccggccccagccccgacagctgggtgcccagacccggcaccccccagagcccccccagctgcagagcccccccccccgaggccagaggcatcagagccccccccctgcccgacagcccccagcccctggccagcagccccggcccctggggcctggaggccctggccggcggcgacctgatgcccgcccccgccgaccccaccgccagagagggcctggccgccccccccagaagactgagaagcagaaaggtgagctgccccctgaccagaagcaacggcgacctgagcagaagcctgagccccagccccctgggcagcagcgccgccagcaccgccctggagagacccagcttcctgagccagaccggccacggcgtgagcagaggccccagccccgtggtgctgggcagccaggacgccctgcccatcgccaccgccttcaccgagtacgtgcacgcctacttcagaggccacagccccagctgcctggccagagtgaccggcgagctgaccatgaccttccccgccggcatcgtgagagtgttcagcggcaccccccccccccccgtgctgagcttcagactggtgcacaccaccgccatcgagcacttccagcccaacgccgacctgctgttcagcgaccccagccagagcgaccccgagaccaaggacttctggctgaacatggccgccctgaccgaggccctgcagagacaggccgagcagaaccccaccgccagctactacaacgtggtgctgctgagataccagttcagcagacccggcccccagagcgtgcccctgcagctgagcgcccactggcagtgcggcgccaccctgacccaggtgagcgtggagtacggctacagacccggcgccaccgccgtgcccacccccctgaccaacgtgcagatcctgctgcccgtgggcgagcccgtgaccaacgtgagactgcagcccgccgccacctggaacctggaggagaagagactgacctggagactgcccgacgtgagcgaggccggcggcagcggcagactgagcgccagctgggagcccctgagcggccccagcacccccagccccgtggccgcccagttcaccagcgagggcaccaccctgagcggcgtggacctggagctggtgggcagcggctacagaatgagcctggtgaagagaagattcgccaccgccgcccccccccagggctgcacctggtag

SEQ ID NO: 61177 - protein, 338 aa, Artificial Sequence
  derived and/or modified sequence
MSGSSLPSALALSLLLVSGSLLPGPGAAQNAGFVKSPMSETKLTGDAFELYCDVVGSPTPEIQWWYAEVNRAESFRQLWDGARKRRVTVNTAYGSNGVSVLRITRLTLEDSGTYECRASNDPKRNDLRQNPSITWIRAQATISVLQKPRIVTSEEVIIRDSPVLPVTLQCNLTSSSHTLTYSYWTKNGVELSATRKNASNMEYRINKPRAEDSGEYHCVYHFVSAPKANATIEVKAAPDITGHKRSENKNEGQDATMYCKSVGYPHPDWIWRKKENGMPMDIVNTSGRFFIINKENYTELNIVNLQITEDPGEYEWCGATWPHSGLSWEFWLKLSSLW

SEQ ID NO: 61178 - protein, 394 aa, Artificial Sequence
  derived and/or modified sequence
MSGSSLPSALALSLLLVSGSLLPGPGAAQNAGFVKSPMSETKLTGDAFELYCDVVGSPTPEIQWWYAEVNRAESFRQLWDGARKRRVTVNTAYGSNGVSVLRITRLTLEDSGTYECRASNDPKRNDLRQNPSITWIRAQATISVLQKPRIVTSEEVIIRDSPVLPVTLQCNLTSSSHTLTYSYWTKNGVELSATRKNASNMEYRINKPRAEDSGEYHCVYHFVSAPKANATIEVKAAPDITGHKRSENKNEGQDATMYCKSVGYPHPDWIWRKKENGMPMDIVNTSGRFFIINKENYTELNIVNLQITEDPGEYECNATNAIGSASVVTVLRVRSHLAPLWPFLGILAEIIILVVIIVVYEKRKRPDEVPDVPPRKTNSTNNHKDKNLRQRNTN

SEQ ID NO: 61179 - DNA, 1185 bp, Artificial Sequence
  derived and/or modified sequence
atgagcgggagcagtctgccaagcgctcttgcactgagcctactgctcgtgtctgggagtttgctacctggccccggtgctgcacaaaacgccggctttgtgaaatcccccatgtccgagacgaagttgaccggcgacgcgtttgagctttactgtgacgtcgttgggagcccaactcctgagattcaatggtggtacgccgaggtcaatcgagccgaaagctttagacaactctgggacggggcacgaaaaaggagggtgaccgttaacaccgcctatggcagcaacggggtaagcgtgctgcgcatcacgagactaacgttggaagactcaggcacctatgaatgcagagcaagcaatgatccaaagagaaatgatttgaggcaaaatccttcaattacctggatcagggcgcaagctactatttctgtgttacagaagccacgcatcgtgacttcagaagaggtcattatcagggactctccagtattacctgtgacattgcagtgcaacctcacttccagctcacacaccctgacatattcttactggacgaaaaatggggtcgagttgtctgcaacacgcaaaaatgcttccaacatggaatacagaatcaataagcccagagccgaagacagtggagaataccactgcgtctaccactttgtgtcagcacccaaagctaatgccacaatagaggtcaaggctgcacctgatatcacgggacataagaggagcgagaataagaatgaaggtcaggatgcaactatgtattgtaagagcgtagggtatccccaccccgattggatctggagaaagaaggaaaacggtatgcctatggacatagttaacacctcaggtaggttttttatcatcaataaagagaactataccgagctgaacattgtgaatctgcagatcacagaggaccctggcgagtatgaatgtaatgctacaaatgctatcggaagtgcctctgtcgtgacagttctgcgtgttcggagccatctcgcaccgctttggccgttcctgggcatcttggcagagatcattatcctggtggtcattatcgtggtttacgaaaagagaaaacgcccagacgaggtaccggatgttcctccgagaaagacaaactctaccaataatcacaaggacaaaaacttgaggcaaagaaatacaaactag

SEQ ID NO: 61180 - DNA, 1185 bp, Artificial Sequence
  derived and/or modified sequence
atgagcggcagcagcctgcccagcgccctggccctgagcctgctgctggtgtctggcagcctgctgcccggccctggagctgcccagaatgccggctttgtgaagagccccatgtctgagaccaagctgactggagatgcctttgagctgtactgtgatgtggtgggcagccccaccccagagatccagtggtggtatgcagaggtgaacagagctgagagcttccggcagctgtgggatggagccaggaagagaagagtgacagtgaacacagcctacggcagcaatggagtgtctgtgctgcgcatcacccggctgaccctggaggacagcggcacctatgaatgtcgggccagcaatgaccccaagagaaatgacctgcggcagaaccccagcatcacctggatccgggcccaggccaccatctctgtgctgcagaagccccgcatcgtgaccagcgaggaggtgatcatccgggacagccctgtgctgcctgtgaccctgcagtgcaacctgaccagcagcagccacaccctgacctacagctactggaccaagaatggagtggagctgagcgccaccaggaagaatgccagcaacatggagtaccgcatcaacaagcccagggcagaagattctggagagtaccactgtgtgtaccactttgtgtctgcccccaaggccaatgccaccatcgaggtgaaggccgccccagacatcaccggccacaagagaagtgagaacaagaatgaaggccaggatgccaccatgtactgcaagtctgtgggctacccccacccagactggatctggaggaagaaggaaaatggcatgcccatggacatcgtgaacaccagcggccgcttcttcatcatcaacaaggagaactacacagagctgaacatcgtgaacctgcagatcacagaagatcctggagaatatgaatgtaatgccaccaatgccatcggcagcgcctctgtggtgacagtgctgcgggtgcgcagccacctggcccccctgtggcccttcctgggcatcctggccgagatcatcatcctggtggtgatcatcgtggtgtatgagaagaggaagaggccagatgaggtgcctgatgtgccccccaggaagaccaacagcaccaacaaccacaaggacaagaacctgcggcagaggaacaccaactag

SEQ ID NO: 61181 - DNA, 1185 bp, Artificial Sequence
  derived and/or modified sequence
atgagcggcagcagcctgcccagcgccctggccctgagcctgctgctcgtaagtggctccttgttacctgggcctggagccgcacaaaacgcaggctttgtgaaaagcccaatgagcgagacgaaactgacaggagacgcattcgaactgtattgcgatgtcgtagggtcgcccacccccgaaatccagtggtggtacgcagaggtcaatagagccgagtctttccgccagctttgggacggcgcccgcaaaagaagggttacagtaaacacggcgtatggaagcaatggagtttcggttctgcgcattacgcggttgaccctcgaagatagcggtacttacgagtgccgggcatccaatgacccaaagagaaacgacctcagacagaacccaagcattacatggatccgcgctcaggcaaccatcagcgtgctgcaaaagccgcgcatagtcacttcggaagaagtgatcatacgggactctccagtgctcccggttacgttacagtgcaatctcactagttctagtcatactctgacttattcgtactggacaaaaaatggtgtggagctgtccgctacccggaaaaacgcctccaacatggaatatagaatcaacaaaccacgggcggaggactcaggggaatatcactgcgtatatcacttcgtttccgctccaaaggccaacgctactatcgaggtcaaggcggcgcctgacattaccggacataagcgatctgaaaataaaaatgagggacaagacgctactatgtactgcaaaagcgtaggatacccccatcccgactggatctggcgaaagaaagagaacgggatgcccatggacattgttaacaccagcggtcgtttcttcatcatcaataaagagaattatacggagctgaatattgtcaatctccaaattactgaagaccctggagagtacgaatgcaatgcgaccaacgccatcggatccgcaagtgttgtaacggtgctgcgtgtgcgcagccatctggctccactgtggcctttcctgggtatcttggcggagattattatcctggtggtgatcatcgttgtatacgagaagagaaagcggcctgacgaggtccctgacgtgccccctcggaagactaacagcaccaacaatcacaaggacaaaaatcttcggcagagaaatacgaactag

SEQ ID NO: 61182 - DNA, 1373 bp, Artificial Sequence
  derived and/or modified sequence
agcgaaggtctcgcgaggcctgggcgctgcggcggcaggaggaggacggggaaggacggagccgagccgcggctgcctccctcgctcactccctcgcgcactcgcccgccccctccctccctcccctcccttccccggccccggctctggccccggcccattcgctgttgggtcttctgctagggaggatgtcgggttcgtcgctgcccagcgccctggccctctcgctgttgctggtctctggctccctcctcccagggccaggcgccgctcagaacgctgggtttgtcaagtcgcccatgtcagaaactaagctcacgggggacgcctttgagctgtactgtgacgtggtcgggagccccacgccagagatccagtggtggtacgcagaagtcaaccgggcagagtctttcagacagctgtgggacggtgctcggaagcgccgtgtcaccgtaaacaccgcctacgggtcaaacggcgtgagtgtgctgagaataacccggctcaccttggaggactctgggacttacgagtgcagggccagcaacgaccccaagaggaatgacttgaggcaaaacccctccataacatggattcgagcccaggccaccataagcgtccttcagaagccaaggattgtcaccagtgaagaggtcattattcgagacagccctgttctccctgtcaccctgcagtgtaacctcacctccagctctcacacccttacatacagctactggacaaagaatggggtggaactgagtgccactcgtaagaatgccagcaacatggagtacaggatcaataagccgagagctgaggattcaggcgaataccactgcgtatatcactttgtcagcgctcctaaagcaaacgccaccattgaagtgaaagccgctcctgacatcactggccataaacggagtgagaacaagaatgaagggcaggatgccactatgtattgcaagtcagttggctacccccacccagactggatatggcgcaagaaggagaacgggatgcccatggacattgtcaatacctctggccgcttcttcatcatcaacaaggaaaattacactgagttgaacattgtgaacctgcagatcacggaagaccctggcgagtatgaatgtaatgccaccaacgccattggctccgcctctgttgtcactgtcctcagggtgcggagccacctggccccactctggcctttcttgggaattctggctgaaattatcatccttgtggtgatcattgttgtgtatgagaagaggaagaggccagatgaggttcctgacgttccaccgaggaaaaccaactctaccaacaatcacaaagataaaaacttgcgccagagaaacacaaattaa

SEQ ID NO: 61183 - DNA, 1185 bp, Artificial Sequence
  derived and/or modified sequence
atgagtggtagtagcttaccttctgctctcgcactgtcactgcttctcgtgagtggaagtctgctgcctggcccaggagctgcacaaaacgctggcttcgtgaaaagtccgatgtcagagacaaaacttacaggtgatgcttttgagttatattgcgacgtggtgggatcacccaccccggaaatacagtggtggtacgccgaggtgaacagagccgagagcttcaggcaactgtgggatggtgcaagaaaacgccgagtgaccgtaaacacggcctacggctcaaacggggtgtctgtgcttagaataactcggttaacactggaggattctgggacatatgagtgtcgagccagtaacgatcctaagcgaaacgacctacgccaaaatcctagcataacatggatccgtgcccaggcaaccatttctgtgctgcagaagccacgcatcgttacctcagaggaggtgataatacgggactccccagtcctgccggtgacactacagtgcaatctaactagcagcagccatacgttaacctacagctactggaccaagaatggcgtggagctgagtgccacaagaaagaatgcgtccaatatggaataccggataaacaaaccacgcgctgaggacagcggcgagtatcactgtgtgtaccattttgtcagtgcacccaaggcgaacgcaacaatcgaggtgaaagcggcacccgacattactgggcataagcggagtgagaataagaacgaaggacaggatgccaccatgtattgcaaaagtgtgggctatccgcatccagactggatttggagaaaaaaggagaatgggatgccaatggatatagtgaatacaagcggtcggtttttcattataaacaaggagaactacacagaattgaatatcgtgaatctgcagataactgaggacccaggcgaatatgaatgtaatgccacaaacgctattggctctgcctcagtcgtgacagtgctaagggtgaggagccatctcgcgccactgtggccctttctgggcatattggccgagatcattatactggtggtaatcatcgtggtgtacgaaaaacgcaagcgaccggatgaggtccctgatgtgccgcctagaaaaacaaactccacaaataaccacaaggacaaaaacttgagacagcggaatactaattag

SEQ ID NO: 61184 - DNA, 1185 bp, Artificial Sequence
  derived and/or modified sequence
atgagcggcagcagcctgcccagcgccctggccctgagcctgctgctggtgagcggcagcctgctgcccggccccggcgccgcccagaacgccggcttcgtgaagagccccatgagcgagaccaagctgaccggcgacgccttcgagctgtactgcgacgtggtgggcagccccacccccgagatccagtggtggtacgccgaggtgaacagagccgagagcttcagacagctgtgggacggcgccagaaagagaagagtgaccgtgaacaccgcctacggcagcaacggcgtgagcgtgctgagaatcaccagactgaccctggaggacagcggcacctacgagtgcagagccagcaacgaccccaagagaaacgacctgagacagaaccccagcatcacctggatcagagcccaggccaccatcagcgtgctgcagaagcccagaatcgtgaccagcgaggaggtgatcatcagagacagccccgtgctgcccgtgaccctgcagtgcaacctgaccagcagcagccacaccctgacctacagctactggaccaagaacggcgtggagctgagcgccaccagaaagaacgccagcaacatggagtacagaatcaacaagcccagagccgaggacagcggcgagtaccactgcgtgtaccacttcgtgagcgcccccaaggccaacgccaccatcgaggtgaaggccgcccccgacatcaccggccacaagagaagcgagaacaagaacgagggccaggacgccaccatgtactgcaagagcgtgggctacccccaccccgactggatctggagaaagaaggagaacggcatgcccatggacatcgtgaacaccagcggcagattcttcatcatcaacaaggagaactacaccgagctgaacatcgtgaacctgcagatcaccgaggaccccggcgagtacgagtgcaacgccaccaacgccatcggcagcgccagcgtggtgaccgtgctgagagtgagaagccacctggcccccctgtggcccttcctgggcatcctggccgagatcatcatcctggtggtgatcatcgtggtgtacgagaagagaaagagacccgacgaggtgcccgacgtgccccccagaaagaccaacagcaccaacaaccacaaggacaagaacctgagacagagaaacaccaactag

SEQ ID NO: 61185 - protein, 341 aa, Artificial Sequence
  derived and/or modified sequence
MTGSNMSDALANAVCQRCQARFSPAERIVNSNGELYHEHCFVCAQCFRPFPEGLFYEFEGRKYCEHDFQMLFAPCCGSCGEFIIGRVIKAMNNNWHPGCFRCELCDVELADLGFVKNAGRHLCRPCHNREKAKGLGKYICQRCHLVIDEQPLMFRSDAYHPDHFNCTHCGKELTAEARELKGELYCLPCHDKMGVPICGACRRPIEGRVVNALGKQWHVEHFVCAKCEKPFLGHRHYEKKGLAYCETHYNQLFGDVCYNCSHVIEGDVVSALNKAWCVSCFSCSTCNSKLTLKNKFVEFDMKPVCKRCYEKFPLELKKRLKKLSELTSRKAQPKATDLNSA

SEQ ID NO: 61186 - DNA, 1026 bp, Artificial Sequence
  derived and/or modified sequence
atgaccggcagcaacatgagcgacgccctggccaacgccgtgtgccagagatgccaggccagattcagccccgccgagagaatcgtgaacagcaacggcgagctgtaccacgagcactgcttcgtgtgcgcccagtgcttcagacccttccccgagggcctgttctacgagttcgagggcagaaagtactgcgagcacgacttccagatgctgttcgccccctgctgcggcagctgcggcgagttcatcatcggcagagtgatcaaggccatgaacaacaactggcaccccggctgcttcagatgcgagctgtgcgacgtggagctggccgacctgggcttcgtgaagaacgccggcagacacctgtgcagaccctgccacaacagagagaaggccaagggcctgggcaagtacatctgccagagatgccacctggtgatcgacgagcagcccctgatgttcagaagcgacgcctaccaccccgaccacttcaactgcacccactgcggcaaggagctgaccgccgaggccagagagctgaagggcgagctgtactgcctgccctgccacgacaagatgggcgtgcccatctgcggcgcctgcagaagacccatcgagggcagagtggtgaacgccctgggcaagcagtggcacgtggagcacttcgtgtgcgccaagtgcgagaagcccttcctgggccacagacactacgagaagaagggcctggcctactgcgagacccactacaaccagctgttcggcgacgtgtgctacaactgcagccacgtgatcgagggcgacgtggtgagcgccctgaacaaggcctggtgcgtgagctgcttcagctgcagcacctgcaacagcaagctgaccctgaagaacaagttcgtggagttcgacatgaagcccgtgtgcaagagatgctacgagaagttccccctggagctgaagaagagactgaagaagctgagcgagctgaccagcagaaaggcccagcccaaggccaccgacctgaacagcgcctag

SEQ ID NO: 61187 - DNA, 1026 bp, Artificial Sequence
  derived and/or modified sequence
atgaccgggtccaatatgtcagacgccctcgccaacgccgtttgtcaacgctgccaggcacggttctcccccgcagagagaatcgtgaacagcaatggagagctgtatcacgagcactgctttgtatgtgcccagtgctttcggccgttccctgaagggttgttctatgaattcgaaggccgcaagtattgcgaacacgattttcaaatgctttttgcaccgtgctgcggcagctgcggcgagttcatcatcggtcgagtaatcaaggccatgaacaacaactggcacccgggttgtttcaggtgcgaactgtgtgatgtggagctggccgatcttggattcgttaagaacgctgggagacatctctgtcgtccgtgtcacaacagagaaaaggcaaagggcctgggcaagtacatctgccagaggtgccatctcgtgattgacgagcaacccctgatgtttcgctcagatgcataccatcctgatcacttcaactgcacgcactgtggaaaggagctcactgctgaagcacgggagttgaagggagagctgtactgcctgccctgccacgataaaatgggagtgcctatctgtggggcctgtcgccggcccatcgaggggcgggtcgtcaacgctctgggtaagcaatggcatgtagagcacttcgtgtgcgctaaatgcgagaaaccttttctgggacacagacattacgaaaaaaagggtttggcctactgtgagactcactacaaccagctgttcggagacgtgtgctacaattgttcgcatgttatcgaaggggatgtggtctctgctttgaataaggcttggtgtgtctcctgcttttcctgttcaacgtgcaacagcaaactgacgctgaaaaacaagtttgtggaattcgatatgaagcctgtttgcaaacgctgctacgagaagttccctctcgaactgaaaaaacgcctaaagaagctttccgagctgacatctagaaaagctcagcccaaagcgacggatctgaactcagcttag

SEQ ID NO: 61188 - DNA, 2049 bp, Artificial Sequence
  derived and/or modified sequence
gccacccccgcccacccctctcgcgggcggagcggctcttggccttttttgggcgtctccctgctccgcggcccgggctggcgggcgggcgctcggctggcggctgcagcagcagagggagacccgcggcaaccccggcaacccagggctcggcgtcgctgccaccatgacgggaagcaatatgtcggacgccttggccaacgccgtgtgccagcgctgccaggcccgcttctcccccgccgagcgcattgtcaacagcaatggggagctgtaccatgagcactgcttcgtgtgtgcccagtgcttccggcccttccccgaggggctcttctatgagtttgaaggccggaagtactgcgaacacgacttccaaatgctgtttgctccgtgctgtggatcctgcggtgagttcatcattggccgcgtcatcaaggccatgaacaacaactggcacccgggctgcttccgctgcgagctgtgtgatgtggagctggctgacctgggctttgtgaagaatgccggcaggcatctctgccggccttgccacaaccgtgagaaggccaagggcctgggcaagtacatctgccagcggtgccacctggtcatcgacgagcagcccctcatgttcaggagcgacgcctaccaccctgaccacttcaactgcacccactgtgggaaggagctgacagccgaggcccgcgagctgaagggtgagctctactgcctgccctgccatgacaagatgggcgtccccatctgcggggcctgccgccggcccatcgagggccgagtggtcaacgcgctgggcaagcagtggcacgtggagcactttgtctgtgccaagtgtgagaagccattcctggggcaccggcactatgagaagaagggcctggcctactgcgagactcactacaaccagctcttcggggacgtctgctacaactgcagccatgtgattgaaggcgatgtggtgtcggccctcaacaaggcctggtgtgtgagctgcttctcctgctccacctgcaacagcaagctcaccctgaagaacaagtttgtggagttcgacatgaagcccgtgtgtaagaggtgctacgagaagttcccgctggagctgaagaagcggctgaagaagctgtcggagctgacctcccgcaaggcccagcccaaggccacagacctcaactctgcctgaaggccctcttgcgcagctgcctctcggcccctccgccttctcccctcctgctgtccatgcttggccccctcgtccccatccacctgtgccctccgcatcttaccctccctttctctttcctcattgccttctcccttcctgttccctcatctctgccttccccatgtctctcctctccttggccgtggcttctgtctgtgaggaggcaggagctggggagtgggagcctatgaccccacgtctgacagccatgtccacctgtgcccacagcttccgcccacagacctccagggacaggagcaaattgcaccacagctccccgcctggcctggccctccccaggcggctcagtggctcatgctgtcctgtgagagcccctgccccagagcggccccactaagcgcatgtggctcctgggctacccacagccagggcagcctgctggagccacagggccagggccatgcagatggaggcctctgggagccacctccaatccctcaccactcactcaaccagtggcacagtgtccttgtgcccacactgagccagcaagtcctgctgtccacacccacaagctacctggagggacaggacccacctccatccttcggaaggccttcctggaatcccaccttggcctccgccctcggttccgccccgcccctctccccccgaccttggggcttgtgtcgagcccttgggtggggccaggaggaggtgatggcgtcagaggaggtgtggtcagaggtgacttgttcccacctccagggaggacgcttcgtcttcggccagcgcagacctggtgtttgtttgttgggctcacgcttgcacaatgaaggcttgttcacacaacc

SEQ ID NO: 61189 - DNA, 2045 bp, Artificial Sequence
  derived and/or modified sequence
gccacccccgcccacccctctcgcgggcggagcggctcttggccttttttgggcgtctccctgctccgcggcccgggctggcgggcgggcgctcggctggcggctgcagcagcagagggagacccgcggcaaccccggcaacccagggctcggcgtcgctgccaccatgacgggaagcaatatgtcggacgccttggccaacgccgtgtgccagcgctgccaggcccgcttctcccccgccgagcgcattgtcaacagcaatggggagctgtaccatgagcactgcttcgtgtgtgcccagtgcttccggcccttccccgaggggctcttctatgagtttgaaggccggaagtactgcgaacacgacttccaaatgctgtttgctccgtgctgtggatcctgcggtgagttcatcattggccgcgtcatcaaggccatgaacaacaactggcacccgggctgcttccgctgcgagctgtgtgatgtggagctggctgacctgggctttgtgaagaatgccggcaggcatctctgccggccttgccacaaccgtgagaaggccaagggcctgggcaagtacatctgccagcggtgccacctggtcatcgacgagcagcccctcatgttcaggagcgacgcctaccaccctgaccacttcaactgcacccactgtgggaaggagctgacagccgaggcccgcgagctgaagggtgagctctactgcctgccctgccatgacaagatgggcgtccccatctgcggggcctgccgccggcccatcgagggccgagtggtcaacgcgctgggcaagcagtggcacgtggagcactttgtctgtgccaagtgtgagaagccattcctggggcaccggcactatgagaagaagggcctggcctactgcgagactcactacaaccagctcttcggggacgtctgctacaactgcagccatgtgattgaaggcgatgtggtgtcggccctcaacaaggcctggtgtgtgagctgcttctcctgctccacctgcaacagcaagctcaccctgaagaacaagtttgtggagttcgacatgaagcccgtgtgtaagaggtgctacgagaagttcccgctggagctgaagaagcggctgaagaagctgtcggagctgacctcccgcaaggcccagcccaaggccacagacctcaactctgcctgaaggccctcttgcgcagctgcctctcggcccctccgccttctcccctcctgctgtccatgcttggccccctcgtccccatccacctgtgccctccgcatcttaccctccctttctctttcctcattgccttctcccttcctgttccctcatctctgccttccccatgtctctcctctccttggccgtggcttctgtctgtgaggaggcaggagctggggagtgggagcctatgaccccacgtctgacagccatgtccacctgtgcccacagcttccgcccacagacctccagggacaggagcaaattgcaccacagctccccgcctggcctggccctccccaggcggctcagtggctcatgctgtcctgtgagagcccctgccccagagcggccccactaagcgcatgtggctcctgggctacccacagccagggcagcctgctggagccacagggccagggccatgcagatggaggcctctgggagccacctccaatccctcaccactcactcaaccagtggcacagtgtccttgtgcccacactgagccagcaagtcctgctgtccacacccacaagctacctggagggacaggacccacctccatccttcggaaggccttcctggaatcccaccttggcctccgccctcggttccgccccgcccctctccccccgaccttggggcttgtgtcgagcccttgggtggggccaggaggaggtgatggcgtcagaggaggtgtggtcagaggtgacttgttcccacctccagggaggacgcttcgtcttcggccagcgcagacctggtgtttgtttgttgggctcacgcttgcacaatgaaggcttgttcacac

SEQ ID NO: 61190 - DNA, 1026 bp, Artificial Sequence
  derived and/or modified sequence
atgacaggcagcaacatgtctgatgccctggccaatgctgtgtgccagcgctgccaggcccgcttcagccctgctgagcgcatcgtgaacagcaatggagagctgtaccacgagcactgctttgtgtgtgcccagtgcttccggcccttccctgagggcctcttctatgaatttgagggcaggaagtactgtgaacatgacttccagatgctgtttgccccctgctgcggcagctgtggggagttcatcatcggccgggtcatcaaggccatgaacaacaactggcaccctggctgcttccgctgtgagctgtgtgatgtggagctggccgacctgggctttgtgaagaatgccggccgccacctgtgccggccctgccacaaccgggagaaggccaagggcctgggcaagtacatctgccagcgctgccacctggtgattgatgagcagcccctgatgttcagaagtgatgcctaccacccagaccacttcaactgcacccactgcggcaaggagctgacagctgaggcccgggagctgaagggggagctgtactgcctgccctgccacgacaagatgggcgtgcccatctgtggggcctgccggcggcccatcgagggccgggtggtgaatgccctgggcaagcagtggcacgtggagcactttgtgtgtgccaagtgtgagaagcccttcctgggccaccgccactatgagaagaagggcctggcctactgtgagacccactacaaccagctgtttggagatgtgtgctacaactgcagccacgtgattgaaggagatgtggtgtctgccctgaacaaggcctggtgtgtgtcctgcttcagctgcagcacctgcaacagcaagctgaccctgaagaacaagtttgtggagtttgacatgaagcctgtgtgcaagcgctgctatgagaagttccccctggagctgaagaagaggctgaagaagctgtctgagctgaccagcaggaaggcccagcccaaggccacagacctgaacagcgcctag

SEQ ID NO: 61191 - DNA, 1026 bp, Artificial Sequence
  derived and/or modified sequence
atgaccggcagcaacatgagcgacgccctggccaacgccgtgtgccagcgttgtcaggcaagattctcccccgccgaaaggattgtaaacagcaatggcgagctgtaccatgagcattgctttgtgtgcgcccagtgttttagacctttcccagaaggcctattctacgaattcgaggggagaaaatactgtgagcacgactttcagatgctgtttgccccatgttgcggatcctgtggagagtttataatcgggagagttatcaaggccatgaataacaactggcaccctgggtgcttcagatgcgagctgtgcgacgtggaactggctgatctcgggtttgtaaagaatgcggggagacacctgtgccgtccatgtcacaatcgcgagaaggcaaagggcttgggcaagtatatttgccagcgctgtcacctggtgatagatgagcagccccttatgttccgctctgatgcataccaccctgaccatttcaactgcacccactgcggcaaggagttgaccgccgaagctagagaattaaaaggcgagctttactgcctcccatgccatgataaaatgggcgttccgatatgtggagcttgtcgacggcctatcgaagggagagtggttaacgccctgggcaagcagtggcatgtagagcatttcgtgtgtgcaaagtgcgagaagccttttttgggtcaccgccactacgagaaaaaaggtcttgcttactgtgagacccattacaatcaattgttcggagatgtgtgttataattgttctcacgtaattgagggcgatgtcgtttctgccctcaataaggcctggtgcgtcagttgtttttcgtgtagtacttgtaatagcaagctgacactgaagaataagttcgtcgaatttgacatgaagcccgtctgtaaacgctgctacgagaagtttcctttggagctgaagaaaagactaaagaagctgtccgagttgacctctcgtaaagcgcagcctaaagcaaccgacctgaattcagcgtag

SEQ ID NO: 61192 - DNA, 1026 bp, Artificial Sequence
  derived and/or modified sequence
atgaccggtagcaatatgtcagatgcacttgccaacgccgtttgtcagaggtgccaggcgcgattcagtccagcagagaggattgtgaatagcaatggcgagctgtaccatgagcactgctttgtgtgcgcccagtgctttcgccctttccccgagggtctgttttacgagttcgagggacgcaaatactgcgaacatgatttccagatgctgtttgcaccatgttgcgggagctgcggagagtttatcattggacgtgtgatcaaagctatgaacaacaactggcatccgggatgtttccgctgtgagctgtgcgacgtagaattagccgatttgggattcgtaaagaacgccggtcgtcatctctgtcggccatgtcataaccgggaaaaggccaaaggtctcgggaaatatatctgtcagaggtgtcatctagttattgatgagcaacccttgatgtttagaagtgatgcctatcatcccgaccactttaattgcactcactgcggtaaagagttaacagccgaggccagagaactcaaaggcgagctatactgcctgccttgtcatgacaagatgggggtcccaatctgcggcgcttgccgacgacctattgaaggacgtgtggttaacgcattggggaaacagtggcacgttgaacattttgtgtgcgcaaagtgcgagaagccgttcctagggcacaggcattatgaaaaaaagggattggcatactgtgaaacgcactataatcagttgtttggcgacgtgtgctacaattgttcgcacgtgatcgagggtgatgttgtttcagcactcaacaaggcatggtgtgtttcgtgtttttcttgttcaacctgtaattccaaactgacactgaaaaacaagtttgtggagttcgatatgaagccagtgtgtaagcggtgttacgagaaattccctctcgaactgaaaaagaggttgaagaagctctctgagcttacctctagaaaagctcagccaaaggctaccgacctgaatagcgcctag

SEQ ID NO: 61193 - DNA, 1011 bp, Artificial Sequence
  derived and/or modified sequence
atgagcgacgccctggccaacgccgtgtgccagagatgccaggccagattcagccccgccgagagaatcgtgaacagcaacggcgagctgtaccacgagcactgcttcgtgtgcgcccagtgcttcagacccttccccgagggcctgttctacgagttcgagggcagaaagtactgcgagcacgacttccagatgctgttcgccccctgctgcggcagctgcggcgagttcatcatcggcagagtgatcaaggccatgaacaacaactggcaccccggctgcttcagatgcgagctgtgcgacgtggagctggccgacctgggcttcgtgaagaacgccggcagacacctgtgcagaccctgccacaacagagagaaggccaagggcctgggcaagtacatctgccagagatgccacctggtgatcgacgagcagcccctgatgttcagaagcgacgcctaccaccccgaccacttcaactgcacccactgcggcaaggagctgaccgccgaggccagagagctgaagggcgagctgtactgcctgccctgccacgacaagatgggcgtgcccatctgcggcgcctgcagaagacccatcgagggcagagtggtgaacgccctgggcaagcagtggcacgtggagcacttcgtgtgcgccaagtgcgagaagcccttcctgggccacagacactacgagaagaagggcctggcctactgcgagacccactacaaccagctgttcggcgacgtgtgctacaactgcagccacgtgatcgagggcgacgtggtgagcgccctgaacaaggcctggtgcgtgagctgcttcagctgcagcacctgcaacagcaagctgaccctgaagaacaagttcgtggagttcgacatgaagcccgtgtgcaagagatgctacgagaagttccccctggagctgaagaagagactgaagaagctgagcgagctgaccagcagaaaggcccagcccaaggccaccgacctgaacagcgcctag

SEQ ID NO: 61194 - DNA, 1011 bp, Artificial Sequence
  derived and/or modified sequence
atgtctgacgcactggccaacgcggtctgccagcggtgccaggctcgcttttcccccgctgagcgaatcgttaattctaatggagagctttatcacgaacattgtttcgtctgcgctcagtgtttccgcccattcccagaaggtctcttttacgaattcgaagggcgaaagtattgtgaacatgacttccagatgctcttcgctccatgctgcggaagctgtggagagtttattatcggtcgagtgatcaaggctatgaacaataattggcaccccggctgctttcgctgcgaactgtgtgacgtggaactcgctgacctaggttttgtgaagaacgctggcaggcatctttgtagaccatgtcacaaccgcgagaaggccaaagggttgggcaagtatatctgccaaaggtgtcatttagtgatcgatgagcagcctcttatgtttagatcggatgcataccacccagatcactttaactgtacacactgcggcaaggagcttactgctgaggccagggagttaaagggggagctgtattgtttgccatgccatgataagatgggcgtgccaatctgcggagcctgtcggcgccctatcgagggccgtgtggtgaacgccctggggaagcagtggcacgtagagcattttgtgtgcgctaagtgtgagaagccattcctcgggcataggcattacgagaaaaagggactggcttactgcgagacccattacaatcagctgtttggcgatgtctgttataattgttcccatgtgattgagggggatgtagtgagtgccttgaacaaagcttggtgtgtgtcttgctttagttgctctacctgcaactctaaattaaccctcaaaaataagttcgtggaatttgatatgaagcccgtttgtaaacgctgctacgagaagttcccccttgaactgaagaagaggttgaaaaagctgagtgagctgacatctcgcaaagcacagcctaaagctactgacctcaacagcgcctag

SEQ ID NO: 61195 - DNA, 1011 bp, Artificial Sequence
  derived and/or modified sequence
atgtccgatgcactggccaacgcagtgtgtcagaggtgccaggcccgattttcccccgccgagcgtatcgtcaacagcaatggggaactttaccacgaacattgtttcgtctgcgcccagtgtttcagaccattccctgagggactgttttatgagttcgaaggcagaaagtactgtgagcatgattttcagatgttattcgctccatgctgtggttcgtgtggagagttcatcataggcagagtgatcaaagccatgaacaacaactggcaccccggatgtttccgttgtgagctctgcgacgtagaacttgcagatctcggctttgtgaaaaacgccggccgacacctatgtaggccatgtcacaatcgtgagaaggcaaaaggcctgggcaaatatatctgccagcgctgccacctggtgatagacgagcagcccttaatgttccgtagcgacgcctaccatcccgaccacttcaactgcacccactgtggaaaggaactgaccgcagaggccagggagctcaaaggcgagttgtactgtctgccatgccatgataagatgggggtaccaatatgcggagcatgcaggcgaccaatcgaggggagagtcgttaacgcccttgggaagcagtggcacgtagagcacttcgtgtgtgcgaaatgcgaaaagcctttcctgggccatcgacattatgagaagaaaggtttagcttattgcgaaacacattacaatcagctgttcggagacgtatgttacaactgtagccatgttatcgaaggagacgttgtgtccgcattgaataaagcctggtgcgttagttgcttctcttgctcaacttgcaacagcaagttaactctaaagaacaagttcgtggagtttgatatgaagcccgtatgtaaacgatgttacgagaagtttccccttgagctcaaaaagcggctgaagaagctgtccgaactcactagtcgaaaggcccaacccaaagcaacagacttaaacagtgcctag

SEQ ID NO: 61196 - DNA, 1011 bp, Artificial Sequence
  derived and/or modified sequence
atgagtgacgcgctcgctaatgccgtttgtcaaagatgtcaggctcgtttctctcctgccgagaggatcgtcaatagcaatggggaattatatcacgagcattgtttcgtgtgtgctcaatgtttccgtccctttcccgaagggctgttttacgaatttgagggccggaagtattgcgagcatgattttcagatgctcttcgccccctgctgcggctcctgtggtgaatttatcatcggcagagttatcaaggccatgaacaataattggcatcctggctgcttcaggtgcgaactgtgtgacgtggaactggccgacctaggattcgtcaaaaacgccggccgccacctttgcagaccatgtcacaatcgagaaaaagccaagggcctggggaaatacatctgccagaggtgtcatctagtaattgatgagcagcctctcatgttccgatcagatgcttaccatccagaccactttaattgcactcattgcggaaaagagttgacagcggaagccagagaactgaaaggtgaattatattgtctgccctgccacgataaaatgggagttccaatttgcggggcctgtcgcagaccaattgaagggcgtgtggttaatgccctcggcaaacagtggcatgtggagcatttcgtgtgtgctaagtgtgagaagcccttcctcggccataggcactacgagaaaaagggccttgcttactgcgaaacccattacaaccagcttttcggcgacgtgtgttataattgtagccacgtcattgaaggcgacgtggtgtcagcgcttaataaggcttggtgcgtctcttgtttctcatgttcaacatgtaactcgaagttgaccctgaagaataaattcgtcgagtttgatatgaagcccgtgtgcaaaagatgctatgagaagttcccattggagcttaagaaacgcctgaagaaactctcggaactgaccagtcgcaaagcacaacccaaagccaccgacttgaatagcgcgtag

SEQ ID NO: 61197 - DNA, 1011 bp, Artificial Sequence
  derived and/or modified sequence
atgagtgacgcactagcgaatgccgtttgtcagagatgccaggccagattttcccccgccgaacggatcgtcaattccaatggagaactgtatcacgaacactgctttgtttgcgcccaatgctttcggcccttccccgaagggcttttctacgaattcgaaggacgtaaatactgtgaacacgattttcaaatgttatttgctccgtgctgcgggtcttgtggcgagtttatcattggacgagtcataaaagcgatgaataataactggcatccaggctgttttcgctgcgaactgtgtgacgtagaactagctgatctgggattcgtgaagaatgcgggtaggcacctgtgccgaccctgtcacaacagggagaaggcaaaaggtctgggaaagtatatatgtcagcgatgtcacctggtcatcgacgagcagcccttaatgtttaggtcagatgcttatcaccctgatcacttcaactgcactcactgtggcaaagagcttaccgctgaagcacgggaactgaagggcgagctatattgcttaccctgccacgataagatgggcgtacccatctgtggggcctgccgacggccgattgagggccgcgtggtaaacgccctgggtaaacagtggcatgtagagcactttgtgtgcgcaaagtgtgagaagccgtttctggggcaccgccactatgagaagaaggggctggcctattgtgagactcattacaaccagctatttggggacgtctgctataactgctcccacgtcattgagggggacgtggtgagtgcactcaacaaggcatggtgtgtgtcctgcttctcctgctctacatgtaattccaagctcaccctcaaaaacaaatttgtagagttcgacatgaaacccgtttgtaagcgctgctacgagaaatttccactggagttaaagaaaagattgaaaaagctgagtgagctgacatcgaggaaagcccagccaaaggcaactgatctcaactctgcctag

SEQ ID NO: 61198 - DNA, 1011 bp, Artificial Sequence
  derived and/or modified sequence
atgtctgatgccctggccaatgctgtgtgccagcgctgccaggcccgcttctccccagctgagagaattgtgaacagcaatggagagctgtaccacgagcactgctttgtgtgtgcccagtgcttccggcccttccctgagggcctcttctatgaatttgagggcaggaagtactgtgaacatgacttccagatgctgtttgccccctgctgcggcagctgtggggagttcatcatcggccgggtcatcaaggccatgaacaacaactggcaccctggctgcttccgctgtgagctgtgtgatgtggagctggccgacctgggctttgtgaagaatgccggccgccacctgtgccggccctgccacaaccgggagaaggccaagggcctgggcaagtacatctgccagcgctgccacctggtgattgatgagcagcccctgatgttcagaagtgatgcctaccacccagaccacttcaactgcacccactgtgggaaggagctgacagctgaggcccgggagctgaagggggagctgtactgcctgccctgccacgacaagatgggcgtgcccatctgtggggcctgcagaagacccatcgagggccgggtggtgaatgccctgggcaagcagtggcacgtggagcactttgtgtgtgccaagtgtgagaagcccttcctgggccaccgccactatgagaagaagggcctggcctactgtgagacccactacaaccagctgtttggagatgtgtgctacaactgcagccacgtgattgaaggagatgtggtgtctgccctgaacaaggcctggtgtgtgtcctgcttcagctgcagcacctgcaacagcaagctgaccctgaagaacaagtttgtggagtttgacatgaagcctgtgtgcaagcgctgctatgagaagttccccctggagctgaagaagaggctgaagaagctgtctgagctgaccagcaggaaggcccagcccaaggccacagacctgaacagcgcctag

SEQ ID NO: 61199 - DNA, 1011 bp, Artificial Sequence
  derived and/or modified sequence
atgagcgacgccctggccaacgccgtgtgccagcggtgccaggcccggttttcccctgcggagcgtatcgttaactccaacggcgagctctaccacgagcattgctttgtgtgtgctcagtgttttagaccattccctgagggtctgttttatgaatttgagggtcggaaatattgtgagcacgattttcaaatgctcttcgctccgtgttgcgggagttgtggggagttcattatcggtagggtgattaaggctatgaataataactggcatcccgggtgttttagatgtgaattgtgcgacgtagaactcgccgacttaggattcgttaagaacgcaggtagacatctttgtcgaccttgccacaatcgtgaaaaagctaagggcctgggcaagtatatctgtcaacgttgccatctggtgatcgacgagcaacccctgatgtttagatccgacgcatatcaccccgatcatttcaattgtacccattgtggcaaggagttgacagcagaggctcgcgaactcaagggtgagttgtattgcctgccttgccatgataagatgggagtgccaatctgtggagcttgccgaaggccaattgagggaagagtcgtgaatgccctgggtaaacagtggcatgtggagcatttcgtttgcgccaagtgtgaaaagccctttctggggcaccgccactatgaaaaaaaggggcttgcctattgcgagacacattataaccagctttttggcgacgtatgttacaattgcagccatgtcatcgagggggacgtagtttccgcactgaacaaagcctggtgcgtatcctgtttcagttgcagcacttgcaactctaaactaaccctgaagaataagttcgtggagtttgacatgaagccagtctgcaagcggtgttacgaaaagttccccttagagctgaagaagcgcctgaaaaagttatctgagctgacctcaaggaaggcgcagcctaaggcaacggatcttaacagtgcttag

SEQ ID NO: 61200 - DNA, 1011 bp, Artificial Sequence
  derived and/or modified sequence
atgagcgacgccctggccaacgccgtgtgccagcggtgccaggccaggttctcgcccgccgaaaggattgttaactcaaatggcgagctgtatcatgagcactgctttgtgtgcgcacagtgtttccggccgtttcctgagggactgttttatgaattcgaaggccgcaaatactgtgaacatgattttcagatgctcttcgctccttgttgtgggtcctgcggcgaattcatcatcggcagggtaatcaaggcgatgaataacaattggcacccaggctgcttcagatgtgaattatgcgatgtagagctcgctgacctgggcttcgtgaaaaacgcgggacgtcatctctgccggccgtgccacaaccgagaaaaagcaaagggcctcggaaagtacatctgtcagaggtgccacctggttattgacgagcaacctctcatgtttcgctcagacgcgtaccaccctgatcactttaactgcacccactgtggaaaggagctgaccgccgaagcacgcgagttgaagggcgagctgtactgcctcccatgtcacgacaaaatgggcgttcccatctgcggcgcctgtcggcggccgatcgagggtcgtgtcgtgaacgctcttgggaaacagtggcatgtggaacacttcgtctgtgcaaaatgtgagaaaccctttttgggacataggcactatgagaaaaaggggctggcctactgcgaaacacactacaatcagctttttggcgatgtctgttataattgctcacatgtgattgagggcgacgtggtgagcgctctcaataaagcttggtgcgtgagctgctttagttgcagcacctgtaattctaagttaacactgaaaaacaagttcgtggaatttgacatgaagccagtgtgcaagcgttgctatgaaaagtttcctctggagctcaagaaacgtttgaaaaaactcagcgaacttacgtcgcgaaaggctcaaccaaaagctactgatcttaattctgcctag

SEQ ID NO: 61201 - DNA, 1011 bp, Artificial Sequence
  derived and/or modified sequence
atgagcgacgccctggccaacgccgtgtgccagcggtgccaggcccgcttcagtcctgctgagagaatagtgaactctaatggagaactgtatcatgagcactgctttgtgtgtgctcagtgctttaggcctttccccgagggactgttttatgagttcgagggcaggaaatactgcgaacacgacttccagatgctgttcgcaccctgctgcgggagctgtggagagttcattatcggaagagtaatcaaagccatgaataacaattggcatcctggatgtttcagatgtgaactgtgcgatgttgaacttgctgatctgggattcgtcaagaacgccggccgccacctctgtagaccctgccataacagggagaaggcaaagggtttaggtaagtatatctgccaacgctgtcaccttgtcatcgacgagcagccattaatgtttagatcggacgcctaccaccccgaccattttaactgcacccattgtggcaaggaactgacagccgaggccagggagcttaagggagagctgtattgccttccctgtcacgataagatgggggtgccaatatgcggggcctgtaggaggccgatcgaagggagggtggtaaatgcactgggaaaacagtggcacgtcgagcactttgtgtgtgcaaagtgtgaaaaacccttcctgggtcataggcattacgaaaaaaagggccttgcttattgcgagacccattataaccaacttttcggtgacgtttgctacaactgttcccatgttatagagggcgacgtcgtatctgcactgaacaaggcatggtgcgtcagctgtttcagttgcagcacctgcaactctaagttaaccctgaagaacaagtttgtggaattcgatatgaagcccgtgtgcaagcggtgctacgagaaatttcctctggaactcaagaaacggctcaagaagctgagtgaactgactagccgaaaggctcaacctaaagcaacagatctgaacagcgcgtag

SEQ ID NO: 61202 - DNA, 1011 bp, Artificial Sequence
  derived and/or modified sequence
atgagcgacgccctggccaacgccgtgtgccagcggtgccaggcccgcttttctcctgctgagcggattgtcaactccaacggggagctgtaccacgaacactgctttgtgtgcgcccagtgcttccgaccgttccccgaagggttattctacgagttcgagggtcgaaaatactgtgagcacgactttcagatgcttttcgctccctgctgtggctcatgtggtgaattcatcattggccgcgtgataaaagccatgaataataactggcaccccgggtgtttccgatgtgagctgtgcgacgtggagcttgcggatctcggattcgttaaaaatgccggccgacacctgtgtcgcccatgtcacaaccgagaaaaggcaaaagggctaggaaagtacatctgccaacgctgccacttggtaatcgacgaacagcctctgatgtttcgttccgatgcttatcaccctgatcacttcaattgcacacactgtggaaaagagcttaccgcagaagcccgcgagctcaagggggagctatattgtctaccctgtcatgataagatgggagtccccatctgtggcgcctgtaggaggccaatcgaggggagagtcgtgaatgcgctaggcaaacaatggcatgtggaacacttcgtgtgcgccaagtgtgagaagccttttctcggacataggcattatgaaaagaaaggtttggcttactgtgagacgcactataatcagcttttcggtgacgtgtgttataattgttcccatgtcatcgagggcgacgtcgtgtccgccttaaataaagcttggtgcgtctcctgcttctcatgtagtacatgcaactcgaagctcacattgaagaataagtttgtcgagttcgacatgaagcccgtgtgtaagcgctgttacgagaaattccctctcgagctcaagaagcggctcaagaagttgtcagagttgacctccagaaaggctcaaccaaaagccacggatttaaactctgcttag

SEQ ID NO: 61203 - DNA, 1011 bp, Artificial Sequence
  derived and/or modified sequence
atgagcgatgccttggccaacgcggtctgtcagaggtgccaggcaagattcagcccagccgagagaatcgtgaattctaacggtgagctctaccacgagcactgttttgtttgcgcacagtgtttccgaccttttcccgaaggcctcttttacgagttcgagggaaggaaatattgtgagcacgattttcagatgctattcgctccatgttgtggcagctgtggggagtttataattgggcgagtaattaaagctatgaataataactggcaccccggatgtttcagatgcgagctgtgcgatgtcgagctagccgacctcggattcgtaaagaacgctggcaggcatctgtgccgaccctgtcacaaccgggaaaaagcgaagggcttaggaaaatatatttgtcagagatgccacttagttattgatgaacaaccactgatgttccgctctgacgcatatcatcccgatcatttcaactgcacccattgtggcaaggaactgacggcggaagcaagggagctgaagggggagctttattgtttaccttgccatgacaagatgggtgttccgatctgcggagcatgccgacggcctattgaaggcagagtggtgaatgctctgggaaagcagtggcatgtggagcacttcgtatgtgccaaatgcgaaaaacctttcttagggcacagacactatgagaagaagggcctggcctactgcgagacccattacaatcaactgtttggggatgtgtgctataattgttcacatgtgatcgagggcgacgtggtgtctgcccttaataaagcatggtgcgtctcgtgtttctcatgttccacctgcaactctaagcttacactgaagaataaatttgtcgagttcgatatgaaacctgtatgcaaacgttgctatgagaaattcccgctcgagctcaagaaaagactgaagaaactctcagaactgaccagtcgcaaggcacagcctaaagctacggaccttaattctgcatag

SEQ ID NO: 61204 - DNA, 1011 bp, Artificial Sequence
  derived and/or modified sequence
atgagcgacgccctcgcgaatgccgtgtgccaaagatgccaggcgagattctcccctgcggagcggatcgtaaattcaaacggagaactgtatcatgaacactgctttgtgtgcgctcagtgtttccggccatttccagagggcctcttctacgagtttgaaggcagaaaatattgcgagcatgacttccaaatgctgtttgctccctgttgcgggtcctgcggggagtttatcattggcagggttatcaaggccatgaataacaactggcatcctggatgtttccggtgtgagctttgcgatgttgagctcgccgacttagggttcgtaaagaatgccggtagacacctgtgtagaccatgccacaatagggagaaggccaaaggactgggtaagtatatttgccagcgctgccatcttgttatagatgaacagccgctcatgttccgttcggacgcctaccaccccgatcacttcaactgtacccactgcggtaaggaacttacagcggaagcaagggagctgaaaggggaactctattgtttaccctgtcatgacaagatgggcgtcccaatatgcggggcttgtaggcgcccaatcgaaggaagagtcgtgaatgccctggggaagcagtggcacgtcgaacatttcgtgtgcgcgaaatgtgaaaagccattcctggggcatcggcactacgaaaaaaagggcctcgcttactgcgaaacccactataaccagctctttggcgatgtgtgctacaattgttcccacgtgatcgagggtgacgtggtgtcggccctgaataaggcatggtgcgtttcctgtttctcttgttccacttgcaactcaaaactgactctgaaaaataaattcgtggagttcgacatgaaaccagtttgcaagcgctgttatgaaaagttccctctcgagctgaaaaagcggctgaaaaaactctcggagctgactagccgcaaagcacaaccaaaagcgacagacctgaattctgcctag

SEQ ID NO: 61205 - DNA, 1011 bp, Artificial Sequence
  derived and/or modified sequence
atgagcgacgcattggccaacgcagtctgtcagcggtgccaggcaagattttccccagctgagcgaatcgtgaatagcaacggcgagctttaccatgaacattgctttgtctgcgcacaatgctttaggcccttccccgaaggcctgttctatgaatttgagggacggaagtactgcgaacatgactttcagatgctgtttgcgccttgttgtggctcctgtggtgaattcatcataggcagagtaatcaaagcaatgaacaacaactggcaccctggatgtttcagatgcgagttgtgtgatgtggagctggcagatcttgggtttgtcaaaaatgccggacggcacctctgccgaccttgtcataacagggagaaggctaaaggcctgggcaaatacatctgtcaacgctgtcatctagtgattgacgaacagcccctgatgtttcgatctgacgcctatcaccccgaccattttaattgcacccactgcgggaaagagctaacagctgaagcacgtgaactgaagggagaactgtattgcctcccatgccacgataagatgggggtcccgatatgcggtgcatgccgccgtcccatcgagggtcgcgttgtcaatgctctcgggaagcagtggcacgtggagcactttgtgtgtgcgaagtgtgagaagcccttcctcggccaccgacattacgagaaaaagggactagcatactgcgagactcactataaccagcttttcggcgacgtgtgctacaattgcagccacgttatcgaaggcgatgttgttagcgccctgaataaagcttggtgcgttagttgttttagttgctctacatgcaactcaaagctcaccctgaagaataaattcgtagaatttgatatgaaaccagtctgtaagcgttgctatgagaagtttcccctggagctgaagaagagactgaaaaaacttagtgaactgacatcacggaaagctcaacctaaagccactgacctgaactctgcttag

SEQ ID NO: 61206 - DNA, 1011 bp, Artificial Sequence
  derived and/or modified sequence
atgagcgacgccctcgcgaatgcagtctgccagagatgtcaggcaagattttcacccgcagagcgcattgtaaacagtaatggtgagctctaccacgagcattgcttcgtgtgtgctcaatgcttccggccattcccagagggactcttctacgagtttgaaggaagaaagtactgcgaacacgactttcagatgctgttcgccccatgttgtgggagttgcggtgaatttattatcggacgcgttatcaaggccatgaacaacaactggcatcctggctgtttccggtgcgaactgtgtgacgtggagttggcagatctggggttcgtcaaaaatgctggtcggcacttgtgccgcccatgtcacaatcgcgagaaggccaaaggcctgggaaaatatatctgccagcgatgtcatctggtgatcgacgaacagccactaatgtttcggagcgatgcctaccatccagatcactttaactgcacgcactgtgggaaagagctgaccgctgaggcaagggaattgaaaggtgaactatattgccttccctgtcacgacaagatgggagtgccaatctgcggtgcctgtagacgtcctattgagggtagagtcgtaaacgctctgggcaaacagtggcatgtggagcactttgtctgtgcaaaatgcgagaagccttttttggggcaccgacactatgagaagaaggggctcgcttattgcgagacacattacaaccagctatttggtgacgtgtgttacaactgtagtcatgtcatagagggagatgttgtctctgctttgaacaaagcatggtgtgtcagttgcttttcatgctcaacatgtaactctaagctgacacttaaaaacaaattcgtcgaattcgatatgaagcccgtgtgtaagcggtgctatgagaagtttcctctggagctgaagaagcggttaaagaaattatccgagttgacctcccggaaagcgcagccaaaggctactgatttgaatagcgcttag

SEQ ID NO: 61207 - protein, 103 aa, Artificial Sequence
  derived and/or modified sequence
MNGLEVAPPGLITNFSLATAEQCGQETPLENMLFASFYLPLPRQPRMCTVTGLTAGSTARSKQHLEVVFAVLPAFKLQRGRRERTSKPPIIPMSSPGPCWVRT

SEQ ID NO: 61208 - DNA, 312 bp, Artificial Sequence
  derived and/or modified sequence
atgaatgggctggaggtagccccccccggtcttattaccaacttctccctcgccacagcagaacagtgtggacaggaaacccctctggagaatatgctctttgcctctttttacctgcccctgccacgacagccaaggatgtgcaccgtgacaggtctgacggccggctctaccgctcggtccaaacaacacctggaggtggtgtttgccgtgttacctgcgtttaagctccagaggggtagacgggaacgaacgagcaagccgcctatcattcctatgagctcgcccgggccatgttgggtaaggacatag

SEQ ID NO: 61209 - DNA, 312 bp, Artificial Sequence
  derived and/or modified sequence
atgaatggcctggaggtggcccctcctggcctcatcaccaacttcagcctggccacagctgagcagtgtggccaggagacccccctggagaacatgctgtttgccagcttctacctgcccctgccccggcagcccaggatgtgcaccgtgacaggcctgacagctggcagcacagcccggagcaagcagcacctggaggtggtgtttgctgtgctgcctgccttcaagctgcagagaggaagaagagagaggaccagcaagccacccatcatccccatgagcagccctggcccctgctgggtgaggacatag

SEQ ID NO: 61210 - DNA, 312 bp, Artificial Sequence
  derived and/or modified sequence
atgaacggcctggaggtggccccccccggcctgatcaccaacttctcccttgctaccgccgagcagtgtgggcaggagacacccctagaaaatatgcttttcgcatctttctatctgccacttcccagacaaccgaggatgtgcacagtcacagggctcactgccgggtctaccgcccgatccaaacagcacctcgaagttgtcttcgccgtgttacccgctttcaaactccaacggggtagaagagaacgcacaagcaagccacccatcattcccatgtcttctccaggaccttgttgggttagaacctag

SEQ ID NO: 61211 - DNA, 312 bp, Artificial Sequence
  derived and/or modified sequence
atgaacgggctggaagtggctcccccaggactcataacaaacttcagtcttgccacagccgagcagtgcgggcaggagacacctctcgagaacatgcttttcgcttcattttacctgccactgcctcgccagccgcgaatgtgtactgtgaccgggttgacagcaggttctaccgcccgatccaaacagcatctcgaagttgtgttcgcagtcctgcctgcctttaagctacagcggggacgtcgagagcggacaagcaaacccccaattattcctatgtcctcccctgggccatgctgggtccggacatag

SEQ ID NO: 61212 - DNA, 312 bp, Artificial Sequence
  derived and/or modified sequence
atgaacggcctggaggtggccccccccggcctgatcaccaacttcagcctggccaccgccgagcagtgcggccaggagacccccctggagaacatgctgttcgccagcttctacctgcccctgcccagacagcccagaatgtgcaccgtgaccggcctgaccgccggcagcaccgccagaagcaagcagcacctggaggtggtgttcgccgtgctgcccgccttcaagctgcagagaggcagaagagagagaaccagcaagccccccatcatccccatgagcagccccggcccctgctgggtgagaacctag

SEQ ID NO: 61213 - protein, 490 aa, Artificial Sequence
  derived and/or modified sequence
MTTIPRKGSSHLPGSLHTCKLKLQEDRRQQEKSVIAQPIFVFEKGEQTFKRPAEDTLYEAAEPECNGFPTKRVRSSSFTFHITDSQSQGVSTLSQKQMRCSSVTNLPTFPHSGPVRKNNVFMTSALVQSSVDIKSAEQGPVKHSKHVIRPAILQLPQARSCAKVRKTFGHKALESCKTKEKTNNKISEGNSYLLSENLSRARISVQLSTNQDFLGATSVGCQPNEDKCSFKSCSSNFVFGENMVERVLGTQKLTQPQLENDSYAKEKPFKSIPKFPVNFLSSRTDSIKNTSLIESAAAFSSQPSRKCLLEKIDVITGEETEHNVLKINCKLFIFNKTTQSWIERGRGTLRLNDTASTDCGTLQSRLIMRNQGSLRLILNSKLWAQMKIQRANHKNVRITATDLEDYSIKIFLIQASAQDTAYLYAAIHHRLVALQSFNKQRDVNQAESLSETAQQLNCESCDENEDDFIQVTKNGSDPSSWTHRQSVACS

SEQ ID NO: 61214 - DNA, 1473 bp, Artificial Sequence
  derived and/or modified sequence
atgaccaccatccccagaaagggcagcagccacctgcccggcagcctgcacacctgcaagctgaagctgcaggaggacagaagacagcaggagaagagcgtgatcgcccagcccatcttcgtgttcgagaagggcgagcagaccttcaagagacccgccgaggacaccctgtacgaggccgccgagcccgagtgcaacggcttccccaccaagagagtgagaagcagcagcttcaccttccacatcaccgacagccagagccagggcgtgagcaccctgagccagaagcagatgagatgcagcagcgtgaccaacctgcccaccttcccccacagcggccccgtgagaaagaacaacgtgttcatgaccagcgccctggtgcagagcagcgtggacatcaagagcgccgagcagggccccgtgaagcacagcaagcacgtgatcagacccgccatcctgcagctgccccaggccagaagctgcgccaaggtgagaaagaccttcggccacaaggccctggagagctgcaagaccaaggagaagaccaacaacaagatcagcgagggcaacagctacctgctgagcgagaacctgagcagagccagaatcagcgtgcagctgagcaccaaccaggacttcctgggcgccaccagcgtgggctgccagcccaacgaggacaagtgcagcttcaagagctgcagcagcaacttcgtgttcggcgagaacatggtggagagagtgctgggcacccagaagctgacccagccccagctggagaacgacagctacgccaaggagaagcccttcaagagcatccccaagttccccgtgaacttcctgagcagcagaaccgacagcatcaagaacaccagcctgatcgagagcgccgccgccttcagcagccagcccagcagaaagtgcctgctggagaagatcgacgtgatcaccggcgaggagaccgagcacaacgtgctgaagatcaactgcaagctgttcatcttcaacaagaccacccagagctggatcgagagaggcagaggcaccctgagactgaacgacaccgccagcaccgactgcggcaccctgcagagcagactgatcatgagaaaccagggcagcctgagactgatcctgaacagcaagctgtgggcccagatgaagatccagagagccaaccacaagaacgtgagaatcaccgccaccgacctggaggactacagcatcaagatcttcctgatccaggccagcgcccaggacaccgcctacctgtacgccgccatccaccacagactggtggccctgcagagcttcaacaagcagagagacgtgaaccaggccgagagcctgagcgagaccgcccagcagctgaactgcgagagctgcgacgagaacgaggacgacttcatccaggtgaccaagaacggcagcgaccccagcagctggacccacagacagagcgtggcctgcagctag

SEQ ID NO: 61215 - DNA, 1473 bp, Artificial Sequence
  derived and/or modified sequence
atgaccacgattccgcgcaagggctcgagtcacctgccaggtagcctgcacacatgtaagctgaaactacaggaggatcgaaggcagcaggagaaatccgtgatagcccagcctatttttgttttcgagaagggagaacagacgttcaaaaggcccgctgaagacacgctatatgaggcagctgagccagagtgtaatggctttcccactaaaagggtgcggtccagcagcttcacttttcacatcaccgattcacagagccagggagtatctaccttgtctcaaaagcagatgcgatgctctagtgtgactaatttgcccacctttccacattctggacctgtgcgtaagaacaatgttttcatgaccagcgcccttgtgcaatcgtcagttgatattaaaagcgcagaacaggggcctgtaaaacacagtaaacatgtgatccggccagcgattttacaattaccacaggcacgctcttgcgcaaaggtgaggaagacctttggacacaaagccttggaatcctgcaagacaaaggagaagaccaacaacaagatctcagagggtaatagttatctcctgtcagaaaacctttcgagagccagaatttctgtgcaactgagcactaatcaggactttctaggagctacttctgtcgggtgccaaccaaacgaggataagtgttccttcaaatcctgtagttctaacttcgtattcggtgagaatatggtggagagggttttgggaacacaaaagctgacacagccccagctggagaatgattcatatgccaaggagaaaccctttaaatctattcctaagtttcctgtgaactttctgtcctcgcggaccgatagtattaagaacacttcgctgatcgagtccgctgccgccttctcttcccagcccagtagaaaatgcttgctggagaaaattgatgtgatcacaggcgaggagacggaacacaacgtgctgaagatcaactgtaagcttttcatctttaataagaccactcagtcgtggatcgagcgcggcaggggaacactgcgcctgaacgacacagcttcgacagactgtggaactttacagagtaggcttatcatgaggaaccagggctccctgaggctgattctgaattcaaaactgtgggcacagatgaagatccagcgagccaaccataagaacgttaggatcacagcgaccgatctagaggattacagcatcaaaatcttcctcatccaggcctcagcccaggacacggcctatttgtacgccgcaatacatcacaggctggtggcattgcagtcctttaacaagcagcgggatgttaatcaggcagagagcctttctgagacagcccaacaactgaattgtgagtcctgcgacgagaacgaagatgattttatccaagtgacaaagaacggtagcgaccctagctcttggacccacaggcagtccgtggcatgctcctag

SEQ ID NO: 61216 - DNA, 1473 bp, Artificial Sequence
  derived and/or modified sequence
atgaccaccatccccaggaagggcagcagccacctgcccggcagcctgcacacctgcaagctgaagctgcaggaggaccggcggcagcaggagaagtctgtgattgcccagcccatctttgtgtttgagaagggggagcagaccttcaagaggcctgctgaggacaccctgtatgaggccgctgagcctgagtgcaatggcttccccaccaagagggtgcgcagcagcagcttcaccttccacatcacagacagccagagccagggcgtgtccaccctgagccagaagcagatgcgctgcagctctgtgaccaacctgcccaccttcccccacagcggccctgtgaggaagaacaacgtgttcatgaccagcgccctggtgcagagctctgtggacatcaagtctgctgagcagggccctgtgaagcacagcaagcacgtgatccggcctgccatcctgcagctgccccaggcccggagctgtgccaaggtgaggaagaccttcggccacaaggccctggagagctgcaagaccaaggagaagaccaacaacaagatcagcgagggcaacagctacctgctgtctgagaacctgagccgggcccgcatctctgtgcagctgagcaccaaccaggacttcctgggcgccacctctgtgggctgccagcccaatgaagataaatgttccttcaagagctgcagcagcaactttgtgtttggagagaacatggtggagcgggtgctgggcacccagaagctgacccagccccagctggagaatgacagctatgccaaggagaagcccttcaagagcatccccaagtttcctgtgaacttcctgagcagcaggacagacagcatcaagaacaccagcctgattgaatctgctgctgccttcagcagccagcccagcaggaagtgcctgctggagaagattgatgtgatcaccggggaggagacagagcacaacgtgctgaagatcaactgcaagctgttcatcttcaacaagaccacccagagctggattgaaagaggccggggcaccctgcggctgaatgacacagccagcacagactgtggcaccctgcagagccgcctcatcatgaggaaccagggcagcctgcggctcatcctgaacagcaagctgtgggcccagatgaagatccagagggccaaccacaagaatgtgcgcatcacagccacagacctggaggactacagcatcaagatcttcctgatccaggccagcgcccaggacacagcctacctgtatgctgccatccaccaccggctggtggccctgcagagcttcaacaagcagagagatgtgaaccaggccgagagcctgtctgaaacagcccagcagctgaactgtgagagctgtgatgaaaatgaagatgacttcatccaggtgaccaagaatggaagtgaccccagctcctggacccaccggcagagcgtggcctgcagctag

SEQ ID NO: 61217 - DNA, 1473 bp, Artificial Sequence
  derived and/or modified sequence
atgaccaccatcccccggaagggcagcagccacctgcccggcagcctgcacacctgtaagttgaagcttcaggaggacaggcggcagcaggagaaatctgtgatcgcccaacccattttcgtgtttgagaaaggcgagcagacgttcaagcggcccgccgaagacacgctgtacgaagccgccgagcctgaatgcaacgggtttccaacaaagcgcgtgcgaagctcatctttcacatttcacattaccgacagtcagtcccagggcgtgtccacattgagccaaaagcaaatgcgctgctccagtgttaccaatcttccaacattccctcattcgggccctgtgaggaagaacaacgtgtttatgaccagtgccctcgttcagtcctctgtggatatcaaaagtgctgaacaggggcccgtgaagcacagtaaacacgtcatccgccccgccatcctgcaactaccccaggcaaggtcgtgcgctaaggtgcggaagactttcggacataaagcattagagagctgcaagactaaggagaagacaaataacaaaattagcgagggtaatagttatctcttgtcggaaaatttgtctagagctagaattagtgtacaactgtctacaaatcaggacttcttgggggctaccagtgtagggtgccagcccaatgaggacaagtgctctttcaaatcctgttccagtaacttcgttttcggcgagaatatggtggaaagagtgctagggacccagaaactcacgcagccccagctcgagaacgatagttacgccaaggaaaaaccctttaaatcaatcccaaagttccctgtgaactttctcagctcacgaactgactctataaaaaacacttctttgatagagtcagctgctgctttcagttcccagcctagtaggaaatgtctccttgagaaaattgatgtgatcaccggagaagaaaccgagcacaatgtgttgaagattaactgcaagcttttcatttttaataaaacaacccagagctggatcgagaggggacgcggaacactacgcctcaatgatacagcgtccactgactgtggtacgctccagtccagactgataatgagaaatcagggttcactgcgtctaattctgaattctaaactgtgggcacaaatgaagatccagagagcaaaccacaaaaatgttcggataactgccactgatctggaagactacagcatcaaaattttccttattcaagcttctgcacaggacacagcctacctgtatgcagcgatacaccacagattggtggcactgcagagcttcaacaagcaacgggatgtgaatcaagctgaaagcctgagcgagacagcccagcagctcaattgtgaaagctgtgatgagaacgaggacgactttatccaagttacaaagaacgggtccgatccatcatcctggactcaccgacagagtgtcgcctgtagctag

SEQ ID NO: 61218 - DNA, 1473 bp, Artificial Sequence
  derived and/or modified sequence
atgaccacaatcccccgaaaagggagctctcatctgccaggtagcctgcacacctgcaaacttaagctccaggaggataggagacaacaagagaaatccgtcatcgcccagcctatcttcgtgtttgagaagggcgagcagacatttaagcgtccggcagaagacacactgtacgaggcggctgaacctgagtgtaacggatttcctacaaagcgcgtgcggtctagctccttcacgtttcatattaccgattcccagtcacagggagtgtccactctttctcagaagcagatgaggtgctcctcggtgacaaacttgccaacattcccacactcagggccagtgagaaagaacaatgtgttcatgacttccgccctcgtgcagtcgtcagtcgacattaagagcgccgaacagggacccgtgaagcactccaagcatgtgatccggccagctatcctgcagctgcctcaggccaggtcctgtgcaaaagtgcgtaaaaccttcggccacaaagcactcgagtcatgtaaaacaaaagagaagacaaataataagatcagcgagggaaatagctatctgttatctgagaacctgtccagagctcgcatctccgtccaactcagtactaaccaagatttccttggagcgacaagcgtagggtgtcagccaaacgaagataagtgtagttttaagtcgtgctctagtaattttgtgttcggagaaaacatggtagagagggtgcttgggacccagaagctgacacagccccaactggagaatgatagttacgccaaggaaaagcctttcaaaagcataccaaagttccccgtgaattttctcagctctcgtacagactcaatcaaaaatacgagtctgatcgagtctgctgccgcttttagcagccagcctagtcgcaagtgcctgctcgagaagattgacgtcattactggggaggaaaccgaacacaacgtgctcaagattaattgcaaactatttatcttcaataaaacaacgcagtcatggatcgaaaggggcagaggcacactccgtctgaatgataccgcttcgacggactgtggaactctgcagtcccgtttgatcatgagaaatcagggcagcctgcgtctgatcctgaacagcaagctgtgggcccagatgaaaattcaaagagcaaaccataaaaacgttcgcattactgccacggatctcgaagactattccatcaagatcttcctcatccaggcctccgcccaggatacagcctatctttatgctgcaatccaccatcggctggtcgctctccaatcttttaacaagcagcgcgatgtgaatcaggcagagtctctgtccgagactgcacaacagctgaattgtgaatcatgtgatgaaaacgaggacgactttatccaggtcactaaaaatggcagtgatccatcctcttggacacaccgccagtccgtggcatgcagctag

SEQ ID NO: 61219 - DNA, 2278 bp, Artificial Sequence
  derived and/or modified sequence
agagggtaactcagatcaggcttagaaatcacttgacttaactcagcagcactttttcttttctttgtgtctgtattattttagcagccttctctaaatactggaggcattggatttcatgtcgccaaaaggaatttaaaaatgacaaaagtgtaatctgttagaaatagttaatttgtagaattttactctataaggaggtttagtttcaatttgttttgaaatgaaggaattaagttgtgtttttaaccaaatgaattggcatctttatatttaggagaagtaacattggtgattatttatttcaagaatcatgactggaaaaagcttggaagtttagtagaggagtatatgttgtacatgcaaagacaagatctgcatgaatctatgtatttctgggtgtctggtgaaggccactttaggtgactggccagagaaggaggtgccctagtgatccttgagtcacagccatactgctaggaccatgactaccataccaagaaaaggcagcagccacctgcctggcagtttgcacacctgtaaactgaagctgcaggaggaccggcgacagcaagaaaaatctgtcattgctcaacccatatttgtttttgaaaagggagaacaaacttttaagagacctgcagaagacaccctgtatgaagcagcagaaccagaatgtaatggttttccaacaaagcgtgtacggtcttcatcttttacttttcatattacagattctcagtcccagggagtgtcaaccttgtctcagaagcaaatgagatgttcatccgtcactaacctcccaaccttcccccattctgggccagtgaggaaaaacaatgtttttatgacatcagctcttgtgcaaagtagtgttgatataaagagtgctgaacaaggtcctgtgaaacattctaaacatgttattagacctgctattttgcagctacctcaagctcgaagttgtgcaaaagtaagaaaaacatttggacacaaggcactggaatcttgcaagactaaagaaaaaacaaataataagatttctgagggaaattcctatttgttaagtgaaaatttatcaagggctagaatttcagtccagctgtctactaaccaggactttttaggtgcaacatcagtaggatgtcaaccaaatgaagataaatgttcttttaaaagctgcagttccaattttgtttttggagaaaacatggtagaaagagttttgggtactcaaaaactcacccagcctcaacttgaaaatgattcatatgccaaggaaaaaccattcaaatccattccgaaatttcctgtcaactttttaagttcaagaacagactctattaaaaatacttccctaattgaatcagctgctgcattctcttcccaaccatcacgaaaatgcttgctggagaaaattgatgttataacaggggaggaaacagaacataatgtgttaaagataaactgcaagcttttcatattcaacaaaacaacacaatcctggattgaaaggggcagaggaacgttgagactgaatgacacagcaagcactgactgtggaacattacagtcaagactaattatgcgcaatcaaggcagtctaaggctgatcctcaacagcaaactctgggcccaaatgaagattcaaagagcaaaccacaaaaatgtacgaataacagctactgatttagaagactatagcatcaaaatatttttaattcaggccagtgcccaagatacagcatatttgtatgcagcaatacatcatcgtcttgttgcacttcaaagcttcaataagcagagagatgtcaatcaagctgaaagcctgtcagaaacagcccaacaattgaactgcgaaagctgtgatgagaatgaggatgatttcatccaagtcactaaaaatggatcagatccttctagttggactcacagacagtcggttgcctgttcatgaatactacctactataaacatgacatctacaaaaagaggggtcaccctactgaaaatactaaaccaccctaactaatgagaagattctattcattccttgaagagtttttatagaaaagtttaagaaatgtaatttgttgcaattaacatttttatgttttacattttacattttgattattgtgcagaaactgacagaatttaaaaaaatggacttcagaagttcaaaatttatcatttttgaagaagtttatttagaataggattttataactaatttggactcttcatcacattgatggatataatacttagaattata

SEQ ID NO: 61220 - protein, 937 aa, Artificial Sequence
  derived and/or modified sequence
MAGAGGGLGVWGNLVLLGLCSWTGARAPAPNPGRNLTVETQTTSSISLSWEVPDGLDSQNSNYWVQCTGDGGTTETRNTTATNVTVDGLGPGSLYTCSVWVEKDGVNSSVGTVTTATAPNPVRNLTVEAQTNSSIALTWEVPDGPDPQNSTYGVEYTGDGGRAGTRSTAHTNITVDRLEPGCLYVFSVWVGKNGINSSRETRNATTAPNPVRNLHMETQTNSSIALCWEVPDGPYPQDYTYWVEYTGDGGGTETRNTTNTSVTAERLEPGTLYTFSVWAEKNGARGSRQNVSISTVPNAVTSLSKQDWTNSTIALRWTAPQGPGQSSYSYWVSWVREGMTDPRTQSTSGTDITLKELEAGSLYHLTVWAERNEVRGYNSTLTAATAPNEVTDLQNETQTKNSVMLWWKAPGDPHSQLYVYWVQWASKGHPRRGQDPQANWVNQTSRTNETWYKVEALEPGTLYNFTVWAERNDVASSTQSLCASTYPDTVTITSCVSTSAGYGVNLIWSCPQGGYEAFELEVGGQRGSQDRSSCGEAVSVLGLGPARSYPATITTIWDGMKVVSHSVVCHTESAGVIAGAFVGILLFLILVGLLIFFLKRRNKKKQQKPELRDLVFSSPGDIPAEDFADHVRKNERDSNCGFADKYQQLSLVGHSQSQMVASASENNAKNRYRNVLPYDWSRVPLKPIHEEPGSDYINASFMPGLWSPQEFIATQGPLPQTVGDFWRLVWEQQSHTLVMLTNCMEAGRVKCEHYWPLDSQPCTHGHLRVTLVGEEVMENWTVRELLLLQVEEQKTLSVRQFHYQAWPDHGVPSSPDTLLAFWRMLRQWLDQTMEGGPPIVHCSAGVGRTGTLIALDVLLRQLQSEGLLGPFSFVRKMRESRPLMVQTEAQYVFLHQCILRFLQQSAQAPAEKEVPYEDVENLIYENVAAIQAHKLEV

SEQ ID NO: 61221 - DNA, 2814 bp, Artificial Sequence
  derived and/or modified sequence
atggctggagcggggggcgggcttggtgtgtgggggaacctggtgctgctcggcctgtgtagctggaccggagctcgcgctcccgctcccaatccgggtaggaatttgacggtggaaactcagacaacttcctctatctcgctgtcatgggaggtgcctgacggtctagattctcagaacagcaattactgggtacagtgcacaggagacggaggcacaactgaaactcgcaataccactgccactaatgtgactgtggacggcttggggccaggatctctgtatacttgttcggtgtgggtggagaaagacggtgtaaactcgtctgtaggaacagtgacaacggcaaccgcccctaatccagtcagaaacctaacagtcgaagcccaaacgaattcatcaattgctctgacttgggaggtccccgatgggcccgaccctcagaattcaacctacggcgtggagtacactggcgacggcgggagggcagggacccggtcaactgcccacacaaatatcacggtagaccgcctcgaaccaggttgtctgtacgtgttctcagtctgggtgggtaagaacgggatcaatagctcgcgtgagacacgcaatgccaccacagcccctaatccagttcggaacctgcacatggagacacaaacgaattcctcaatcgctctctgctgggaagtgcccgacggcccctacccccaagactatacttattgggtggaatatacaggagacggcggagggacagagactaggaacacaaccaacacctcagtgaccgccgagagactggagccaggcacactgtatacgttttcggtctgggccgagaaaaatggggcacgcggctcccggcaaaacgtgagcatctcgaccgtcccaaatgcagtgacgtcactgtcaaagcaggattggaccaatagtaccatcgctctccgctggacagctccccagggtccaggacagtcatcatactcttattgggtttcctgggtgcgggagggtatgacagatccccgaacacagagcactagtggaacagatataacactgaaagaattagaagccggaagtttgtatcacctcacagtgtgggccgaacgaaacgaggtacgcggatataactcaactcttaccgcagccactgcccccaacgaagtgacggatcttcagaatgagacgcaaaccaaaaattcagtgatgctgtggtggaaagccccaggggaccctcactctcagctctacgtgtactgggtgcagtgggcctccaaggggcacccccggaggggacaagaccctcaagctaactgggtcaatcaaactagcagaactaatgagacctggtataaggtcgaagccctggaaccaggaacgctgtataactttacggtgtgggccgaacgcaacgacgtggcctcctccacccagtcactatgtgcctcaacttaccctgacactgtgaccatcacctcgtgcgtgtccactagcgctggctacggcgtgaatctaatttggagctgtccccagggcggatatgaggcgtttgagctggaagtcggaggccaaagagggagtcaggacagatcctcttgcggtgaggctgtgagtgtgctgggtctcgggcccgctagatcttacccggccactatcactactatttgggacggtatgaaggttgtgagccactccgtggtgtgtcatacagagtcagccggagtgatcgccggggcgttcgttggcattctgttattcctgatactggtcggacttctgatcttctttctgaagcgaagaaataagaagaaacagcaaaaacctgaattacgggacctggttttttctagtcccggagatataccagctgaagacttcgcagaccatgtgcgaaaaaatgaacgcgactcaaattgcggattcgcagataagtatcagcagctgtcgcttgtaggtcacagccagagtcagatggttgcctcagcatccgagaataatgctaagaaccgatatagaaatgtgctgccttacgactggtctagagttccactaaagcctattcatgaggagccaggctcagattacatcaacgcctctttcatgccaggactttggtctccacaagagttcattgccacccagggcccactcccccagaccgtgggcgacttttggcggctggtatgggagcaacagagccacacactcgttatgcttactaattgcatggaagccggccgagtgaagtgtgagcactattggcccctggacagccaaccctgtacacacgggcacctcagggtgaccttggtcggagaggaggtgatggaaaactggaccgtaagggaactcttactgctccaggtcgaggaacagaaaacgttgagtgtccggcagttccactatcaggcctggcccgaccacggcgtaccatcttctcccgacacactcttggccttttggaggatgcttcgacagtggttagaccagaccatggaaggaggccctccaatagtccattgctccgcaggcgtaggaaggacgggaacgctcatagcccttgacgtccttctgaggcagcttcagagcgagggtctgctcggtcctttcagcttcgtccgcaagatgagggaatcccgccccctcatggtgcagaccgaagcccagtatgtgttccttcatcaatgcattctgagatttctgcaacagagcgctcaggctcccgccgagaaggaggtcccctatgaagatgtggagaacctaatttatgagaatgtagctgcgatccaggctcataaactggaggtgtag

SEQ ID NO: 61222 - DNA, 2814 bp, Artificial Sequence
  derived and/or modified sequence
atggccggggccggcggcggcctgggcgtgtggggcaacctggtgctgctgggcctgtgctcctggacaggagcccgggccccagcccccaaccctggcaggaacctgactgtggagacccagaccaccagcagcatcagcctgtcctgggaggtgcctgatggcctggacagccagaacagcaactactgggtgcagtgcacaggagatggcggcaccacagagaccaggaacaccacagccaccaacgtgacagtggatggcctgggccctggcagcctgtacacctgcagcgtgtgggtggagaaggatggagtgaacagctctgtgggcaccgtgaccacagccacagcccccaaccctgtgaggaacctgactgtggaggcccagaccaacagcagcatcgccctgacctgggaggtgcctgatggccctgacccccagaacagcacctacggcgtggagtacacaggagatggcggccgggccggcaccaggagcacagcccacaccaacatcaccgtggaccggctggagcccggctgcctgtatgtgttttctgtgtgggtgggcaagaatggcatcaacagcagccgggagaccagaaatgccaccacagcccccaaccctgtgaggaacctgcacatggagacccagaccaacagcagcatcgccctgtgctgggaggtgcctgatggcccctacccccaggactacacctactgggtggagtacacaggagatggcggcggcacagagaccaggaacaccaccaacacctctgtgacagctgagcggctggagcccggcaccctgtacaccttctctgtgtgggccgagaagaatggagcccggggcagccggcagaatgtgtccatcagcacagtgcccaatgctgtgaccagcctgagcaagcaggactggaccaacagcaccatcgccctgcgctggacagccccccagggccctggccagagcagctacagctactgggtgtcctgggtgcgggagggcatgacagaccccaggacccagagcaccagcggcacagacatcaccctgaaggagctggaggccggcagcctgtaccacctgactgtgtgggccgagagaaatgaggtgcggggctacaacagcaccctgacagctgccacagccccaaatgaggtgacagacctgcagaatgagacccagaccaagaacagcgtgatgctgtggtggaaggcccctggggacccccacagccagctgtatgtgtactgggtgcagtgggccagcaagggccacccccggcggggccaggacccccaggccaactgggtgaaccagaccagcaggaccaatgagacctggtacaaggtggaggccctggagcccggcaccctgtacaacttcaccgtgtgggccgagagaaatgatgtggccagcagcacccagagcctgtgtgccagcacctacccagacacagtgaccatcaccagctgtgtgtccaccagcgctggctacggcgtgaacctgatctggagctgcccccagggcggctatgaggcctttgagctggaggtgggcggccagaggggcagccaggacaggagcagctgtggggaggccgtgtctgtgctgggcctgggccctgcccggagctacccagccaccatcaccaccatctgggatggcatgaaggtggtgagccacagcgtggtgtgccacacagaatctgctggggtgattgctggggcctttgtgggcatcctgctcttcctgatcctggtgggcctgctgatcttcttcctgaagagaagaaacaagaagaagcagcagaagccagagctgcgggacctggtgttcagcagccctggggacatcccagcagaagattttgctgaccacgtgaggaagaatgaaagagacagcaactgtggctttgctgacaagtaccagcagctgagcctggtgggccacagccagagccagatggtggccagcgcctctgaaaataatgccaagaaccgctacagaaatgtgctgccctatgactggagccgggtgcccctgaagcccatccacgaggagcccggcagtgactacatcaatgccagcttcatgcctggcctgtggagcccccaggagttcatcgccacccagggccccctgccccagacagtgggggacttctggaggctggtgtgggagcagcagagccacaccctggtgatgctgaccaactgcatggaggccggccgggtgaagtgtgagcactactggcccctggacagccagccctgcacccacggccacctgcgggtgaccctggtgggggaggaggtgatggagaactggacagtgcgggagctgctgctgctgcaggtggaggagcagaagaccctgtctgtgcggcagttccactaccaggcctggccagaccatggagtgcccagcagcccagacaccctgctggccttctggaggatgctgcggcagtggctggaccagaccatggagggcggcccccccatcgtgcactgcagcgctggggtgggccgcacaggcaccctgattgccctggatgtgctgctgcggcagctgcagagcgagggcctgctgggccccttctcctttgtgaggaagatgagggagagccggcccctgatggtgcagacagaggcccagtatgtgttcctgcaccagtgcatcctgcgcttcctgcagcagagcgcccaggccccagctgagaaggaggtgccctatgaagatgtggagaacctgatctatgaaaatgtggccgccatccaggcccacaagctggaggtgtag

SEQ ID NO: 61223 - DNA, 2814 bp, Artificial Sequence
  derived and/or modified sequence
atggccggcgccggcggcggcctgggcgtgtggggcaacctggtgcttcttgggctttgttcttggactggcgcccgtgcacctgcgcctaacccaggcaggaatttgacagtcgagacgcagacaacctcttctatctccctcagctgggaagtacccgacggactggactctcagaattccaattattgggtgcagtgcaccggtgacggaggaacaacagagactagaaacacgactgctactaacgttaccgtcgatggactcggcccgggcagcctatacacatgttccgtctgggtagagaaggacggcgtgaattcaagtgtgggcaccgtcaccaccgccaccgcacctaatcccgtgcggaatttaactgtcgaagctcagacaaatagctcaattgctctgacctgggaagttcctgacggaccggatccccagaatagtacatatggggtagagtacactggcgatggaggtagggcaggtactcgcagtacggcacataccaacatcaccgtggatcgtcttgagccaggatgcctgtacgtgttctccgtgtgggtcggcaagaacggtattaattccagccgcgaaacacggaatgccacaaccgcacccaatcctgtgcgaaaccttcatatggagacccagactaattcctccattgcactgtgctgggaggtgccggacggaccctacccccaagattatacttactgggttgaatatactggggatgggggcggaacagaaactcggaacacaacaaatactagcgttactgccgaacggctggagcccgggaccttatatacgttcagcgtctgggcagagaaaaacggtgcaagaggtagtagacagaacgtctctatctcgaccgtgccaaacgccgtcacatctcttagcaagcaggactggacaaactcgacaatagccttgagatggactgcgcctcagggacccggacagagctcttattcctattgggtttcctgggttagagagggaatgaccgatcctagaactcagtccacgtctggcaccgacatcacgctgaaagaacttgaagcgggctccctttaccatcttactgtatgggcggagcgcaatgaagttagggggtataattccactcttactgccgcaaccgcaccaaacgaggttaccgacctccaaaatgagacacaaaccaagaattccgtaatgctgtggtggaaagcccccggcgatccacactcacagctgtacgtctattgggtgcaatgggcctcaaaagggcaccccagaaggggacaggatcctcaggccaattgggtgaaccagacctctcggacaaacgaaacctggtacaaagtcgaagcgctcgagcccgggacactctataacttcaccgtgtgggcggaaagaaatgacgtggcctctagcacacagtccttatgtgctagtacatatccagatacggtgacaatcacatcttgtgtttctacatctgcgggctatggagtcaacctgatatggtcctgccctcaaggaggatatgaagcctttgaacttgaagtcgggggccaacggggatcccaggacagaagctcgtgcggcgaggcagtgtctgtcctgggactaggacccgcgaggtcgtacccagcgactataaccaccatctgggacggcatgaaagtcgtgagccacagcgtcgtctgtcacacagaatctgcgggcgtcatcgcaggtgctttcgtagggatactacttttcctcatcctggtggggttgctgatcttctttcttaagaggcgaaacaaaaagaagcagcagaagccagagctaagggacctggtgtttagcagtcctggagatatccctgccgaggactttgcagaccacgtcaggaaaaatgaaagggatagtaactgcggctttgcagataagtatcagcaactcagtttggtcggtcactctcagtcccagatggtggccagtgctagcgaaaataacgcaaagaacagataccggaacgtattaccatatgactggagtcgagtgcccttgaagcctatccatgaagagcccggctcagactatatcaacgcgtccttcatgcccggtctgtggtctccgcaggagttcatcgcaactcaggggcccctcccacagacagtcggagacttttggcgtctcgtttgggagcagcagtcccacacccttgtgatgctcacgaactgcatggaggctgggcgggtgaaatgtgaacattattggccactcgactcacagccttgtacacatgggcacctgagggtgaccttggtcggagaggaggtgatggaaaactggactgtcagagaactattgctcttacaggtagaggagcagaagacactgtccgtgagacaattccactaccaggcctggcccgaccacggcgtgccctcctcacccgacacactcctggcattctggcgcatgctgcgccaatggctggatcagaccatggagggcggaccccctatagttcactgttctgcaggggtggggcgaacaggtacgctcatcgccctcgatgttctgcttcggcagctccaaagcgagggtttactcggcccatttagtttcgtgaggaagatgcgcgaatcgcgccccttgatggtgcagactgaagcccagtacgtttttctgcaccagtgtattctacgctttctacagcagagtgcgcaagcccctgcagagaaagaggttccctacgaggacgtcgaaaacctcatatacgaaaacgtcgccgccatacaggcccacaaactggaagtttag

SEQ ID NO: 61224 - DNA, 2814 bp, Artificial Sequence
  derived and/or modified sequence
atggccggtgctggcggtgggctgggggtttggggcaacctggttctactggggctttgttcctggactggggcaagggcacccgcaccgaaccccggaaggaacctcaccgtcgaaacacaaaccaccagtagcattagcctatcatgggaggtccccgacgggctcgactcccagaatagtaattattgggtccaatgcacaggtgatggaggcacaacggaaacaagaaatacaacagcgactaacgtcaccgtcgatgggctgggcccaggatcactgtacacctgttctgtctgggtggaaaaggatggagttaactctagtgtgggtacagtcactactgcaactgctccgaatcctgttcgcaaccttaccgtcgaggcacagacaaactcgtctatagcgcttacctgggaggtgcccgacggaccagacccacaaaatagcacatatggcgtggagtatacaggcgacggcggtcgggctggcacgcgctcgacagcacacacaaacattaccgtggaccggcttgagcccggatgcctttacgtgttctcggtctgggttggtaaaaacggaatcaattcctctcgggagactagaaacgccacgactgcccctaaccctgtacgaaatctccatatggagacccagaccaacagtagtatcgccttatgctgggaggtcccggatggcccatatccacaggactacacatactgggtcgaatacacaggggacggcggaggaacagagacccgcaacaccacaaatacgagtgtgaccgccgaacgactggagcctgggacgttgtacaccttctccgtttgggcagaaaaaaacggcgcaaggggctctcgacaaaatgtttcaatttcaactgtacccaatgcagttacctcactctccaaacaggattggacgaacagtactatcgccttaagatggacagccccacaagggccaggacaatcaagttactcctactgggtgtcatgggtgcgggagggcatgaccgaccctcgcactcagtctaccagtggcactgacattacactgaaggagctcgaggccggtagcctctatcatctgacggtgtgggccgaacgaaacgaagtccgtggttataatagcactctgactgccgcaactgctcctaatgaggtgactgatctgcagaacgagacccaaaccaaaaactccgtcatgctgtggtggaaagcgcctggggaccctcattcccagctctatgtgtactgggtgcagtgggctagcaagggccacccgaggaggggtcaagatccccaggccaattgggtgaaccaaaccagtaggaccaacgagacctggtacaaggtagaggcgctggagcccggaacactgtataacttcaccgtttgggcggagaggaacgatgtggcttcctccacacaatccctctgtgccagcacgtatccagacacagtgaccattacgagctgtgtatctacctccgctggctacggcgtaaatctaatttggagctgcccgcagggcggatatgaggctttcgagctggaggttggtggccagcggggaagtcaggatagatccagttgtggagaggccgtgagtgtcctcggcttgggacccgcacggagttaccccgcaacgatcacaactatttgggacggaatgaaagttgtatctcactcagtggtgtgtcacaccgaaagtgcaggggtcatcgcaggagcttttgtgggcatcctgctgtttttgatcctggtgggacttctcattttttttctgaaacggagaaataagaaaaagcagcagaagccggagttgagggatctcgtgttttcatctcccggtgacatcccagctgaagactttgcggaccatgtgcgcaagaatgagagagattccaattgcggatttgccgacaaataccagcaactcagtctggttgggcactcccaaagccagatggtagcctcagccagcgagaataatgccaaaaaccggtacagaaacgttctcccgtatgattggtcccgcgtaccactgaagccaattcatgaagagccgggttcagattacattaacgccagttttatgcctggattgtggtcgccgcaggagttcattgctacccaaggacctcttccgcagacagtaggcgacttttggcggctcgtttgggagcaacagtcacacacactggttatgctcacaaactgtatggaggccggacgggtgaagtgcgaacactactggcctcttgacagccagccctgtacacatggccacctgcgcgtaactttagtcggggaggaggtcatggagaactggaccgtgcgcgaactgcttctgctgcaagtggaggaacaaaagaccctcagcgtaaggcaatttcactatcaagcatggccagatcatggtgtgccttcctctcctgatactctgttggccttttggaggatgctaagacagtggctggaccagacaatggaagggggtccacccatcgtccactgctcagccggtgtagggagaaccggcaccctgatagcccttgacgtccttctcagacagctgcagagcgaaggcctcctgggcccattctctttcgtgagaaaaatgcgcgagtctcggccactcatggtgcagactgaggcccagtacgtatttcttcatcagtgtattctccgtttcctgcagcagagcgcgcaggcccctgcggagaaagaagtaccatatgaagacgtcgagaatttaatctatgagaatgtagctgctattcaggcccacaaacttgaggtgtag

SEQ ID NO: 61225 - DNA, 3391 bp, Artificial Sequence
  derived and/or modified sequence
ttcttgagtgtaaagtccagcaggtggaaggactaggcctgggactcctgggtccccggcagtgtctggaggcatggctggggctggcgggggcctcggggtctgggggaacctggtgctgctgggcctgtgcagctggacaggggccagggcgcctgcccccaacccagggaggaacctgacagtggagactcagaccaccagctccatctccctgagctgggaggtccccgatggcctagactcacagaactccaactactgggttcagtgtactggagacggcggcacaacagagactcgaaacacaacagccaccaacgtcaccgtggatggccttggacccgggtcattgtatacgtgttctgtgtgggtggagaaagacggagtaaatagctctgtggggactgtcactactgccacagctcccaacccagtgagaaacctgacagtggaggctcagaccaacagctccatcgccctgacctgggaggtccccgatggcccagacccacagaactccacctacggggttgagtacactggagatggtggcagagcagggactcgaagcacagcacacaccaacatcaccgtggatagacttgaacccgggtgtttgtatgtgttttccgtgtgggtggggaagaatggaatcaacagctcccgggagactcgaaatgccaccacagcccccaacccagtgagaaacctccatatggagactcagaccaacagctccatcgccctatgctgggaagtccccgatggcccataccctcaggactacacctactgggtagagtacactggagacggtggtggcacagagacccgaaacacaacaaataccagtgtgacagctgagagacttgagcccggaaccttgtacacattctctgtatgggcagaaaaaaatggagcacgtggctccaggcagaatgtcagcatctccacagtccccaacgcagtgacaagcctcagcaagcaggactggaccaacagcaccattgctttgcgctggacagctccccagggcccaggccagtcttcctacagctactgggtctcatgggtcagggaaggcatgactgaccccaggacccaaagcacctcaggtactgacatcaccctaaaggaactggaagctggcagcctgtaccacctcaccgtctgggccgagaggaatgaggtcagaggctataacagcaccctcactgcagccactgctcccaatgaggtcacagatctccagaatgaaactcagactaagaactcagtcatgctgtggtggaaggcccctggagacccccactctcagttgtacgtatactgggtccagtgggccagcaagggacatccccggagggggcaagatccccaagcgaattgggtcaaccagaccagcaggaccaatgagacgtggtacaaagtggaggccctggaacccgggacgttgtacaatttcaccgtgtgggcagagaggaatgacgtagccagttccacgcagagcctctgtgcgtccacatacccagacacagtcaccatcacttcctgtgtcagcacctcagcgggctatggagtcaacttgatctggtcctgcccccagggaggctacgaggcctttgagttggaggtgggaggacagcggggctcccaggacagatcttcatgtggggaggctgtgtctgtgttgggtctcgggccggctcggtcctacccagccaccatcacgaccatctgggacggaatgaaggtcgtgtctcactctgtggtctgccacaccgagagtgcaggggtcattgccggagcctttgtgggcatcctcctgtttctcatcctcgtgggcctgctgattttcttcctgaagaggaggaataagaagaagcagcagaaaccagaactcagggatctggtctttagctccccaggggacatcccagctgaagacttcgctgaccacgtcaggaagaatgagagggacagcaactgtggttttgcagacaagtaccagcaactctccctggtgggccacagccagtctcagatggtggcttcggcttcagagaacaacgccaagaaccgctacagaaatgtgctgccctatgactggtcccgggtgcccctgaagcccatccatgaggagccaggctctgactacatcaatgccagcttcatgcccggtctctggagcccccaggagttcattgcaacccagggtcccctgccacagacagtgggtgacttctggcgcctggtgtgggaacagcagagccacaccctggtcatgctgaccaactgcatggaggccggccgggtgaagtgtgagcattactggcctctggactcgcagccctgcacccatgggcacctgcgggtaaccctggtaggtgaggaagtgatggagaactggacggtgcgggaactgctgctcctccaggtggaggagcagaagacactgtctgtgcgccaattccactaccaggcctggccggatcacggcgttccctcctccccagacaccttgctggctttctggaggatgcttcggcagtggctggatcagaccatggagggaggcccacccattgtgcactgcagtgctggcgtgggtcgcacaggaaccctcattgccctggacgtcctgctccggcagctgcagtccgagggtctccttgggcccttcagctttgtaaggaagatgagagagagtcggccgttgatggtgcagactgaggctcagtacgtattcctgcatcagtgcatcctgcggttcctccaacagtcagcccaggccccagccgagaaggaagtcccgtatgaggatgtcgaaaacctcatctacgagaacgtggccgccatccaggcccacaagttggaggtctaagtgacgagggggctgggtcggcagcccaggcatcctcaagctctggacacccacttgagcccagattcctggaagagcagagggctgggctcccagactcctgggtgctgtgggaggagggggctggtatcccaaactctggtttccccaggagagagtggtctggtgggcttcagatgagtcctatgggagctggggatctggattcctggttccctgaaggaggagagggatgatagcttggattccctaggtctttccaggatgcagaaagaaacaggctggggcctggattctgaggcaggaaggaatttgggtctggagttctggctacttgaggaccaaaggcaggaaggatcctgccttgattttacttcagaaaccaaatcagtcttctataatctggggtcggagggagtccctgtgcccaaggtctctctgcaccccaccatccacatgtatttttccttctatcccataatttattaaatcactgttctcccc

SEQ ID NO: 61226 - DNA, 2814 bp, Artificial Sequence
  derived and/or modified sequence
atggccggcgccggcggcggcctgggcgtgtggggcaacctggtgctgctgggcctgtgcagctggaccggcgccagagcccccgcccccaaccccggcagaaacctgaccgtggagacccagaccaccagcagcatcagcctgagctgggaggtgcccgacggcctggacagccagaacagcaactactgggtgcagtgcaccggcgacggcggcaccaccgagaccagaaacaccaccgccaccaacgtgaccgtggacggcctgggccccggcagcctgtacacctgcagcgtgtgggtggagaaggacggcgtgaacagcagcgtgggcaccgtgaccaccgccaccgcccccaaccccgtgagaaacctgaccgtggaggcccagaccaacagcagcatcgccctgacctgggaggtgcccgacggccccgacccccagaacagcacctacggcgtggagtacaccggcgacggcggcagagccggcaccagaagcaccgcccacaccaacatcaccgtggacagactggagcccggctgcctgtacgtgttcagcgtgtgggtgggcaagaacggcatcaacagcagcagagagaccagaaacgccaccaccgcccccaaccccgtgagaaacctgcacatggagacccagaccaacagcagcatcgccctgtgctgggaggtgcccgacggcccctacccccaggactacacctactgggtggagtacaccggcgacggcggcggcaccgagaccagaaacaccaccaacaccagcgtgaccgccgagagactggagcccggcaccctgtacaccttcagcgtgtgggccgagaagaacggcgccagaggcagcagacagaacgtgagcatcagcaccgtgcccaacgccgtgaccagcctgagcaagcaggactggaccaacagcaccatcgccctgagatggaccgccccccagggccccggccagagcagctacagctactgggtgagctgggtgagagagggcatgaccgaccccagaacccagagcaccagcggcaccgacatcaccctgaaggagctggaggccggcagcctgtaccacctgaccgtgtgggccgagagaaacgaggtgagaggctacaacagcaccctgaccgccgccaccgcccccaacgaggtgaccgacctgcagaacgagacccagaccaagaacagcgtgatgctgtggtggaaggcccccggcgacccccacagccagctgtacgtgtactgggtgcagtgggccagcaagggccaccccagaagaggccaggacccccaggccaactgggtgaaccagaccagcagaaccaacgagacctggtacaaggtggaggccctggagcccggcaccctgtacaacttcaccgtgtgggccgagagaaacgacgtggccagcagcacccagagcctgtgcgccagcacctaccccgacaccgtgaccatcaccagctgcgtgagcaccagcgccggctacggcgtgaacctgatctggagctgcccccagggcggctacgaggccttcgagctggaggtgggcggccagagaggcagccaggacagaagcagctgcggcgaggccgtgagcgtgctgggcctgggccccgccagaagctaccccgccaccatcaccaccatctgggacggcatgaaggtggtgagccacagcgtggtgtgccacaccgagagcgccggcgtgatcgccggcgccttcgtgggcatcctgctgttcctgatcctggtgggcctgctgatcttcttcctgaagagaagaaacaagaagaagcagcagaagcccgagctgagagacctggtgttcagcagccccggcgacatccccgccgaggacttcgccgaccacgtgagaaagaacgagagagacagcaactgcggcttcgccgacaagtaccagcagctgagcctggtgggccacagccagagccagatggtggccagcgccagcgagaacaacgccaagaacagatacagaaacgtgctgccctacgactggagcagagtgcccctgaagcccatccacgaggagcccggcagcgactacatcaacgccagcttcatgcccggcctgtggagcccccaggagttcatcgccacccagggccccctgccccagaccgtgggcgacttctggagactggtgtgggagcagcagagccacaccctggtgatgctgaccaactgcatggaggccggcagagtgaagtgcgagcactactggcccctggacagccagccctgcacccacggccacctgagagtgaccctggtgggcgaggaggtgatggagaactggaccgtgagagagctgctgctgctgcaggtggaggagcagaagaccctgagcgtgagacagttccactaccaggcctggcccgaccacggcgtgcccagcagccccgacaccctgctggccttctggagaatgctgagacagtggctggaccagaccatggagggcggcccccccatcgtgcactgcagcgccggcgtgggcagaaccggcaccctgatcgccctggacgtgctgctgagacagctgcagagcgagggcctgctgggccccttcagcttcgtgagaaagatgagagagagcagacccctgatggtgcagaccgaggcccagtacgtgttcctgcaccagtgcatcctgagattcctgcagcagagcgcccaggcccccgccgagaaggaggtgccctacgaggacgtggagaacctgatctacgagaacgtggccgccatccaggcccacaagctggaggtgtag

SEQ ID NO: 61227 - protein, 399 aa, Artificial Sequence
  derived and/or modified sequence
MEFPLAQICPQGSHEAPIPTFSTFQITDMTRRSCQNLGYTAASPQAPEAASNTGNAERAEEVPGEGSLFLQAETRAWFQKTQAHWLLQHGAAPAWFHGFITRRVRPPLSVTHREAERLLEPKPQGCYLVRFSESAVTFVLTYRSRTCCRHFLLAQLRDGRHVVLGEDSAHARLQDLLLHYTAHPLSPYGETLTEPLARQTPEPAGLSLRTEESNFGSKSQDPNPQYSPIIKQGQAPVPMQKEGAGEKEPSQLLRPKPPIPAKPQLPPEVYTIPVPRHRPAPRPKPSNPIYNEPDEPIAFYAMGRGSPGEAPSNIYVEVEDEGLPATLGHPVLRKSWSRPVPGGQNTGGSQLHSENSVIGQGPPLPHQPPPAWRHTLPHNLSRQVLQDRGQAWLPLGPPQ

SEQ ID NO: 61228 - DNA, 1200 bp, Artificial Sequence
  derived and/or modified sequence
atggagttccccctggcccagatctgcccccagggcagccacgaggcccccatccccaccttcagcaccttccagatcaccgacatgaccagaagaagctgccagaacctgggctacaccgccgccagcccccaggcccccgaggccgccagcaacaccggcaacgccgagagagccgaggaggtgcccggcgagggcagcctgttcctgcaggccgagaccagagcctggttccagaagacccaggcccactggctgctgcagcacggcgccgcccccgcctggttccacggcttcatcaccagaagagtgagaccccccctgagcgtgacccacagagaggccgagagactgctggagcccaagccccagggctgctacctggtgagattcagcgagagcgccgtgaccttcgtgctgacctacagaagcagaacctgctgcagacacttcctgctggcccagctgagagacggcagacacgtggtgctgggcgaggacagcgcccacgccagactgcaggacctgctgctgcactacaccgcccaccccctgagcccctacggcgagaccctgaccgagcccctggccagacagacccccgagcccgccggcctgagcctgagaaccgaggagagcaacttcggcagcaagagccaggaccccaacccccagtacagccccatcatcaagcagggccaggcccccgtgcccatgcagaaggagggcgccggcgagaaggagcccagccagctgctgagacccaagccccccatccccgccaagccccagctgccccccgaggtgtacaccatccccgtgcccagacacagacccgcccccagacccaagcccagcaaccccatctacaacgagcccgacgagcccatcgccttctacgccatgggcagaggcagccccggcgaggcccccagcaacatctacgtggaggtggaggacgagggcctgcccgccaccctgggccaccccgtgctgagaaagagctggagcagacccgtgcccggcggccagaacaccggcggcagccagctgcacagcgagaacagcgtgatcggccagggcccccccctgccccaccagcccccccccgcctggagacacaccctgccccacaacctgagcagacaggtgctgcaggacagaggccaggcctggctgcccctgggccccccccagtag

SEQ ID NO: 61229 - DNA, 1200 bp, Artificial Sequence
  derived and/or modified sequence
atggagttcccactcgcccagatctgtccccaaggctcccacgaggcgccaatacctacatttagcactttccaaatcacagatatgacgagaagatcctgtcagaacttaggatacacagctgctagtccccaggcaccagaagctgcttcaaataccggaaacgccgagagggccgaagaagtccctggcgagggctccttatttctgcaggctgaaacccgagcatggtttcagaaaactcaggcacactggctccttcagcatggggctgcacccgcctggtttcacgggttcatcaccagacgcgtgcggcctccgctttcagtgacacacagagaggctgagcgcctcttagaacctaagccccagggatgctacttggtgagattttccgaaagtgctgtgaccttcgtcctgacctacagatcccgaacatgttgtcgacatttccttctggcacagctgcgggacggccgtcatgtggtcctgggcgaagattctgctcatgcccgccttcaggacctcctcttgcactatacagctcatccgctgagcccatatggagagaccctgacagagcccctcgccagacagaccccagagcccgccggcctgtcgctccggaccgaagagagcaactttggctccaagagtcaggacccgaatcctcaatacagtcctattatcaaacagggtcaggccccagtaccaatgcaaaaagaaggggccggtgagaaggaacccagccagctgctcaggcctaagccacccatccccgcaaaacctcagctcccgcctgaggtgtataccatacccgtaccacggcaccgcccggcccctagacccaagccaagcaacccaatatacaacgaacccgatgagcccatcgccttttacgcaatgggaagaggttctccaggcgaagcgccgtctaatatctatgttgaggtggaagatgaaggcctccctgccacgttggggcacccagttctgagaaagtcttggtctcgcccggttcctggcggtcagaatacaggtggctcccaattgcacagcgaaaattcagtgattggacagggtccccccctgccacatcaacctcctcccgcatggcggcacacgctcccccataatctgtctcgccaggttctccaagacaggggtcaggcctggcttcccctgggacctccccaatag

SEQ ID NO: 61230 - DNA, 1200 bp, Artificial Sequence
  derived and/or modified sequence
atggagttccccctggcccagatctgcccccagggcagccatgaggcccccatccccaccttcagcaccttccagatcacagacatgaccaggaggagctgccagaacctgggctacacagctgccagcccccaggcccctgaggccgccagcaacacaggaaatgctgagagagctgaggaggtgcctggagagggcagcctcttcctgcaggccgagacccgggcctggttccagaagacccaggcccactggctgctgcagcacggggccgccccagcctggttccacggcttcatcacccggcgggtgcggccccccctgtctgtgacccaccgggaggccgagcggctgctggagcccaagccccagggctgctacctggtgcgcttcagcgagagcgctgtgacctttgtgctgacctaccgcagcaggacctgctgccgccacttcctgctggcccagctgagagatggaagacatgtggtgctgggggaggacagcgcccacgcccggctgcaggacctgctgctgcactacacagcccaccccctgagcccctacggggagaccctgacagagcccctggcccggcagaccccagagcccgccggcctgagcctgaggacagaggagagcaactttggcagcaagagccaggaccccaacccccagtacagccccatcatcaagcagggccaggcccctgtgcccatgcagaaggagggcgctggggagaaggagcccagccagctgctgcggcccaagccacccatcccagccaagccccagctgcccccagaggtgtacaccatccctgtgcccaggcacaggcctgccccccggcccaagcccagcaaccccatctacaatgaaccagatgagcccatcgccttctacgccatgggccggggcagccctggagaggcccccagcaacatctacgtggaggtggaggatgagggcctgcctgccaccctgggccaccctgtgctgaggaagtcctggagcaggcctgtgcctgggggccagaacacaggaggcagccagctgcacagcgagaacagcgtcatcggccagggcccccccctgccccaccagcccccaccagcctggaggcacaccctgccccacaacctgagccggcaggtgctgcaggaccggggccaggcctggctgcccctgggccccccccagtag

SEQ ID NO: 61231 - DNA, 1200 bp, Artificial Sequence
  derived and/or modified sequence
atggagttccccctggcccagatctgcccccagggcagccacgaggctcccattcctaccttcagtaccttccaaattacggacatgacgcgccggagttgtcaaaacctcggatacaccgctgcatccccccaagcccccgaggcagcaagcaatacaggtaatgcagagcgagcggaagaggtacccggagaaggcagcctttttttgcaagccgagactcgcgcatggttccagaaaacccaggcccactggctgctgcagcatggggctgcgcccgcctggtttcacggcttcatcacaaggagagttcgaccacccctctctgtgacacaccgagaggccgagcggctgcttgagcccaaaccccagggatgctatctggtccgtttcagtgagtctgctgtcaccttcgtgctgacctacagaagtcgaacatgctgcagacactttctcctcgcccaactgagggatggcagacatgtggtgttaggtgaggattccgcacacgcacgcctgcaagatcttttactgcattacacagctcaccctttgagtccctatggtgagaccctgactgaaccactggcccgacaaacaccagagccggcaggtctgtccttgcggaccgaagagtctaattttgggtcaaagtcccaagaccctaacccccaatactcacctatcatcaaacagggccaggcccctgtccctatgcagaaagagggtgcaggcgagaaggagccgtcgcagctgctgcggcccaaaccaccaattccggctaagccacaattgcctcctgaagtttacaccattcccgtccctcgacatagaccagcgccccggccaaagccttctaatcccatatataatgagcctgacgagcctattgctttttatgctatggggcgaggttcaccgggcgaagccccaagcaacatttacgtggaggtagaggatgaggggctgccagccactctcgggcaccccgtgcttcggaagagttggtctagaccggtccctggggggcagaacacaggcggctctcagctccacagcgagaatagcgtcattgggcagggcccccccctaccgcatcaaccccctcccgcttggaggcacaccttgccacacaacttaagccgccaggtcctgcaagatagaggacaggcgtggcttcccctgggacccccacaatag

SEQ ID NO: 61232 - DNA, 1200 bp, Artificial Sequence
  derived and/or modified sequence
atggagttccccttagcccagatctgcccgcagggctcccatgaggctcctattcctaccttttcaacattccaaattactgacatgacccgacggtcttgccagaatctcggctacaccgctgcaagcccgcaggcccctgaagcggcatctaacacggggaatgccgagcgcgctgaggaggtgccgggagagggctctttgtttctacaagctgaaaccagggcatggttccaaaaaactcaggcgcattggcttttgcagcacggggcagctccagcttggttccatggctttattacgcgacgagtgcgaccccctctgtccgtgacccatcgggaggcggagaggctcctggagcctaaaccacagggttgctacctggtccggttcagcgagtctgcagtcacttttgtgttgacttaccgatctcgcacatgttgcaggcacttccttcttgcccaactccgagatggacgccacgtggtgctcggtgaagactccgcacacgcacgcttgcaagacctgttactgcactacacggctcaccccctgtcaccttatggggaaactctgacagagccactcgccagacagactccagaacctgccggtttgtccctgaggaccgaagaatccaatttcggaagcaaatcgcaggatcctaacccccagtattcacctattataaagcagggtcaagccccagtacctatgcagaaggagggggcaggcgaaaaggagccttcacagctgctaagaccaaagcctccaattccagcaaaaccacagttgcctcccgaggtttacacgataccagttccccgacaccgccctgcaccaagacctaagccatccaatcccatctacaacgagcctgatgagccaatcgcattctacgccatgggcagaggatcgccaggcgaagccccatccaacatctacgtggaggtggaagatgaaggtctaccagctactctggggcatccggtgcttagaaagagttggtcgcggcctgtgcccggtggccaaaacacaggaggcagtcaattgcattccgaaaacagtgttatcggccagggccctcctcttccgcatcagcctcctcctgcttggcgtcacactctcccccataatctgtcaaggcaagtcctgcaagaccggggtcaggcatggctgccattgggcccaccccaatag

SEQ ID NO: 61233 - DNA, 1673 bp, Artificial Sequence
  derived and/or modified sequence
agaactaaggctgtgggtaaggcgacatttcctgcccccggggccagggtgagaggagagatgatgagttgctgagtgtgcacacctttccggaacacatacacacaccctgctctgggatcccttgtgaggctgccctcatggagttccccctggcccagatatgtccccaagggagtcacgaagcccccatcccaaccttcagcaccttccagatcacagacatgacccgcaggagctgccagaacctgggctacactgcggcatctccccaggccccggaggctgcctccaacacagggaatgctgagagggcagaggaggtgcctggagaaggaagcctgttcctgcaggccgagacccgggcttggttccagaagacccaggcccactggctcctgcagcacggggcagcccctgcctggttccatggcttcatcacccggagggttcggccccctctctccgtcacccacagggaggcagagaggctgctggagcccaagcctcaggggtgctacttggtgcggttcagcgagagcgcggtgaccttcgtgctgacttacaggagccggacttgctgccgccacttcctgctggcccagctcagggacgggcgccacgtggtgctgggcgaggacagcgcccacgcgcggctgcaggacctgctgctgcactacaccgcgcacccgctcagcccctacggggagacgctcaccgagcccctcgcccgacagactcctgagcctgcaggactttccctgaggaccgaagaatcaaactttggaagcaaaagccaggacccaaacccccagtacagcccaatcatcaaacaggggcaagccccagtcccgatgcagaaagagggggccggggagaaggagccctcccagctgctcaggcccaagcctcccatccccgccaaacctcagctgcccccagaagtctacacaatccctgttccacgacaccgcccggccccacgccccaagccctccaatcctatctacaatgagcctgatgaacccatagctttctatgccatgggccggggcagccctggggaagcccccagcaacatctatgtggaagtggaagatgagggcctacccgccacccttgggcaccctgtcctacggaagagctggtccaggcctgtcccaggaggccagaatacaggtggctcccagctgcattctgagaactctgtgattgggcaaggccctcccctgccccaccagcccccacccgcctggagacacaccctcccccacaatctttctagacaggtgcttcaggacagaggacaggcatggcttccccttgggcctcctcagtaggcggtctggcctgacccccaacaaagaagcctggaggtcagagaagcaaatgcggagcctgctccctcctaagaagatcccaagaatccaatggctcagtccttggtgatctaagacagcaaagaagtgtgcaaggagggccctgttagctcccactgtcctggtttctcctcctggagtctaatttccttggccctctgagccttttgagtctgggccctggtccaatgctgctgttgtctgaggaatggtttggtgagaacagatgttagaacttgtttgttgattcttgtctggctaataaatcatcaccaactgccttctcctacaggg

SEQ ID NO: 61234 - protein, 371 aa, Artificial Sequence
  derived and/or modified sequence
MSPSTFQITDMTRRSCQNLGYTAASPQAPEAASNTGNAERAEEVPGEGSLFLQAETRAWFQKTQAHWLLQHGAAPAWFHGFITRREAERLLEPKPQGCYLVRFSESAVTFVLTYRSRTCCRHFLLAQLRDGRHVVLGEDSAHARLQDLLLHYTAHPLSPYGETLTEPLARQTPEPAGLSLRTEESNFGSKSQDPNPQYSPIIKQGQAPVPMQKEGAGEKEPSQLLRPKPPIPAKPQLPPEVYTIPVPRHRPAPRPKPSNPIYNEPDEPIAFYAMGRGSPGEAPSNIYVEVEDEGLPATLGHPVLRKSWSRPVPGGQNTGGSQLHSENSVIGQGPPLPHQPPPAWRHTLPHNLSRQVLQDRGQAWLPLGPPQ

SEQ ID NO: 61235 - DNA, 1116 bp, Artificial Sequence
  derived and/or modified sequence
atgagccccagcaccttccagatcaccgacatgaccagaagaagctgccagaacctgggctacaccgccgccagcccccaggcccccgaggccgccagcaacaccggcaacgccgagagagccgaggaggtgcccggcgagggcagcctgttcctgcaggccgagaccagagcctggttccagaagacccaggcccactggctgctgcagcacggcgccgcccccgcctggttccacggcttcatcaccagaagagaggccgagagactgctggagcccaagccccagggctgctacctggtgagattcagcgagagcgccgtgaccttcgtgctgacctacagaagcagaacctgctgcagacacttcctgctggcccagctgagagacggcagacacgtggtgctgggcgaggacagcgcccacgccagactgcaggacctgctgctgcactacaccgcccaccccctgagcccctacggcgagaccctgaccgagcccctggccagacagacccccgagcccgccggcctgagcctgagaaccgaggagagcaacttcggcagcaagagccaggaccccaacccccagtacagccccatcatcaagcagggccaggcccccgtgcccatgcagaaggagggcgccggcgagaaggagcccagccagctgctgagacccaagccccccatccccgccaagccccagctgccccccgaggtgtacaccatccccgtgcccagacacagacccgcccccagacccaagcccagcaaccccatctacaacgagcccgacgagcccatcgccttctacgccatgggcagaggcagccccggcgaggcccccagcaacatctacgtggaggtggaggacgagggcctgcccgccaccctgggccaccccgtgctgagaaagagctggagcagacccgtgcccggcggccagaacaccggcggcagccagctgcacagcgagaacagcgtgatcggccagggcccccccctgccccaccagcccccccccgcctggagacacaccctgccccacaacctgagcagacaggtgctgcaggacagaggccaggcctggctgcccctgggccccccccagtag

SEQ ID NO: 61236 - DNA, 1116 bp, Artificial Sequence
  derived and/or modified sequence
atgtcaccgtcaacgtttcagattaccgacatgacacgccggagttgccagaacttgggctacactgctgctagccctcaagcccctgaggccgcaagcaatactggcaacgccgagcgagccgaagaggttcctggcgaagggtcattgttcctgcaagccgagactagggcttggttccagaagacccaggctcactggctcttgcagcatggcgccgctcctgcttggtttcacggctttatcaccagacgggaggctgaaaggctgctggaacccaagccacaaggctgctatctcgtgcggttctcagaatcagctgtgacttttgtgctcacatacagatcgcgcacctgctgtaggcacttccttctggcgcagctgcgcgacgggcgccatgtagtattaggtgaagactctgcccacgccagactgcaggacttgcttctacactatacggcccatcccctcagcccatacggtgaaaccctgaccgaacctctggcgcggcaaactccagagcctgctggactctcgctccgaacagaggaatcaaatttcgggagcaagtcccaggaccctaacccacagtactcacccattataaaacaagggcaagctcccgtgcccatgcagaaggagggagctggggagaaggaaccatcacaactgttaagaccaaagccccctatcccggccaagcctcagctcccgcccgaagtctataccataccagttcctcggcataggcccgccccccgaccgaagccaagcaatcccatttacaatgagcctgatgagccgatcgctttctacgctatgggcagaggttccccaggcgaagcaccctctaacatctacgttgaagtcgaggacgaggggctcccagcaaccctggggcaccctgttctgcgaaagagctggtctcgacccgtgccaggaggacagaacactggagggtctcagctgcacagtgagaatagtgtgatcgggcagggaccacctctgccccaccagcccccccccgcttggcggcatacgctacctcacaacttatctcgccaggttttacaggatcgaggtcaggcttggcttcctcttggaccacctcagtag

SEQ ID NO: 61237 - DNA, 1116 bp, Artificial Sequence
  derived and/or modified sequence
atgagccccagcaccttccagatcacagacatgaccaggaggagctgccagaacctgggctacacagctgccagcccccaggcccctgaggccgccagcaacacaggaaatgctgagagagctgaggaggtgcctggagagggcagcctcttcctgcaggccgagacccgggcctggttccagaagacccaggcccactggctgctgcagcacggggccgccccagcctggttccacggcttcatcacccggcgggaggccgagcggctgctggagcccaagccccagggctgctacctggtgcgcttcagcgagagcgctgtgacctttgtgctgacctaccgcagcaggacctgctgccgccacttcctgctggcccagctgagagatggaagacatgtggtgctgggggaggacagcgcccacgcccggctgcaggacctgctgctgcactacacagcccaccccctgagcccctacggggagaccctgacagagcccctggcccggcagaccccagagcccgccggcctgagcctgaggacagaggagagcaactttggcagcaagagccaggaccccaacccccagtacagccccatcatcaagcagggccaggcccctgtgcccatgcagaaggagggcgctggggagaaggagcccagccagctgctgcggcccaagccacccatcccagccaagccccagctgcccccagaggtgtacaccatccctgtgcccaggcacaggcctgccccccggcccaagcccagcaaccccatctacaatgaaccagatgagcccatcgccttctacgccatgggccggggcagccctggagaggcccccagcaacatctacgtggaggtggaggatgagggcctgcctgccaccctgggccaccctgtgctgaggaagtcctggagcaggcctgtgcctgggggccagaacacaggaggcagccagctgcacagcgagaacagcgtcatcggccagggcccccccctgccccaccagcccccaccagcctggaggcacaccctgccccacaacctgagccggcaggtgctgcaggaccggggccaggcctggctgcccctgggccccccccagtag

SEQ ID NO: 61238 - DNA, 1116 bp, Artificial Sequence
  derived and/or modified sequence
atgagccccagcaccttccagatcaccgacatgacccggcggagctgccagaatttgggttacacagcagcttcgcctcaggcgcccgaggcagcatccaataccggtaacgctgagcgggcggaggaggtgccgggagaagggtcgctcttcttacaggctgaaacaagagcttggtttcagaagacccaagcccattggttgctgcagcatggcgcagcccctgcctggttccacggattcataacgaggcgcgaagccgagagattgctggaaccaaaacctcagggctgctaccttgttagattttcagagtctgctgttacttttgtgctgacatatcggagcagaacatgctgcaggcacttcctgttggcccagcttagggatggccgccatgtggttctgggagaggatagcgcacacgcacgcctgcaggacctactgctccactacacagcgcaccccctctctccatacggcgaaaccttgacagaacctctggcacgacagacgcctgagccagccgggcttagtttacgcacagaggaaagtaattttggaagcaagagccaggaccctaatccacagtattctcccattatcaaacagggccaagcccctgtccctatgcagaaggagggcgccggcgaaaaggaacccagccagctactccgccctaaaccacctatccctgcaaagcctcaacttcctcctgaagtgtacaccatacccgtgccaaggcataggccagcccccagaccaaaaccaagcaatccgatttataacgagcctgacgaaccaattgcgttctatgcaatgggcagaggctctccaggtgaggcaccctctaacatctacgtcgaagtagaagacgaaggactgccagccaccctgggccatccagtgttaaggaaatcctggagccgtcccgttccaggtggccaaaatacggggggctctcagctgcattctgaaaattccgtgatcggacagggccctcccctgccccatcaacctcctcccgcttggcgacacacgctgccccacaacttgtcaagacaggtgctccaggatcggggacaggcctggcttccactggggccacctcagtag

SEQ ID NO: 61239 - DNA, 1116 bp, Artificial Sequence
  derived and/or modified sequence
atgtcaccctccaccttccagataaccgatatgactagaagatcgtgccagaatttgggctatactgccgcatcaccacaggcacctgaagcagcctccaataccgggaacgctgagcgcgcagaggaagtgccgggagagggctctcttttcctgcaggccgagaccagggcctggttccagaagactcaggcacactggctcctccagcacggggctgccccagcgtggtttcacggtttcataactagaagggaagcagagagactgttggagcctaaaccccagggatgctatctggttcgattttctgaatctgcagtgacctttgtgctcacatacaggtctaggacctgttgccgccactttctgttggcccagctgcgcgatgggcgtcacgtcgtgttgggggaggactccgcacacgccagattgcaggacctgctcctgcattacactgcacacccgctttcaccctatggagagaccttgactgagcccctagctcggcaaaccccagaaccggcaggactttcccttcgcaccgaagaatcaaattttggctctaaaagccaggatcccaatcctcagtatagccctataatcaagcagggtcaggcgccagtacctatgcagaaagagggggcaggcgagaaagaaccttcgcagttgctgcgccctaaacccccaattcccgcaaagcctcagctccctcccgaggtctatacaatacccgtgccaagacataggcccgctccccgtcccaagcccagcaatcctatttataacgaaccagatgaacccattgcgttctatgccatgggccgaggaagcccgggagaagccccttcaaacatttatgtcgaagttgaggatgaagggctccctgcaacccttgggcacccagtactgagaaagtcatggtcccgtccagtcccaggaggacagaacacaggtggaagccagctgcactcagagaattctgtgattggacagggcccaccgctgcctcaccaaccaccccctgcgtggcgccatacgctgccccataacctatccagacaggttctgcaagaccggggtcaggcttggctacccctggggcctccacagtag

SEQ ID NO: 61240 - DNA, 1599 bp, Artificial Sequence
  derived and/or modified sequence
gggtaaggcgacatttcctgcccccggggccagggtgagaggagagatgatgagttgctgagtgtgcacacctttccggaacacatacacacaccctgctctgggatcccttgtgaggctgccctcatggagttccccctggcccagatatgtccccaagcaccttccagatcacagacatgacccgcaggagctgccagaacctgggctacactgcggcatctccccaggccccggaggctgcctccaacacagggaatgctgagagggcagaggaggtgcctggagaaggaagcctgttcctgcaggccgagacccgggcttggttccagaagacccaggcccactggctcctgcagcacggggcagcccctgcctggttccatggcttcatcacccggagggaggcagagaggctgctggagcccaagcctcaggggtgctacttggtgcggttcagcgagagcgcggtgaccttcgtgctgacttacaggagccggacttgctgccgccacttcctgctggcccagctcagggacgggcgccacgtggtgctgggcgaggacagcgcccacgcgcggctgcaggacctgctgctgcactacaccgcgcacccgctcagcccctacggggagacgctcaccgagcccctcgcccgacagactcctgagcctgcaggactttccctgaggaccgaagaatcaaactttggaagcaaaagccaggacccaaacccccagtacagcccaatcatcaaacaggggcaagccccagtcccgatgcagaaagagggggccggggagaaggagccctcccagctgctcaggcccaagcctcccatccccgccaaacctcagctgcccccagaagtctacacaatccctgttccacgacaccgcccggccccacgccccaagccctccaatcctatctacaatgagcctgatgaacccatagctttctatgccatgggccggggcagccctggggaagcccccagcaacatctatgtggaagtggaagatgagggcctacccgccacccttgggcaccctgtcctacggaagagctggtccaggcctgtcccaggaggccagaatacaggtggctcccagctgcattctgagaactctgtgattgggcaaggccctcccctgccccaccagcccccacccgcctggagacacaccctcccccacaatctttctagacaggtgcttcaggacagaggacaggcatggcttccccttgggcctcctcagtaggcggtctggcctgacccccaacaaagaagcctggaggtcagagaagcaaatgcggagcctgctccctcctaagaagatcccaagaatccaatggctcagtccttggtgatctaagacagcaaagaagtgtgcaaggagggccctgttagctcccactgtcctggtttctcctcctggagtctaatttccttggccctctgagccttttgagtctgggccctggtccaatgctgctgttgtctgaggaatggtttggtgagaacagatgttagaacttgtttgttgattcttgtctggctaataaatcatcaccaactgccttctcctacaggga

SEQ ID NO: 61241 - protein, 506 aa, Artificial Sequence
  derived and/or modified sequence
MFTSKSNSVSPSPSLEQADSDALDISTKVQLYGVLWKRPFGRPSAKWSRRFFIIKESFLLYYSESEKKSFETNKYFNIHPKGVIPLGGCLVEPKEEPSMPYAMKISHQDFHGNILLAAESEFEQTQWLEMLQESGKVTWKNAQLGEAMIKSLEAQGLQLAKEKQEYLDKLMEETEELCLQREQREELERLNQVLEAEKQQFEEVVQELRMEQEQIKRELELTARCLKGVEQEKKELRHLTESLQQTLEELSIEKKKTLEMLEENENHLQTLANQSEQPPPSGGLHSNLRQIEEKMQQLLEEKLLAEKRMKENEERSRALEEEREFYSSQSQALQNSLQELTAEKQQAERELKAEVKVRMDLERRLREAEGALRSLEQGLNSKVRNKEKEERMRADVSHLKRFFEECIRNAELEAKMPVIMKNSVYIHKAATRRIKSCRFHRRRSSTSWNDMKPSQSFMTSQLDANNMEELKEVAKRLSRDQRFRESIYHIMATQPGAPSALSRGGK

SEQ ID NO: 61242 - DNA, 1521 bp, Artificial Sequence
  derived and/or modified sequence
atgttcaccagcaagagcaacagcgtgagccccagccccagcctggagcaggccgacagcgacgccctggacatcagcaccaaggtgcagctgtacggcgtgctgtggaagagacccttcggcagacccagcgccaagtggagcagaagattcttcatcatcaaggagagcttcctgctgtactacagcgagagcgagaagaagagcttcgagaccaacaagtacttcaacatccaccccaagggcgtgatccccctgggcggctgcctggtggagcccaaggaggagcccagcatgccctacgccatgaagatcagccaccaggacttccacggcaacatcctgctggccgccgagagcgagttcgagcagacccagtggctggagatgctgcaggagagcggcaaggtgacctggaagaacgcccagctgggcgaggccatgatcaagagcctggaggcccagggcctgcagctggccaaggagaagcaggagtacctggacaagctgatggaggagaccgaggagctgtgcctgcagagagagcagagagaggagctggagagactgaaccaggtgctggaggccgagaagcagcagttcgaggaggtggtgcaggagctgagaatggagcaggagcagatcaagagagagctggagctgaccgccagatgcctgaagggcgtggagcaggagaagaaggagctgagacacctgaccgagagcctgcagcagaccctggaggagctgagcatcgagaagaagaagaccctggagatgctggaggagaacgagaaccacctgcagaccctggccaaccagagcgagcagcccccccccagcggcggcctgcacagcaacctgagacagatcgaggagaagatgcagcagctgctggaggagaagctgctggccgagaagagaatgaaggagaacgaggagagaagcagagccctggaggaggagagagagttctacagcagccagagccaggccctgcagaacagcctgcaggagctgaccgccgagaagcagcaggccgagagagagctgaaggccgaggtgaaggtgagaatggacctggagagaagactgagagaggccgagggcgccctgagaagcctggagcagggcctgaacagcaaggtgagaaacaaggagaaggaggagagaatgagagccgacgtgagccacctgaagagattcttcgaggagtgcatcagaaacgccgagctggaggccaagatgcccgtgatcatgaagaacagcgtgtacatccacaaggccgccaccagaagaatcaagagctgcagattccacagaagaagaagcagcaccagctggaacgacatgaagcccagccagagcttcatgaccagccagctggacgccaacaacatggaggagctgaaggaggtggccaagagactgagcagagaccagagattcagagagagcatctaccacatcatggccacccagcccggcgcccccagcgccctgagcagaggcggcaagtag

SEQ ID NO: 61243 - DNA, 1521 bp, Artificial Sequence
  derived and/or modified sequence
atgttcactagtaaatcgaactcagtttctcctagcccttctctcgagcaagcagactcggatgctctggatatcagcactaaagtgcagttgtacggagtcctttggaaacgccctttcggccgcccatcagcaaaatggtcacgccggttctttattattaaagagtctttcctgctgtactactccgagtcagaaaagaagtcattcgagacgaacaagtacttcaatattcaccctaagggcgtgatcccactggggggatgccttgtagagcctaaggaggagccctcaatgccctatgccatgaagatcagccatcaagatttccatggtaatattctgctggcggccgagtccgagtttgagcagacccaatggctcgaaatgctgcaggagagtggcaaggttacatggaaaaatgcccagctgggtgaggccatgatcaagagcctggaggctcaggggctccaattggccaaagagaagcaagagtacctcgataaattgatggaagagacagaggagctttgtctgcagcgggagcaacgagaggagctggaacggctgaaccaggtgcttgaagcagaaaagcagcagttcgaggaggtggtgcaggagctcaggatggaacaggagcagattaagcgggagctggaattgaccgcacggtgcctgaagggggtagagcaggaaaaaaaagagctcagacacctgaccgagtccctccagcaaacgctggaagaactgtctattgaaaagaagaagactttggagatgctggaggagaacgagaatcatttgcagaccctcgcaaatcagtccgaacagcccccgccctcgggaggcttgcactctaaccttagacaaattgaggaaaaaatgcaacaactgctggaggagaagctgctggccgagaaaagaatgaaggagaacgaggagagatcccgcgcgctcgaggaggaacgggagttctattctagtcagtctcaggcgctgcagaactccttgcaggagctgactgccgaaaaacagcaggctgaacgcgaactaaaagctgaagtcaaggtgaggatggacctagaacgaagacttagggaagccgagggggccctgcgaagtctggaacaaggactgaattcaaaagtcagaaacaaagagaaggaagagcggatgcgagccgacgtgagtcatcttaagaggttcttcgaggaatgcatcaggaatgcggagctggaggcaaagatgccagtaatcatgaagaacagtgtgtacattcacaaggcggctacaagacgcattaaatcatgtcgcttccacaggagacgcagcagtacgtcatggaacgacatgaagccctcccagtcatttatgactagtcaactggacgctaacaatatggaagaactgaaggaggtggccaagcgactgagtcgcgaccagcgtttcagagaatcgatttatcacataatggcaacacaacctggggcgccatctgcccttagccgggggggcaagtag

SEQ ID NO: 61244 - DNA, 1521 bp, Artificial Sequence
  derived and/or modified sequence
atgttcaccagcaagagcaacagcgtgagccccagccccagcctggagcaggccgacagtgatgccctggacatcagcaccaaggtgcagctgtatggagtgctgtggaagaggcccttcggccggcccagcgccaagtggagccgccgcttcttcatcatcaaggagagcttcctgctgtactacagcgagagcgagaagaagagctttgagaccaacaagtacttcaacatccaccccaagggcgtcatccccctgggcggctgcctggtggagcccaaggaggagcccagcatgccctatgccatgaagatcagccaccaggacttccacggcaacatcctgctggccgctgagagcgagtttgagcagacccagtggctggagatgctgcaggagagcggcaaggtgacctggaagaatgcccagctgggggaggccatgatcaagagcctggaggcccagggcctgcagctggccaaggagaagcaggagtacctggacaagctgatggaggagacagaggagctgtgcctgcagcgggagcagcgggaggagctggagcggctgaaccaggtgctggaggccgagaagcagcagtttgaggaggtggtgcaggagctgaggatggagcaggagcagatcaagcgggagctggagctgacagcccgctgcctgaagggcgtggagcaggagaagaaggagctgcggcacctgacagagagcctgcagcagaccctggaggagctgagcattgagaagaagaagaccctggagatgctggaggagaatgaaaaccacctgcagaccctggccaaccagagcgagcagcccccaccttctgggggcctgcacagcaacctgcggcagatcgaggagaagatgcagcagctgctggaggagaagctgctggccgagaagaggatgaaggaaaatgaggagaggagccgggccctggaggaggagcgggagttctacagcagccagagccaggccctgcagaacagcctgcaggagctgacagctgagaagcagcaggccgagcgggagctgaaggccgaggtgaaggtgaggatggacctggagcggcggctgcgggaggccgagggcgccctgcggagcctggagcagggcctgaacagcaaggtgaggaacaaggagaaggaggagaggatgagagcagatgtgagccacctgaagcgcttctttgaggagtgcatcagaaatgctgagctggaggccaagatgcctgtgatcatgaagaacagcgtgtacatccacaaggccgccacccggcgcatcaagagctgccgcttccacagaagaagaagcagcacctcctggaatgacatgaagcccagccagagcttcatgaccagccagctggatgccaacaacatggaggagctgaaggaggtggccaagaggctgagccgggaccagcgcttccgggagagcatctaccacatcatggccacccagcccggggcccccagcgccctgagccggggcggcaagtag

SEQ ID NO: 61245 - DNA, 1521 bp, Artificial Sequence
  derived and/or modified sequence
atgttcaccagcaagagcaacagcgtgagccccagccccagcctggagcaggcggattccgacgcactcgacataagtacaaaagttcagctgtacggcgtgctttggaagagaccctttgggagaccatcggccaaatggagcagaagatttttcattattaaagagtccttcctcctttactattctgagagcgagaaaaagagtttcgagacgaacaaatacttcaacatccatcccaaaggcgttatccctctggggggttgcttggtcgagccgaaggaagagcccagtatgccttatgccatgaagatttcacaccaggacttccatggtaacattctcctggcagctgaatcagaatttgagcaaacccaatggctcgagatgctgcaagagtccgggaaggtcacatggaagaatgcccagctgggtgaagcaatgatcaaatcactcgaagcccagggcttgcagttggccaaggagaagcaggaatatttagacaagctcatggaagaaacagaggagctgtgtttacagcgcgagcagcgggaggaactggagcgcttaaatcaggtcctagaggcagaaaagcaacaattcgaggaggtcgtgcaggagctgcgcatggaacaggagcagattaagcgcgagttagagctgaccgcacggtgcctgaaaggtgtggaacaggaaaaaaaagaactgcgccacttgacggagtccctgcagcaaacgctcgaggagctctcaatagaaaagaagaaaacactggagatgctcgaggaaaacgaaaaccatctccagaccctagcgaaccagtcagagcagccaccacccagtgggggtcttcatagtaatttgaggcagatcgaggagaaaatgcagcagttgctggaagaaaaacttcttgcggagaagcggatgaaggagaatgaagaacgttccagagcactcgaagaggagcgcgagttctactcgtctcagagtcaggccctccagaatagtctccaggagctgaccgcagaaaagcagcaggcagagcgcgagctcaaggcagaagtgaaggttcggatggacctggagcgtagactgcgagaagcagagggggccctcagatcactggaacagggtttgaattccaaggtgcgcaacaaggagaaagaagagaggatgagggctgacgtgagtcacctgaagaggttcttcgaggaatgcattaggaatgccgagctcgaagccaagatgccggtcatcatgaagaattctgtgtatattcataaggccgcaactcgccgaatcaaaagttgccgatttcatcgtcggaggagttccacttcctggaatgacatgaaaccctcacaatctttcatgaccagccagttggatgctaacaacatggaggaactgaaggaggtcgccaagagactctctcgtgaccaaagatttagagaatcaatttatcatattatggccacccagccaggggccccttccgcgctgtcgcggggaggaaagtag

SEQ ID NO: 61246 - DNA, 1812 bp, Artificial Sequence
  derived and/or modified sequence
ccggagcccaagccgccggctacgcgccctgcgcccccttggtgccgcgtccagtgcccagcgcgctttgatgctgcagctccgggccgggccgctctgcttctctgctcgctgggacgctctccgacggctccgccctcgcctctcgccccgagtccctgctgaccccggggaggtggggtccgggccgggcacagccccgctgaggcaggatgttcacgtccaagtccaactcggtgtcgccctcgccgtccctggagcaggctgactcggacgccctggatatcagcaccaaagtgcagctctacggcgtgctgtggaagaggcctttcggcaggccgtcggccaagtggtcccggcggtttttcatcatcaaagagagctttctgctttactactctgagagcgaaaaaaagagctttgaaaccaataaatacttcaatatacatcctaagggcgtcatccctctggggggctgcctggtggagcccaaggaagagcctagcatgccctatgccatgaagatctcccaccaggacttccatgggaacatcttgcttgctgctgagtcggagtttgagcagacccagtggctggagatgctgcaggagtctgggaaggtgacctggaagaatgcccagctgggagaagccatgatcaaaagcctggaggcccaggggctgcagttggctaaggaaaagcaggagtatttagacaaactgatggaagagaccgaagaactctgccttcagagggagcagagagaggagcttgagcgccttaaccaggtgctggaggccgagaagcagcagttcgaggaggtggtgcaggagctgagaatggagcaggagcagatcaagagggagctggaactgactgcaagatgccttaagggtgtagaacaagagaaaaaggaactgaggcacctcacggagtccttgcagcagacactggaggaactctccatagagaagaagaaaaccctggaaatgctggaggagaacgagaaccacctgcagacactggccaatcagagtgagcagccccctcccagtgggggcctccatagcaacctccggcagatcgaggagaagatgcagcagctcttagaggagaagctcctggcagagaagcggatgaaggagaacgaggagcgctcacgggccctggaggaggagcgtgagttctactccagccagtcccaggcactgcagaactcgctgcaggagctgacggcagagaagcagcaggctgagcgggagctcaaggctgaggtgaaggtccgcatggacctggagaggcgtctccgggaggcagaaggggccttgcgaagcctggaacaggggctgaattccaaggtgcggaataaggagaaggaggagaggatgcgggctgatgtgagccatctgaaaaggttctttgaggagtgcatccggaatgccgagctggaggccaagatgcctgtgatcatgaagaactccgtgtacatccataaggcagccactcgccgcatcaagagctgccgcttccaccgacgccggtccagcacctcctggaatgacatgaagccgtcccagtccttcatgacctcccagctggatgccaacaacatggaggagctaaaggaggtggccaagcggctcagcagggaccagcgcttccgggaatccatctaccacatcatggccacccagcctggagccccctcggcactctcccggggtggaaagtgatgggcgctcctcccctgcttcccaagtctcccctggatgggcgggggaggggaaggggtggcagagggaggcctcactc

SEQ ID NO: 61247 - DNA, 1521 bp, Artificial Sequence
  derived and/or modified sequence
atgtttacatccaagtcaaatagcgtgagcccctcccccagtctggagcaggctgacagtgatgccctcgatatctctactaaggtgcaactgtatggtgtcctgtggaagcgaccgttcggacgtccttccgcaaagtggagtaggagattcttcatcattaaggagtcatttttactctattattccgagagcgaaaagaagtcttttgaaacaaataagtacttcaacatccatccaaaaggagttatcccccttggaggctgcctggtcgagcctaaggaggaaccttctatgccttacgcaatgaagatatcccaccaggactttcatggcaacatcctgctggccgctgaaagtgaattcgagcaaacacagtggttagaaatgttgcaggagtcaggtaaggtgacctggaagaatgcacagctcggcgaagcaatgattaaaagcctcgaagcacagggtctgcagctggccaaggaaaaacaggagtacctagacaagctgatggaggaaaccgaagagttgtgcttgcaaagggagcagagagaggaattggagagactgaatcaagtgctagaagcggagaagcaacagttcgaagaggtggtgcaggagcttcggatggaacaagagcagataaaaagagagctcgagttaaccgctagatgcctaaaaggggtggagcaggagaagaaggagcttcgacacttaaccgagtcactccagcaaactctggaggagctgtccattgagaagaaaaagaccctcgagatgcttgaagaaaatgaaaatcaccttcaaacacttgccaaccaaagtgagcaaccccctccgagcggcggactgcattctaacttgcggcagatagaggagaaaatgcagcagctgctggaggagaaattgcttgctgaaaagcggatgaaggagaatgaagagcgtagccgggctctcgaggaagaaagggaattctattcttcacagagccaagctctgcagaattctctgcaggaattgacagcggagaaacagcaagctgagcgcgaactgaaagcggaagtcaaggtgagaatggatctcgagagacgcctccgagaagctgaaggtgccctgagatcgctcgaacagggtttgaactcaaaagtgcggaacaaggagaaggaagagcgaatgcgagccgacgtaagtcatctgaagaggttcttcgaagagtgtattagaaatgccgaactggaagccaaaatgccagtgattatgaaaaactccgtttacatccacaaggctgccaccaggcgcattaaatcatgtaggttccacagaaggaggtcgagcaccagctggaatgatatgaagccgtcccaaagcttcatgacaagtcaactcgatgccaataacatggaggaactgaaggaggtcgcgaagagactgtcgagggaccaaagatttcgcgagtccatatatcatattatggccacccagcccggtgcaccatccgcactcagcaggggaggcaaatag

SEQ ID NO: 61248 - protein, 597 aa, Artificial Sequence
  derived and/or modified sequence
MVWLEARPQILFVCTKQGHQKPLDSKDDNTEKHCPVTVNPWHMKKAFKVMNELRSQNLLCDVTIVAEDMEISAHRVVLAACSPYFHAMFTGEMSESRAKRVRIKEVDGWTLRMLIDYVYTAEIQVTEENVQVLLPAAGLLQLQDVKKTCCEFLESQLHPVNCLGIRAFADMHACTDLLNKANTYAEQHFADVVLSEEFLNLGIEQVCSLISSDKLTISSEEKVFEAVIAWVNHDKDVRQEFMARLMEHVRLPLLPREYLVQRVEEEALVKNSSACKDYLIEAMKYHLLPTEQRILMKSVRTRLRTPMNLPKLMVVVGGQAPKAIRSVECYDFKEERWHQVAELPSRRCRAGMVYMAGLVFAVGGFNGSLRVRTVDSYDPVKDQWTSVANMRDRRSTLGAAVLNGLLYAVGGFDGSTGLSSVEAYNIKSNEWFHVAPMNTRRSSVGVGVVGGLLYAVGGYDGASRQCLSTVECYNATTNEWTYIAEMSTRRSGAGVGVLNNLLYAVGGHDGPLVRKSVEVYDPTTNAWRQVADMNMCRRNAGVCAVNGLLYVVGGDDGSCNLASVEYYNPTTDKWTVVSSCMSTGRSYAGVTVIDKPL

SEQ ID NO: 61249 - DNA, 1794 bp, Artificial Sequence
  derived and/or modified sequence
atggtttggctcgaggctcgtccccagatcctgtttgtgtgtactaagcaaggccatcagaaacccctggatagcaaagatgataatactgagaagcattgcccggttactgtgaacccttggcacatgaagaaggcttttaaggtaatgaatgagcttcgaagtcagaacctcctgtgcgacgtaactatcgtcgccgaggatatggaaatcagtgcccatcgggtggtgctcgcagcttgcagtccctatttccacgccatgtttacgggcgagatgtccgaatctagggccaaaagggtgcgcatcaaggaggtcgacggctggaccctaaggatgctgatcgattacgtttacactgctgaaatacaagtgactgaggaaaacgtacaggtgttgctgcctgctgccggccttcttcaactgcaggatgtcaaaaaaacttgttgcgagttcttggagtcccagctacatcctgtgaactgcctgggcattagggcgttcgctgatatgcacgcctgtacagacctgcttaataaggcaaacacttacgcggagcagcactttgcagatgtggtgctctccgaagagtttctgaaccttggaattgagcaggtatgttctctgatctctagcgacaagttaacaatcagcagtgaagagaaagtgtttgaggccgtgatcgcatgggtgaaccacgacaaggacgtgagacaggagttcatggcaaggctcatggaacacgtgcgcttgccgcttctccctcgagaatacttagtgcagagagtagaagaggaggcactggttaaaaactcctcagcctgtaaagactatcttattgaagcgatgaagtaccaccttctgcccaccgagcagcggatcctaatgaaatccgtgcgtacaaggcttagaaccccaatgaacctgccaaaactgatggtcgtggtgggcggccaggcaccgaaggctatacgtagtgtggagtgctatgatttcaaggaagagcgctggcaccaggtggctgagcttccaagtcgccgctgcagagctggcatggtgtacatggcgggtctcgtgttcgcagtgggaggtttcaacggatccctgcgggtgcggaccgtggatagttacgaccctgtgaaggaccagtggacttcagtggcaaatatgagggaccgacgctccacactgggtgcggctgtcctaaacgggctcctgtacgccgtggggggttttgatggcagtactgggcttagcagcgtagaggcatataacataaagtcaaacgaatggttccacgtggctcctatgaataccaggcgctcttccgtcggggtgggagtggtgggtggacttctgtacgctgtaggcggatatgatggcgctagcagacaatgtctttccactgttgaatgctataacgccaccacgaacgagtggacttacatcgccgagatgagcacacgtaggtccggtgctggcgtgggggtgctcaacaatctgttatacgctgtagggggccatgacggccccctcgtcagaaaatcagtagaagtgtatgatcctacaactaacgcatggagacaggtggctgacatgaatatgtgtcgccgaaatgcaggcgtctgcgcagtcaatggattgctctacgttgtcggcggcgatgacgggtcctgcaacctggcctccgtggagtactataatcccacaacagataagtggaccgtggtcagctcctgtatgagcaccggaagaagctacgccggggtaactgtcatcgacaaaccattatag

SEQ ID NO: 61250 - DNA, 2442 bp, Artificial Sequence
  derived and/or modified sequence
tttttttccttgccaccccttggcctgtttgcctccactcccattaacatccctccaccatggatcccgtgtgccggatttgagacttgcaggcagtgtctttaggaaggaactttaccgggcctcactgccagagctgggctagaacagaggccagtggaaactattaggaagactcagcttttcatgaagttagatttttagcctgagctttaagtcaaagaaagatgacctggacttaaagtgccttatggtatggttggaagcacggccccagattctctttgtatgcacaaagcagggtcatcagaagcctctcgattcaaaagatgataataccgaaaaacactgcccagtgacagtgaatccttggcatatgaagaaagctttcaaagtcatgaacgaattaagaagtcaaaatttgctgtgcgatgtcacaattgtggcagaagacatggaaatttctgctcatagagtggtgctggccgcctgtagtccttattttcatgccatgtttacaggtgagatgagtgagagccgagcaaagagagttagaataaaagaggtagatggctggaccctgaggatgctaattgattatgtttacactgcagaaattcaggttacagaagaaaatgtacaggtacttctcccagcagctggtctcttacagttacaggatgtgaagaagacttgttgtgaatttttggaatcccagcttcaccctgtcaactgcttaggaatccgggcttttgctgatatgcatgcatgtaccgaccttctgaacaaggccaacacctatgcagagcaacattttgcagatgttgtacttagtgaagaatttctcaatcttggcatcgaacaagtgtgcagcttaatctcaagtgacaaacttaccatttcttcagaagagaaggtatttgaagcagtaatagcatgggtgaaccatgacaaggatgtgaggcaagagtttatggcccgactgatggaacatgtacggttacctttgcttcctcgggaatatttagttcagagggttgaagaggaagcattggtcaagaatagcagtgcttgcaaagattacctcattgaagcaatgaagtaccatttgctgccaacagagcagcgtatattaatgaagagtgtccggacccggctgaggacacccatgaaccttcccaaattgatggtggtggttgggggccaagcaccaaaggctatccggagtgtggaatgctatgactttaaagaagaaaggtggcaccaagtagcagagttgccttccaggaggtgcagggcaggcatggtctacatggctggacttgtttttgctgttggtggctttaatggctcattaagagttcgcactgtagattcctacgaccctgtgaaggaccagtggaccagcgttgctaacatgagagaccggagaagcactttgggagctgctgtgttaaatggattattatacgctgtgggaggctttgatgggagtacaggtttgtcatctgtggaagcatacaacataaagtctaatgagtggtttcatgtagctcccatgaatacaaggaggagcagtgttggtgtgggtgttgttggaggtttgctctatgctgtaggaggttatgatggagcatcacgtcagtgtcttagcacagtagaatgctataatgctacaacaaatgagtggacctatatagcagaaatgagcaccaggcggagtggagcaggtgttggtgtgttaaacaatttattgtatgctgtaggaggtcatgatggccctttagtacgaaaaagtgttgaagtatatgatcccaccactaacgcatggagacaggttgcagatatgaacatgtgcagaagaaatgcaggagtttgtgcagttaatggtctgttatatgttgttggaggggatgatggttcctgtaacttggcgtcagtagaatattataacccaacaaccgataaatggacagttgtgtcatcgtgtatgagcacagggagaagttatgcaggggtcacagttattgataaaccattatgagcctgaaggacattttcagcatatttatacatgagaaacagccttcaacaagtatttgtgaagtgactgagaatctagcacttctccacttgtagctgcactttaagtctcagcagaagatacgatcgtctgcctttataggcctcagatactgaagattatttttggtagaagcaccgtgtaggctttttctgcaatgagcagcagctgactgaattttcataagaaacttggactgcaggacttaatctgtagtctttagacaacagttgctttcataaagactagttcttatcaaccttgaatgactacagattattttgtgaaggaggatgaagtaatgtgtgttcttgtaaaattaaattttatctttatttcttctaaaaatctgtatacca

SEQ ID NO: 61251 - DNA, 1794 bp, Artificial Sequence
  derived and/or modified sequence
atggtgtggctggaggcccggccccagatcctgtttgtgtgcaccaagcagggccaccagaagcccctggacagcaaggatgacaacacagagaagcactgccctgtgacagtgaacccctggcacatgaagaaggccttcaaggtgatgaatgagctgcggagccagaacctgctgtgtgatgtgaccatcgtggccgaggacatggagatcagcgcccaccgggtggtgctggccgcctgcagcccctacttccacgccatgttcaccggggagatgtctgagagccgggccaagagggtgcgcatcaaggaggtggatggctggaccctgaggatgctgattgattatgtgtacacagctgagatccaggtgacagaggagaatgtgcaggtgctgctgcctgctgctggcctgctgcagctgcaggatgtgaagaagacctgctgtgagttcctggagagccagctgcaccctgtgaactgcctgggcatccgggcctttgctgacatgcacgcctgcacagacctgctgaacaaggccaacacctatgcagagcagcactttgctgatgtggtgctgtctgaggagttcctgaacctgggcatcgagcaggtgtgcagcctcatcagcagtgacaagctgaccatcagcagcgaggagaaggtgtttgaggccgtcatcgcctgggtgaaccacgacaaggatgtgcggcaggagttcatggcccggctgatggagcacgtgcggctgcccctgctgccccgggagtacctggtgcagagggtggaggaggaggccctggtgaagaacagcagcgcctgcaaggactacctgattgaggccatgaagtaccacctgctgcccacagagcagaggatcctgatgaagtctgtgaggacccggctgcggacccccatgaacctgcccaagctgatggtggtggtgggcggccaggcccccaaggccatccgctctgtggagtgctatgacttcaaggaggagcgctggcaccaggtggccgagctgcccagccgccgctgccgggccggcatggtgtacatggccggcctggtgtttgctgtgggcggcttcaacggcagcctgcgggtgaggacagtggacagctatgaccctgtgaaggaccagtggacctctgtggccaacatgagggacagaagaagcaccctgggcgctgctgtgctgaatggcctgctgtatgctgtgggcggctttgatggcagcacaggcctgagctctgtggaggcctacaacatcaagagcaatgagtggttccacgtggcccccatgaacacccggcgcagctctgtgggcgtgggcgtggtgggcggcctgctgtatgctgtgggcggctatgatggagccagccggcagtgcctgagcacagtggagtgctacaatgccaccaccaatgagtggacctacatcgccgagatgagcaccaggagaagtggagctggggtgggcgtgctgaacaacctgctgtatgctgtgggcggccatgatggccccctggtgaggaagtctgtggaggtgtatgaccccaccaccaatgcctggaggcaggtggccgacatgaacatgtgcagaagaaatgctggggtgtgtgctgtgaatggcctgctgtatgtggtgggcggagatgatggcagctgcaacctggcctctgtggagtactacaaccccaccacagacaagtggacagtggtgagcagctgcatgagcacaggccgctcctatgctggggtgacagtgattgacaagcccctgtag

SEQ ID NO: 61252 - DNA, 1794 bp, Artificial Sequence
  derived and/or modified sequence
atggtgtggctggaggcccggccccagatcctgttcgtgtgcaccaagcagggacaccagaaacccctcgatagcaaagatgacaataccgagaagcactgccctgtcaccgtgaatccctggcatatgaagaaagcctttaaggtgatgaacgaattgaggtctcagaacctgttgtgcgacgtaacaatcgtggccgaggacatggagatctccgctcatcgcgtcgtgttagccgcctgttccccctactttcacgcgatgttcactggcgagatgagtgagtctagagccaagcgagtacgcatcaaggaagtggacgggtggactcttaggatgctgatcgactatgtctacacagcagaaattcaggtgaccgaggaaaacgttcaagtcttgttacctgcagcaggcctcctgcagcttcaagacgtcaagaagacctgttgcgaattcctggaatcgcaattgcatccagtcaattgcctgggcattcgggcattcgcagatatgcacgcttgtacggatctcttgaacaaggccaacacgtacgctgagcagcactttgcagatgtggtactgtctgaggaattcctcaatctaggcatcgagcaggtgtgctctctcattagttcagacaaactcactatcagctcagaggaaaaggtttttgaggctgttattgcttgggtgaaccatgataaggatgtgcggcaggaattcatggcaaggctgatggaacacgttcgtctaccgttactgcctcgggaatacttggttcaaagagtcgaggaagaggctttggtcaaaaattcaagcgcctgcaaggattatctgattgaggctatgaagtaccaccttctgcctactgagcaaaggatcctcatgaagtccgtgcgcactagactgcgtacacccatgaacctacccaaactaatggtggtggtgggcggacaggccccgaaggcaatcagatcagtagagtgctacgacttcaaggaggagcggtggcaccaggtggccgaactcccgagccgacgctgcagggcgggcatggtctatatggcggggctcgttttcgccgtgggcggctttaacggtagtctgagagttaggacagtcgactcatatgatcctgttaaggaccagtggacaagcgtcgccaacatgcgggatagacgctctacgttgggggctgctgtgctgaatggacttctgtacgctgtgggcggtttcgatgggagcacagggctgtcctctgtggaggcctataacataaaaagtaatgaatggtttcacgtagcaccaatgaacacacggcgttcctcggtgggagttggagttgtcgggggtctgctatacgcagtgggcggctacgacggggcgagtaggcagtgcctgtccaccgtggaatgttacaatgcgaccaccaacgagtggacatacatagcggaaatgtccacacgcaggtccggtgcgggtgtaggcgtcctcaacaatctcctctatgcggtgggaggccacgacgggcctctggttcgaaagtccgtggaggtctacgaccccaccacgaatgcttggcgacaggtagccgatatgaatatgtgcagaagaaacgccggagtgtgcgccgtgaatggtttgctgtacgtagtgggcggggatgacggcagttgcaacctggcttcggtcgaatattacaacccaacaactgacaaatggaccgtggtgtctagttgtatgtctaccgggcgctcttacgctggggtcacagtgatagacaagcctttatag

SEQ ID NO: 61253 - DNA, 1794 bp, Artificial Sequence
  derived and/or modified sequence
atggtctggctagaggccagaccacagatactcttcgtgtgtacaaaacagggccaccaaaaacccctggacagtaaggatgataataccgagaaacactgccccgtcacggttaatccgtggcacatgaaaaaagcgttcaaagtgatgaatgaattaagaagccagaatctactgtgtgatgtcacaatcgtcgcagaggacatggagatctctgctcatagggtggttctggcagcgtgttcaccatactttcatgccatgtttaccggcgaaatgagcgagtctcgggctaaacgcgtgcgcattaaggaagtggacggctggaccctcaggatgctaattgactatgtgtacacagccgaaattcaggtcaccgaggagaatgtgcaggttctactgccggctgccggtctcctgcagctgcaggacgtgaaaaagacctgctgcgagtttctcgagtcgcagctccatcctgtcaattgccttggcattcgggcttttgccgacatgcacgcctgcacagatctcctgaataaagctaacacctacgcagaacagcactttgcagacgtggtccttagcgaagagtttctgaaccttggcatcgagcaggtgtgttcactgatttccagtgataagctcacgatcagtagtgaggagaaagtattcgaggccgtgattgcttgggtgaaccacgacaaggatgtgaggcaggagttcatggccagacttatggagcatgttcgcctgcctctcctgcctagggaatatttggtgcagcgcgttgaagaagaagcactcgttaagaattccagcgcctgcaaggattacctgatcgaagcgatgaagtaccatctcttgcccactgaacaacggattttaatgaagtccgtcagaactaggctgcgaaccccgatgaatctgccaaaattaatggtcgttgtggggggacaggccccaaaggcgattagatccgtcgaatgctacgactttaaagaagagaggtggcatcaggttgctgaactgcctagcaggagatgcagggctggcatggtttacatggccggtctcgtgtttgcagtcgggggtttcaacggaagtctgagggtcaggactgtagacagctacgaccccgtcaaggatcaatggacctctgtggctaacatgcgtgaccgtcggagcactctcggcgcagctgtgctgaatggactcctctatgcagttggcggattcgacggtagcaccggtctctcatcagtggaggcttataatattaaaagcaacgagtggtttcatgttgctcctatgaacaccaggagatcaagtgtgggcgtcggcgttgtaggtgggctgttatacgccgttgggggttatgacggcgcttcccgccaatgtctatctactgtggagtgttacaacgcaacaacaaacgagtggacctatatcgccgaaatgtccacacgacgtagtggtgccggagtcggggtactcaataacctgctgtatgcagtgggcggtcacgatggtccactggtccgcaagtcggttgaagtgtacgatccaaccactaacgcctggaggcaggtagccgatatgaacatgtgtcgacggaatgctggcgtgtgtgccgttaacggactactgtacgtcgtgggcggagacgatggaagctgcaacctggcttctgttgagtactataacccgacaactgataaatggacggtggtttccagctgtatgagcacgggaagatcatatgcgggtgtcacagtgattgacaagcccttgtag

SEQ ID NO: 61254 - DNA, 1794 bp, Artificial Sequence
  derived and/or modified sequence
atggtgtggctggaggccagaccccagatcctgttcgtgtgcaccaagcagggccaccagaagcccctggacagcaaggacgacaacaccgagaagcactgccccgtgaccgtgaacccctggcacatgaagaaggccttcaaggtgatgaacgagctgagaagccagaacctgctgtgcgacgtgaccatcgtggccgaggacatggagatcagcgcccacagagtggtgctggccgcctgcagcccctacttccacgccatgttcaccggcgagatgagcgagagcagagccaagagagtgagaatcaaggaggtggacggctggaccctgagaatgctgatcgactacgtgtacaccgccgagatccaggtgaccgaggagaacgtgcaggtgctgctgcccgccgccggcctgctgcagctgcaggacgtgaagaagacctgctgcgagttcctggagagccagctgcaccccgtgaactgcctgggcatcagagccttcgccgacatgcacgcctgcaccgacctgctgaacaaggccaacacctacgccgagcagcacttcgccgacgtggtgctgagcgaggagttcctgaacctgggcatcgagcaggtgtgcagcctgatcagcagcgacaagctgaccatcagcagcgaggagaaggtgttcgaggccgtgatcgcctgggtgaaccacgacaaggacgtgagacaggagttcatggccagactgatggagcacgtgagactgcccctgctgcccagagagtacctggtgcagagagtggaggaggaggccctggtgaagaacagcagcgcctgcaaggactacctgatcgaggccatgaagtaccacctgctgcccaccgagcagagaatcctgatgaagagcgtgagaaccagactgagaacccccatgaacctgcccaagctgatggtggtggtgggcggccaggcccccaaggccatcagaagcgtggagtgctacgacttcaaggaggagagatggcaccaggtggccgagctgcccagcagaagatgcagagccggcatggtgtacatggccggcctggtgttcgccgtgggcggcttcaacggcagcctgagagtgagaaccgtggacagctacgaccccgtgaaggaccagtggaccagcgtggccaacatgagagacagaagaagcaccctgggcgccgccgtgctgaacggcctgctgtacgccgtgggcggcttcgacggcagcaccggcctgagcagcgtggaggcctacaacatcaagagcaacgagtggttccacgtggcccccatgaacaccagaagaagcagcgtgggcgtgggcgtggtgggcggcctgctgtacgccgtgggcggctacgacggcgccagcagacagtgcctgagcaccgtggagtgctacaacgccaccaccaacgagtggacctacatcgccgagatgagcaccagaagaagcggcgccggcgtgggcgtgctgaacaacctgctgtacgccgtgggcggccacgacggccccctggtgagaaagagcgtggaggtgtacgaccccaccaccaacgcctggagacaggtggccgacatgaacatgtgcagaagaaacgccggcgtgtgcgccgtgaacggcctgctgtacgtggtgggcggcgacgacggcagctgcaacctggccagcgtggagtactacaaccccaccaccgacaagtggaccgtggtgagcagctgcatgagcaccggcagaagctacgccggcgtgaccgtgatcgacaagcccctgtag

SEQ ID NO: 61255 - DNA, 969 bp, Artificial Sequence
  derived and/or modified sequence
atgcagcagctgctgagccagccccagcacgagagagagaaggaggtggtgctgctgagaagaagcatggccgagggcgagagagccagagccgccagcgacgtgctgtgcagaagcctggccaacgagacccaccagctgagaagaaccctgaccgccaccgcccacatgtgccagcacctggccaagtgcctggacgagagacagcacgcccagagaaacgtgggcgagagaagccccgaccagagcgagcacaccgacggccacaccagcgtgcagagcgtgatcgagaagctgcaggaggagaacagactgctgaagcagaaggtgacccacgtggaggacctgaacgccaagtggcagagatacaacgccagcagagacgagtacgtgagaggcctgcacgcccagctgagaggcctgcagatcccccacgagcccgagctgatgagaaaggagatcagcagactgaacagacagctggaggagaagatcaacgactgcgccgaggtgaagcaggagctggccgccagcagaaccgccagagacgccgccctggagagagtgcagatgctggagcagcagatcctggcctacaaggacgacttcatgagcgagagagccgacagagagagagcccagagcagaatccaggagctggaggagaaggtggccagcctgctgcaccaggtgagctggagacaggacagcagagagcccgacgccggcagaatccacgccggcagcaagaccgccaagtacctggccgccgacgccctggagctgatggtgcccggcggctggagacccggcaccggcagccagcagcccgagccccccgccgagggcggccaccccggcgccgcccagagaggccagggcgacctgcagtgcccccactgcctgcagtgcttcagcgacgagcagggcgaggagctgctgagacacgtggccgagtgctgccagtag

SEQ ID NO: 61256 - DNA, 969 bp, Artificial Sequence
  derived and/or modified sequence
atgcagcaactgctgagtcagccccaacacgagcgggagaaagaggtcgtcctgctgaggaggagcatggctgagggcgagcgagctagggccgcctccgatgttctgtgccggtccctcgcaaatgagacgcatcagctgaggcgcaccctcactgccactgcccatatgtgtcagcaccttgccaagtgtctggatgagcgccagcacgcccagaggaacgtgggcgagagaagtccggatcagagtgaacacacggatggccacaccagtgtacaatctgtcatcgaaaagcttcaggaagaaaacaggcttctcaagcagaaagtgacgcacgttgaagatttgaacgctaagtggcagcgctacaacgcctcaagggatgaatatgtgcggggtctgcacgcccagctgaggggtctgcagattccccatgaaccggaattgatgcgaaaggagatttctcgactgaacaggcaactcgaagaaaagattaatgactgcgccgaagtcaaacaagagctggcagcatcccgtacagccagagacgccgcccttgagcgcgttcagatgttggagcaacagatcttagcttacaaggatgacttcatgtccgagagagcagaccgcgagagggctcagtcgagaatccaagaactggaggagaaagtggcatctttgctccatcaggttagctggagacaggattcccgggagccagatgccggacgaattcacgccggctctaaaacagctaaatatctggccgctgacgcgctggaactgatggttcccggtgggtggcgtccaggaaccggcagtcagcagcccgagccaccagccgaaggcggtcacccgggcgctgcccaacgcggccagggagatctgcagtgtccgcactgtttacagtgttttagcgacgagcagggggaagaattgctccggcatgtggcggagtgttgtcaatag

SEQ ID NO: 61257 - DNA, 969 bp, Artificial Sequence
  derived and/or modified sequence
atgcagcagctgctgagccagccccagcacgagcgggagaaggaggtggtgctgctgcggcgctccatggccgagggggagcgggcccgggccgccagtgatgtgctgtgccgcagcctggccaatgagacccaccagctgcggaggaccctgacagccacagcccacatgtgccagcacctggccaagtgcctggatgagcggcagcacgcccagagaaatgtgggggagaggagcccagaccagagcgagcacacagatggccacacctctgtgcagagcgtcatcgagaagctgcaggaggagaaccggctgctgaagcagaaggtgacccacgtggaggacctgaatgccaagtggcagcgctacaatgccagcagagatgaatatgtgcggggcctgcacgcccagctgcggggcctgcagatcccccatgagcctgagctgatgaggaaggagatcagccggctgaaccggcagctggaggagaagatcaatgactgtgccgaggtgaagcaggagctggccgccagcaggacagccagagatgctgccctggagcgggtgcagatgctggagcagcagatcctggcctacaaggatgacttcatgtctgaaagagctgaccgggagcgggcccagagccgcatccaggagctggaggagaaggtggccagcctgctgcaccaggtgtcctggaggcaggacagccgggagccagatgctggccgcatccatgctggcagcaagacagccaagtacctggccgcagatgccctggagctgatggtgcctgggggctggaggcctggcaccggcagccagcagcctgagcccccagctgagggcggccaccctggggccgcccagaggggccagggcgacctgcagtgcccccactgcctgcagtgcttcagtgatgagcagggcgaggagctgctgcggcacgtggccgagtgctgccagtag

SEQ ID NO: 61258 - DNA, 969 bp, Artificial Sequence
  derived and/or modified sequence
atgcagcagctgctgagccagccccagcacgagcgggagaaggaggtggtactgttgaggcggtctatggccgaaggggagagggcccgtgctgcgtccgatgtgctctgtcgaagcttagctaatgagacacatcagctgcggcgtacgttgacggccactgcccatatgtgccagcatctcgccaagtgcttggatgaacggcaacacgcacagagaaatgtgggggaaagaagccctgaccaaagcgaacacacagatggacatactagcgtccaaagcgtgatcgaaaaacttcaggaggagaaccgcctcctgaagcaaaaggtgactcatgttgaggacctcaacgccaagtggcagcgctacaacgcctcaagggacgagtacgtgcggggcttgcacgctcagttgagaggactgcagatacctcacgaaccagagctgatgcgtaaggaaatctctcgacttaatcggcagctcgaagagaagatcaatgattgcgccgaggtgaaacaagagctggcagcctcaagaaccgccagagatgcagctctggaacgggttcagatgctggaacagcagatcctggcgtacaaggatgactttatgtcagaaagggccgacagggagagagctcaatcccggattcaggagctggaggaaaaagtggccagcctgctgcaccaggtctcgtggcgacaagacagtcgcgagccggacgcaggacgaatacacgccggtagcaagactgcaaagtacctggcggccgacgccttggagctcatggtgcctggcggttggagacccggtacaggctcccaacaacccgaacctcccgccgagggcggacatcctggggctgcccaacgggggcagggggacttacagtgtccgcattgcctgcagtgtttctcggacgagcagggtgaggaactgctgagacacgttgcggagtgttgccagtag

SEQ ID NO: 61259 - DNA, 969 bp, Artificial Sequence
  derived and/or modified sequence
atgcaacaattactctctcaaccgcagcacgaaagggagaaagaggtcgtgctcctgcgcagatccatggctgagggagaaagagccagggccgcatcggatgtcttgtgtcgttctctcgccaacgaaacacaccagctcagaagaacacttactgctactgcacatatgtgtcagcatctggctaaatgtttagatgagagacagcacgcccagaggaatgtgggagagagatctcccgatcagtctgaacacactgatggacatacatcagttcagtcggtgattgagaagttgcaggaggaaaaccgtttgctgaagcagaaggtcactcatgtggaagatcttaacgctaagtggcagcggtataacgcaagccgagatgagtacgtacggggattacacgcacagttgcggggtctgcagattccccacgagcccgaactgatgcggaaggaaatctccaggctgaatcgacagctggaagagaaaatcaatgattgcgctgaggtgaagcaggagctcgccgcaagcaggaccgcccgagatgctgccctcgagagagtccaaatgctcgagcagcagatactcgcatataaggatgatttcatgtctgagcgcgcagatagggaaagggcccaatcccggatacaggaactggaagagaaagtcgcgtctctattacaccaagtcagctggcgccaagatagtagggagccagacgccggtagaatacatgcagggtctaaaacagctaagtatctggcagctgatgctcttgagctgatggtgcctggcggttggcggccaggcaccggcagtcagcagccagagccccctgctgaaggcggacaccctggagctgctcagcgagggcagggagatctgcagtgtccacattgcttacaatgttttagcgacgagcagggcgaggaacttctgaggcacgtggccgagtgctgtcaatag

SEQ ID NO: 61260 - DNA, 2006 bp, Artificial Sequence
  derived and/or modified sequence
agttgccggcggccgcgcggcctcccgggcgggcctacagccatgtcccgggacccggggtcgggcggctgggaggaggccccgcgcgcagctgccgcgctctgcaccctgtaccacgaggccggacagcggctgcgccgcctgcaggaccagctcgctgcccgcgacgccctcatcgctcgcctccgcgcccgcctggccgcgctggagggggacgccgcgccgtccctagtggacgcgctgctggagcaggttgcgcgcttccgggagcagctgcgaaggcaggagggcggcgccgccgaggcccagatgcgccaggtacgagggcgggtaccagaggagctgcgggagcgagagtgcgtgtggcggccgccgggtcctgggaaattgagaggctgactgagcgactagaagaaaaagagagggagatgcagcagctgctgagccagccccaacacgagcgagagaaggaagtcgtcctgctacggaggagcatggcagaaggggagcgcgcccgggccgccagtgacgtcctgtgccgctccttggccaacgagacccatcagctgcggaggacgctgaccgccaccgcccacatgtgtcagcatctggccaagtgtctggatgaacgacagcatgcacaaaggaatgtgggggagagaagtcctgaccagtcggaacacacagatgggcacacctctgtccagagtgttattgagaagttgcaggaagaaaatcgactgttaaaacagaaggtgactcacgttgaagacctcaatgccaagtggcagcgctacaacgccagcagggacgaatacgtgagggggctccatgcgcagctcagggggctgcagatcccccacgagcccgagctgatgaggaaggagatctcccggctcaacagacagttggaagagaaaataaatgactgtgccgaagtgaagcaggagctggcggcctccaggacggcccgggatgctgcgttggagcgggtgcagatgctggaacagcagattctcgcttacaaggatgacttcatgtcagaaagggccgatcgggaacgggctcaaagtaggattcaagaactggaggaaaaggtcgcctctttgctgcaccaggtgtcctggagacaggattctcgagagccagacgccggccggattcacgctgggagcaaaactgccaagtatttggccgccgacgcattagagcttatggtgcctggtggctggaggcctgggactgggtcccagcagccagaaccccctgcagagggcgggcatcctggcgcggcccagagaggccagggggaccttcagtgccctcactgcctgcagtgcttcagtgacgagcaaggggaagagctcctcaggcatgtggctgagtgctgccagtgaccgagactcacccgtgcccttgcggcctcctggcccggtgcagctgccctcagggacagggtgggtgctctcagatgccatgggttgagctctactgagagccaaggcccctagaatagttgcggggcactctgatcgttcactttggtccctttggctatggaacaggctgggtcacagggaactgccagtgaggctggaggctggaggtggagatggggtcaggaacatctggcagagggaggtcccagtctgtgtctccatcaggcttaagccagagctatctggtgctggtgtgccagcccctcccccagcctgcctagaaaggggtggctgcctgagggagtcacttgtatggtccccagggtgggagccccatcctgttctatggaataaagcgtcgcctctctgcctcgaaccagtcaaatggagtattgcggctgcacgtcacactagggtggccacccccgccattgcgagccacatgtctgcactgagaaactgcatttcagtagcatttgtcatccagccggaagttaaagcacacttactttattcacctatttttataataaacgttcttgctgctgtgactgctctgagaatttg

SEQ ID NO: 61261 - protein, 434 aa, Artificial Sequence
  derived and/or modified sequence
MLLLVTSLLLCELPHPAFLLIPEKSDLRTVAPASSLNVRFDSRTMNLSWDCQENTTFSKCFLTDKKNRVVEPRLSNNECSCTFREICLHEGVTFEVHVNTSQRGFQQKLLYPNSGREGTAAQNFSCFIYNADLMNCTWARGPTAPRDVQYFLYIRNSKRRREIRCPYYIQDSGTHVGCHLDNLSGLTSRNYFLVNGTSREIGIQFFDSLLDTKKIERFNPPSNVTVRCNTTHCLVRWKQPRTYQKLSYLDFQYQLDVHRKNTQPGTENLLINVSGDLENRYNFPSSEPRAKHSVKIRAADVRILNWSSWSEAIEFGSHSVTQAGVQWHNLGSLQPPSPRLKRFSCLRLPGSDDGNLGSVYIYVLLIVGTLVCGIVLGFLFKRFLRIQRLFPPVPQIKDKLNDNHEVEDEIIWEEFTPEEGKGYREEVLTVKEIT

SEQ ID NO: 61262 - DNA, 1305 bp, Artificial Sequence
  derived and/or modified sequence
atgcttttgttggttaccagtctcttactctgcgagcttccgcaccccgcgttcctgctgatccctgaaaaaagtgatctaaggacagtagctcccgcatcctccctgaacgtgcgctttgacagccgaaccatgaatctgtcatgggattgccaagaaaacacaacctttagcaagtgcttcctgaccgataagaagaatcgagtcgtggagccaagattgtccaataacgaatgctcctgtacgtttagggaaatttgtttgcacgaaggtgtcacgttcgaggttcacgtaaacaccagccagcgtggcttccaacagaaactgctgtacccaaactcaggacgtgaaggcactgctgctcagaatttctcctgtttcatctataatgccgacctgatgaattgtacatgggccaggggtcccactgctcctagggatgtgcagtacttcctctatattcgaaacagcaagcggcgacgtgaaatacggtgtccctattacatccaggatagtggtacacacgttgggtgtcacttggacaatctgagcggcctaacgagccgcaactacttcctggtcaatggtaccagtagagagatcgggatccagtttttcgacagtctgttggatacaaagaaaattgagcggtttaaccccccgtctaatgtgacagtgaggtgcaatactactcactgcttggtgcggtggaagcagcctagaacctaccagaagctgagttatctggactttcagtaccaactggatgtgcatcgaaaaaatacccagccaggcactgagaatctcttgatcaatgtctcgggcgaccttgagaataggtataatttcccttccagcgaacctcgggctaaacactcagtgaaaatacgcgcagctgacgtgagaatcctgaactggtcctcctggagtgaggctattgaatttgggagccactctgtgacccaggctggcgtgcagtggcacaacctcggctccctccaacctccatcaccccgacttaagcggttttcatgtttgagactccccgggtccgacgacggcaacctcggctcagtatatatctacgttctactcattgtcggcaccctcgtgtgcgggatcgtgctgggcttccttttcaaaaggtttttgagaattcagagattatttcctccagttcctcaaattaaagataagctgaatgataatcacgaagtggaagacgagatcatctgggaggaattcaccccagaggagggaaagggatatcgagaggaagtgttaacagttaaggagatcacctag

SEQ ID NO: 61263 - DNA, 1305 bp, Artificial Sequence
  derived and/or modified sequence
atgctgctgctggtgaccagcctgctgctgtgtgagctgccccacccagccttcctgctgatccctgagaagagtgacctgaggacagtggccccagccagcagcctgaatgtgcgctttgacagcaggaccatgaacctgtcctgggactgccaggagaacaccaccttcagcaagtgcttcctgacagacaagaagaacagagtggtggagccccggctgagcaacaatgaatgtagctgcaccttccgggagatctgcctgcatgaaggagtgacctttgaggtgcacgtgaacaccagccagaggggcttccagcagaagctgctgtaccccaacagcggccgggagggcacagctgcccagaacttcagctgcttcatctacaatgctgacctgatgaactgcacctgggcccggggccccacagcccccagagatgtgcagtacttcctgtacatccggaacagcaagagaagaagagagatccgctgcccctactacatccaggacagcggcacccacgtgggctgccacctggacaacctgagcggcctgaccagcaggaactacttcctggtgaatggcaccagccgggagatcggcatccagttctttgacagcctgctggacaccaagaagattgagcgcttcaacccccccagcaatgtgacagtgcgctgcaacaccacccactgcctggtgcgctggaagcagcccaggacctaccagaagctgagctacctggacttccagtaccagctggatgtgcacaggaagaacacccagcccggcacagagaacctgctgatcaacgtgtctggggacctggagaaccgctacaacttccccagcagcgagccccgggccaagcacagcgtgaagatccgggctgctgatgtgcgcatcctgaactggagctcctggagcgaggccattgaatttggcagccacagcgtgacccaggccggcgtgcagtggcacaacctgggcagcctgcagccccccagcccccggctgaagcgcttcagctgcctgcggctgcccggcagtgatgatggcaacctgggctctgtgtacatctacgtgctgctgattgtgggcaccctggtgtgtggcatcgtgctgggcttcctgttcaagcgcttcctgcgcatccagaggctcttcccccctgtgccccagatcaaggacaagctgaatgacaaccacgaggtggaggatgagatcatctgggaggagttcaccccagaggagggcaagggctaccgggaggaggtgctgactgtgaaggagatcacctag

SEQ ID NO: 61264 - DNA, 1305 bp, Artificial Sequence
  derived and/or modified sequence
atgctgctgctggtgaccagcctgctgctgtgcgagctgccccaccctgccttcctcttaatcccagagaaatctgacctccgtacagtggctcctgcaagttctctgaacgtgcgcttcgatagtagaactatgaacctgtcctgggattgtcaggaaaatacaacattttctaagtgcttcctgactgataaaaaaaatcgagtggtagagccccgattgtccaacaacgagtgttcatgtacattccgcgaaatatgtttacatgagggagtcacctttgaagtgcatgtcaatacctcgcagagaggatttcagcagaagctcctttatcccaactccggacgcgaaggtactgctgcacaaaatttttcttgtttcatttataatgccgacttaatgaattgcacatgggcgcgggggcctactgctcctcgcgatgttcagtatttcctgtatatccgaaatagtaagcgccgtcgcgagatcagatgcccctattatattcaagattcagggacgcacgtaggatgtcacctcgacaacttgtctggcctcacttctcgcaactacttcctagttaatgggaccagtcgcgagattggcattcagttttttgattctctactggacactaaaaagatcgaaagatttaatccaccgtccaatgttaccgtccggtgtaacacaactcactgtttggtgagatggaagcaacctagaacctatcagaagttgtcttaccttgatttccagtaccagctcgatgtgcaccgcaagaatacccagccggggactgagaacctgttgataaatgtgtcaggagacctggagaaccggtataacttcccatcttccgaaccccgagctaaacacagtgtcaaaattcgagctgccgatgtgcggatcctgaactggtcttcttggtcagaggccattgaatttggctctcattcagtgacacaggctggggtgcaatggcataacctcggcagcctgcaaccgccatcgccgagactgaaacgcttcagttgtcttcggctgcctggatctgatgatgggaatttgggatcagtttacatttatgtcctactgatagtgggaaccttagtatgcggaatcgtcctcggattccttttcaaaaggttcctgcggatacagcgcttgttcccgcccgtccctcaaataaaagataaactgaacgataaccacgaggtggaggatgagatcatttgggaagagttcacacccgaagaaggcaaaggatatcgggaggaggtgctgaccgtcaaagagatcacatag

SEQ ID NO: 61265 - DNA, 1305 bp, Artificial Sequence
  derived and/or modified sequence
atgctgctgttggtcacctccctgttgctatgtgaattacctcacccagctttcctcttgatcccagaaaagagcgacctgcgtactgtcgcacccgcaagctctctgaatgtccgattcgattccagaactatgaacctatcctgggattgtcaagagaatacaacttttagtaagtgcttcctcacagacaagaaaaacagagtcgttgaacccagattgtctaataatgagtgcagttgcactttccgagaaatctgcttacatgagggcgttacctttgaagtgcacgttaatacgtcacagcgcggatttcaacagaaactgctgtaccctaacagtggcagggaaggcactgccgctcaaaacttttcatgtttcatctacaatgccgatctcatgaactgtacctgggccagaggtcccacagctccgagagacgttcaatactttctgtacattaggaatagtaaacgtaggcgtgaaatccgctgcccctactacatccaggacagtgggacacacgttggatgccacctcgacaacctgagcgggttgacctctcgcaactactttttggttaacggaacgtcgagagaaattggcatccagttttttgattcactgttagacactaaaaaaatcgaacgatttaatccgccttctaacgtcaccgtgaggtgcaacaccacccactgtctagtgcgatggaaacaacccagaacatatcagaaactctcttatctggacttccaataccagctcgatgtgcatcggaagaacacacaacctggtaccgaaaatcttctgattaacgtaagtggcgacctggagaatcgatataactttcctagctccgagccccgagcgaaacattcagtgaaaattagagccgcagacgtcagaatcctgaactggagctcgtggagcgaagccatcgagtttggcagtcactctgtgacccaggccggtgtccagtggcacaacctcggttctctgcagcctccatctccgaggttgaaacgcttttcttgtttgagactgcccggaagcgacgatgggaatctcggctcagtctacatctatgtgttgctcatcgtggggactctcgtttgcggtattgtgctcggctttcttttcaagcggtttctgcgtatacaacggctgtttcctcccgtgccgcagatcaaggacaaattaaatgacaaccacgaggtggaggatgaaattatttgggaagagtttacaccagaagaaggaaagggatatagggaggaagtcctgactgtgaaagagattacatag

SEQ ID NO: 61266 - DNA, 1787 bp, Artificial Sequence
  derived and/or modified sequence
ctcttcccttctctctgaccagcaccatgcttctcctggtgacaagccttctgctctgtgagttaccacacccagcattcctcctgatcccagagaaatcggatctgcgaacagtggcaccagcctctagtctcaatgtgaggtttgactccaggacgatgaatttaagctgggactgccaagaaaacacaaccttcagcaagtgtttcttaactgacaagaagaacagagtcgtggaacccaggctcagtaacaacgaatgttcgtgcacatttcgtgaaatttgtctgcatgaaggagtcacatttgaggttcacgtgaatactagtcaaagaggatttcaacagaaactgctttatccaaattcaggaagggagggtaccgctgctcagaatttctcctgtttcatctacaatgcggatttaatgaactgtacctgggcgaggggtccgacggccccccgtgacgtccagtattttttgtacatacgaaactcaaagagaaggagggagatccggtgtccttattacatacaagactcaggaacccatgtgggatgtcacctggataacctgtcaggattaacgtctcgcaattactttctggttaacggaaccagccgagaaattggcatccaattctttgattcacttttggacacaaagaaaatagaacgattcaaccctcccagcaatgtcaccgtacgttgcaacacgacgcactgcctcgtacggtggaaacagcccaggacctatcagaagctgtcgtacctggactttcagtaccagctggacgtccacagaaagaatacccagcctggcacggaaaacctactgattaatgtttctggtgatttggaaaatagatacaactttccaagctctgagcccagagcaaaacacagtgtgaagatcagagctgcagacgtccgcatcttgaattggagctcctggagtgaagccattgaatttgggtctcactctgtcacccaggctggagtgcaatggcacaatctcggctcactgcaacctccgtctcccaggctcaagcgattctcctgcctcagactcccaggttctgacgacgggaacctcggctctgtgtacatttatgtgctcctaatcgtgggaacccttgtctgtggcatcgtcctcggcttcctctttaaaaggttccttaggatacagcggctgttcccgccagttccacagatcaaagacaaactgaatgataaccatgaggtggaagacgagatcatctgggaggaattcaccccagaggaagggaaaggctaccgcgaagaggtcttgaccgtgaaggaaattacctgagacccagagggtgtaggaatggcatggacatctccgcctccgcgacacgggggaactgttttcttgatgatgctgtgaacctttatatcattttctatgtttttatttaaaaacatgacatttggggccaggcgcggtggctcacgcctgtaatcccagcactttgggaggccaaggcaggcggatcacctgaggtcaggagttcaagaccagcctgcccaacatggtgaaaccccatctggactaaaaatgcagaaatttacccaggcacggcggcggacgcccatcatcccagctacttgggaggctgaggcaggagaattgcttgaacccgtgaggcggaggttgtagtgagccaagatcgcaccattgcacaccaacctgcgtgacagagcaagattgcatctcaaaacaaacaataataataaataataaaaacctgatatttggctgggc

SEQ ID NO: 61267 - DNA, 1305 bp, Artificial Sequence
  derived and/or modified sequence
atgctgctgctggtgaccagcctgctgctgtgcgagctgccccaccccgccttcctgctgatccccgagaagagcgacctgagaaccgtggcccccgccagcagcctgaacgtgagattcgacagcagaaccatgaacctgagctgggactgccaggagaacaccaccttcagcaagtgcttcctgaccgacaagaagaacagagtggtggagcccagactgagcaacaacgagtgcagctgcaccttcagagagatctgcctgcacgagggcgtgaccttcgaggtgcacgtgaacaccagccagagaggcttccagcagaagctgctgtaccccaacagcggcagagagggcaccgccgcccagaacttcagctgcttcatctacaacgccgacctgatgaactgcacctgggccagaggccccaccgcccccagagacgtgcagtacttcctgtacatcagaaacagcaagagaagaagagagatcagatgcccctactacatccaggacagcggcacccacgtgggctgccacctggacaacctgagcggcctgaccagcagaaactacttcctggtgaacggcaccagcagagagatcggcatccagttcttcgacagcctgctggacaccaagaagatcgagagattcaacccccccagcaacgtgaccgtgagatgcaacaccacccactgcctggtgagatggaagcagcccagaacctaccagaagctgagctacctggacttccagtaccagctggacgtgcacagaaagaacacccagcccggcaccgagaacctgctgatcaacgtgagcggcgacctggagaacagatacaacttccccagcagcgagcccagagccaagcacagcgtgaagatcagagccgccgacgtgagaatcctgaactggagcagctggagcgaggccatcgagttcggcagccacagcgtgacccaggccggcgtgcagtggcacaacctgggcagcctgcagccccccagccccagactgaagagattcagctgcctgagactgcccggcagcgacgacggcaacctgggcagcgtgtacatctacgtgctgctgatcgtgggcaccctggtgtgcggcatcgtgctgggcttcctgttcaagagattcctgagaatccagagactgttcccccccgtgccccagatcaaggacaagctgaacgacaaccacgaggtggaggacgagatcatctgggaggagttcacccccgaggagggcaagggctacagagaggaggtgctgaccgtgaaggagatcacctag

SEQ ID NO: 61268 - DNA, 804 bp, Artificial Sequence
  derived and/or modified sequence
atgaactgcacgtgggcgcgggggcccacggcccctagggatgttcaatattttctgtacattcgtaacagtaaacgaaggagagagatccgttgtccctactatattcaagacagcggcacacatgtaggatgtcatctggataacctgtcgggactcacttcacgaaattactttttggtcaacggaacttctcgcgagatagggattcagttcttcgattcattgctagacaccaaaaagattgaacgctttaatcccccgtcaaacgtgaccgtaagatgtaatacaactcattgcttggtccggtggaaacagccacgaacctatcagaagcttagttacctagacttccagtaccagctggatgttcatagaaagaacacgcaacccggaacagagaacctcctgataaatgtgtccggggacttggaaaatcgatacaacttcccctcttcagagccacgggctaagcactctgttaaaatacgcgccgccgacgtgcggatcctgaattggagttcttggagcgaagccatcgagttcggttctgatgacggaaatctcggtagtgtgtacatttacgttctgttgattgtgggaacactcgtgtgtggtattgtactgggcttcctgtttaagagattcctgagaatacagaggttgtttccacccgttccccagattaaggacaaattaaatgacaatcacgaagtggaggacgaaatcatctgggaggaatttacgcccgaagagggcaaaggctatagagaggaagtcctgaccgtcaaagagattacttag

SEQ ID NO: 61269 - DNA, 804 bp, Artificial Sequence
  derived and/or modified sequence
atgaactgcacctgggcccggggccccacagcccccagagatgtgcagtacttcctgtacatccggaacagcaagagaagaagagagatccgctgcccctactacatccaggacagcggcacccacgtgggctgccacctggacaacctgagcggcctgaccagcaggaactacttcctggtgaatggcaccagccgggagatcggcatccagttctttgacagcctgctggacaccaagaagattgagcgcttcaacccccccagcaatgtgacagtgcgctgcaacaccacccactgcctggtgcgctggaagcagcccaggacctaccagaagctgagctacctggacttccagtaccagctggatgtgcacaggaagaacacccagcctggaacagagaacctgctgatcaacgtgtctggggacctggagaaccgctacaacttccccagcagcgagccccgggccaagcacagcgtgaagatccgggcagcagatgtgcgcatcctgaactggagctcctggagcgaggccatcgagtttggaagtgatgatggcaacctgggctctgtgtacatctacgtgctgctgattgtgggcaccctggtgtgtggcatcgtgctgggcttcctgttcaagcgcttcctgcgcatccagaggctcttcccccctgtgccccagatcaaggacaagctgaatgacaaccacgaggtggaggatgagatcatctgggaggagttcaccccagaggagggcaagggctaccgggaggaggtgctgactgtgaaggagatcacctag

SEQ ID NO: 61270 - DNA, 804 bp, Artificial Sequence
  derived and/or modified sequence
atgaactgcacctgggcccggggccccaccgccccccgggacgtgcagtactttttatacatccgcaattcaaaacggagacgggagattcggtgtccatattatatccaagattctggaacacatgtgggatgccatcttgataatctgagtggcttgacgagccggaattactttctcgttaacggcaccagtagagagattgggatccagtttttcgattcccttcttgacacgaagaaaatcgagaggtttaatccaccctccaatgtgacagtacgatgcaacaccacccactgcttagtgaggtggaagcaaccacgcacataccagaagctgtcttatttagacttccagtaccagctcgacgtgcatagaaagaatacgcaacccggcaccgagaacctccttatcaatgtttcgggggacctcgaaaatcgctacaattttccaagctccgaacctcgggcgaagcattccgtgaaaatacgggccgctgatgtgaggatcctcaattggtcctcttggagcgaggctattgagtttggaagtgatgacggcaacctcgggtccgtttatatctacgtgctgctgatcgtgggtacccttgtatgcggcatcgttttgggctttttatttaagcgcttcctgcgaatccagcgccttttccccccagtgccccagatcaaggacaagctcaatgataaccatgaagtggaggacgaaattatctgggaagagtttaccccagaggaaggcaagggctacagagaagaggttcttacagtcaaagagataacatag

SEQ ID NO: 61271 - DNA, 804 bp, Artificial Sequence
  derived and/or modified sequence
atgaattgtacctgggcacggggtccgacagccccacgggatgtgcagtattttctttacatcagaaacagcaaacgacgaagggagattaggtgtccctactacatccaggactcaggcacacatgtcggttgtcatttggacaatctgagtgggctcacatccagaaactactttctggttaatggcacctcacgtgagatcggaatccagtttttcgatagtctgctagatacaaagaagatcgaaaggttcaaccccccttcaaatgtgaccgtccggtgtaataccacgcactgtctcgtgaggtggaagcagccccgtacttaccaaaaactgtcatatctggactttcagtaccagctggatgtgcatcggaaaaatactcagccaggtaccgagaatctcctgatcaacgtctcaggtgacctcgagaatcgatacaatttcccgagctccgagccaagggcaaaacactccgtaaagatacgggcagccgatgtacgtatactgaattggtccagctggtcagaagcgatcgaattcggatctgatgacggcaatcttggctccgtgtatatctatgtacttctgattgtaggcactctggtctgcggcattgtgctcggcttcttattcaaaagatttctgagaatccagcggctgttcccacctgttcctcagattaaagataaactgaatgataaccacgaggtggaggacgaaatcatctgggaggagttcacccccgaagagggcaagggatatcgcgaagaggtgttgactgtgaaggaaataacttag

SEQ ID NO: 61272 - DNA, 804 bp, Artificial Sequence
  derived and/or modified sequence
atgaactgcacctgggccagaggccccaccgcccccagagacgtgcagtacttcctgtacatcagaaacagcaagagaagaagagagatcagatgcccctactacatccaggacagcggcacccacgtgggctgccacctggacaacctgagcggcctgaccagcagaaactacttcctggtgaacggcaccagcagagagatcggcatccagttcttcgacagcctgctggacaccaagaagatcgagagattcaacccccccagcaacgtgaccgtgagatgcaacaccacccactgcctggtgagatggaagcagcccagaacctaccagaagctgagctacctggacttccagtaccagctggacgtgcacagaaagaacacccagcccggcaccgagaacctgctgatcaacgtgagcggcgacctggagaacagatacaacttccccagcagcgagcccagagccaagcacagcgtgaagatcagagccgccgacgtgagaatcctgaactggagcagctggagcgaggccatcgagttcggcagcgacgacggcaacctgggcagcgtgtacatctacgtgctgctgatcgtgggcaccctggtgtgcggcatcgtgctgggcttcctgttcaagagattcctgagaatccagagactgttcccccccgtgccccagatcaaggacaagctgaacgacaaccacgaggtggaggacgagatcatctgggaggagttcacccccgaggagggcaagggctacagagaggaggtgctgaccgtgaaggagatcacctag

SEQ ID NO: 61273 - protein, 1352 aa, Artificial Sequence
  derived and/or modified sequence
MASDSPARSLDEIDLSALRDPAGIFELVELVGNGTYGQVYKGRHVKTGQLAAIKVMDVTGDEEEEIKQEINMLKKYSHHRNIATYYGAFIKKNPPGMDDQLWLVMEFCGAGSVTDLIKNTKGNTLKEEWIAYICREILRGLSHLHQHKVIHRDIKGQNVLLTENAEVKLVDFGVSAQLDRTVGRRNTFIGTPYWMAPEVIACDENPDATYDFKSDLWSLGITAIEMAEGAPPLCDMHPMRALFLIPRNPAPRLKSKKWSKKFQSFIESCLVKNHSQRPATEQLMKHPFIRDQPNERQVRIQLKDHIDRTKKKRGEKDETEYEYSGSEEEEEENDSGEPSSILNLPGESTLRRDFLRLQLANKERSEALRRQQLEQQQRENEEHKRQLLAERQKRIEEQKEQRRRLEEQQRREKELRKQQEREQRRHYEEQMRREEERRRAEHEQEYIRRQLEEEQRQLEILQQQLLHEQALLLEYKRKQLEEQRQAERLQRQLKQERDYLVSLQHQRQEQRPVEKKPLYHYKEGMSPSEKPAWAKEVEERSRLNRQSSPAMPHKVANRISDPNLPPRSESFSISGVQPARTPPMLRPVDPQIPHLVAVKSQGPALTASQSVHEQPTKGLSGFQEALNVTSHRVEMPRQNSDPTSENPPLPTRIEKFDRSSWLRQEEDIPPKVPQRTTSISPALARKNSPGNGSALGPRLGSQPIRASNPDLRRTEPILESPLQRTSSGSSSSSSTPSSQPSSQGGSQPGSQAGSSERTRVRANSKSEGSPVLPHEPAKVKPEESRDITRPSRPADLTALAKELRELRIEETNRPMKKVTDYSSSSEESESSEEEEEDGESETHDGTVAVSDIPRLIPTGAPGSNEQYNVGMVGTHGLETSHADSFSGSISREGTLMIRETSGEKKRSGHSDSNGFAGHINLPDLVQQSHSPAGTPTEGLGRVSTHSQEMDSGTEYGMGSSTKASFTPFVDPRVYQTSPTDEDEEDEESSAAALFTSELLRQEQAKLNEARKISVVNVNPTNIRPHSDTPEIRKYKKRFNSEILCAALWGVNLLVGTENGLMLLDRSGQGKVYNLINRRRFQQMDVLEGLNVLVTISGKKNKLRVYYLSWLRNRILHNDPEVEKKQGWITVGDLEGCIHYKVVKYERIKFLVIALKNAVEIYAWAPKPYHKFMAFKSFADLQHKPLLVDLTVEEGQRLKVIFGSHTGFHVIDVDSGNSYDIYIPSHIQGNITPHAIVILPKTDGMEMLVCYEDEGVYVNTYGRITKDVVLQWGEMPTSVAYIHSNQIMGWGEKAIEIRSVETGHLDGVFMHKRAQRLKFLCERNDKVFFASVRSGGSSQVFFMTLNRNSMMNW

SEQ ID NO: 61274 - protein, 1331 aa, Artificial Sequence
  derived and/or modified sequence
MASDSPARSLDEIDLSALRDPAGIFELVELVGNGTYGQVYKGRHVKTGQLAAIKVMDVTGDEEEEIKQEINMLKKYSHHRNIATYYGAFIKKNPPGMDDQLWLVMEFCGAGSVTDLIKNTKGNTLKEEWIAYICREILRGLSHLHQHKVIHRDIKGQNVLLTENAEVKLVDFGVSAQLDRTVGRRNTFIGTPYWMAPEVIACDENPDATYDFKSDLWSLGITAIEMAEGAPPLCDMHPMRALFLIPRNPAPRLKSKKWSKKFQSFIESCLVKNHSQRPATEQLMKHPFIRDQPNERQVRIQLKDHIDRTKKKRGEKDETEYEYSGSEEEEEENDSGEPSSILNLPGESTLRRDFLRLQLANKERSEALRRQQLEQQQRENEEHKRQLLAERQKRIEEQKEQRRRLEEQQRREKELRKQQEREQRRHYEEQMRREEERRRAEHEQEYKRKQLEEQRQAERLQRQLKQERDYLVSLQHQRQEQRPVEKKPLYHYKEGMSPSEKPAWAKEVEERSRLNRQSSPAMPHKVANRISDPNLPPRSESFSISGVQPARTPPMLRPVDPQIPHLVAVKSQGPALTASQSVHEQPTKGLSGFQEALNVTSHRVEMPRQNSDPTSENPPLPTRIEKFDRSSWLRQEEDIPPKVPQRTTSISPALARKNSPGNGSALGPRLGSQPIRASNPDLRRTEPILESPLQRTSSGSSSSSSTPSSQPSSQGGSQPGSQAGSSERTRVRANSKSEGSPVLPHEPAKVKPEESRDITRPSRPASYKKAIDEDLTALAKELRELRIEETNRPMKKVTDYSSSSEESESSEEEEEDGESETHDGTVAVSDIPRLIPTGAPGSNEQYNVGMVGTHGLETSHADSFSGSISREGTLMIRETSGEKKRSGHSDSNGFAGHINLPDLVQQSHSPAGTPTEGLGRVSTHSQEMDSGTEYGMGSSTKASFTPFVDPRVYQTSPTDEDEEDEESSAAALFTSELLRQEQAKLNEARKISVVNVNPTNIRPHSDTPEIRKYKKRFNSEILCAALWGVNLLVGTENGLMLLDRSGQGKVYNLINRRRFQQMDVLEGLNVLVTISGKKNKLRVYYLSWLRNRILHNDPEVEKKQGWITVGDLEGCIHYKVVKYERIKFLVIALKNAVEIYAWAPKPYHKFMAFKSFADLQHKPLLVDLTVEEGQRLKVIFGSHTGFHVIDVDSGNSYDIYIPSHIQGNITPHAIVILPKTDGMEMLVCYEDEGVYVNTYGRITKDVVLQWGEMPTSVAYIHSNQIMGWGEKAIEIRSVETGHLDGVFMHKRAQRLKFLCERNDKVFFASVRSGGSSQVFFMTLNRNSMMNW

SEQ ID NO: 61275 - protein, 1338 aa, Artificial Sequence
  derived and/or modified sequence
MASDSPARSLDEIDLSALRDPAGIFELVELVGNGTYGQVYKGRHVKTGQLAAIKVMDVTGDEEEEIKQEINMLKKYSHHRNIATYYGAFIKKNPPGMDDQLWLVMEFCGAGSVTDLIKNTKGNTLKEEWIAYICREILRGLSHLHQHKVIHRDIKGQNVLLTENAEVKIVDFGVSAQLDRTVGRRNTFIGTPYWMAPEVIACDENPDATYDFKSDLWSLGITAIEMAEGAPPLCDMHPMRALFLIPRNPAPRLKSKKWSKKFQSFIESCLVKNHSQRPATEQLMKHPFIRDQPNERQVRIQLKDHIDRTKKKRGEKDETEYEYSGSEEEEEENDSGEPSSILNLPGESTLRRDFLRLQLANKERSEALRRQQLEQQQRENEEHKRQLLAERQKRIEEQKEQRRRLEEQQRREKELRKQQEREQRRHYEEQMRREEERRRAEHEQEYKRKQLEEQRQAERLQRQLKQERDYLVSLQHQRQEQRPVEKKPLYHYKEGMSPSEKPAWAKEVEERSRLNRQSSPAMPHKVANRISDPNLPPRSESFSISGVQPARTPPMLRPVDPQIPHLVAVKSQGPALTASQSVHEQPTKGLSGFQEALNVTSHRVEMPRQNSDPTSENPPLPTRIEKFDRSSWLRQEEDIPPKVPQRTTSISPALARKNSPGNGSALGPRLGSQPIRASNPDLRRTEPILESPLQRTSSGSSSSSSTPSSQPSSQGGSQPGSQAGSSERTRVRANSKSEGSPVLPHEPAKVKPEESRDITRPSRPAVSAFLSKSFELLIYQDLTALAKELRELRIEETNRPMKKVTDYSSSSEESESSEEEEEDGESETHDGTVAVSDIPRLIPTGAPGSNEQYNVGMVGTHGLETSHADSFSGSISREGTLMIRETSGEKKRSGHSDSNGFAGHINLPDLVQQSHSPAGTPTEGLGRVSTHSQEMDSGTEYGMGSSTKASFTPFVDPRVYQTSPTDEDEEDEESSAAALFTSELLRQEQAKLNEARKISVVNVNPTNIRPHSDTPEIRKYKKRFNSEILCAALWGVNLLVGTENGLMLLDRSGQGKVYNLINRRRFQQMDVLEGLNVLVTISGKKNKLRVYYLSWLRNRILHNDPEVEKKQGWITVGDLEGCIHYKVVKYERIKFLVIALKNAVEIYAWAPKPYHKFMAFKSFADLQHKPLLVDLTVEEGQRLKVIFGSHTGFHVIDVDSGNSYDIYIPSHIQGNITPHAIVILPKTDGMEMLVCYEDEGVYVNTYGRITKDVVLQWGEMPTSVAYIHSNQIMGWGEKAIEIRSVETGHLDGVFMHKRAQRLKFLCERNDKVFFASVRSGGSSQVFFMTLNRNSMMNW

SEQ ID NO: 61276 - protein, 1323 aa, Artificial Sequence
  derived and/or modified sequence
MASDSPARSLDEIDLSALRDPAGIFELVELVGNGTYGQVYKGRHVKTGQLAAIKVMDVTGDEEEEIKQEINMLKKYSHHRNIATYYGAFIKKNPPGMDDQLWLVMEFCGAGSVTDLIKNTKGNTLKEEWIAYICREILRGLSHLHQHKVIHRDIKGQNVLLTENAEVKLVDFGVSAQLDRTVGRRNTFIGTPYWMAPEVIACDENPDATYDFKSDLWSLGITAIEMAEGAPPLCDMHPMRALFLIPRNPAPRLKSKKWSKKFQSFIESCLVKNHSQRPATEQLMKHPFIRDQPNERQVRIQLKDHIDRTKKKRGEKDETEYEYSGSEEEEEENDSGEPSSILNLPGESTLRRDFLRLQLANKERSEALRRQQLEQQQRENEEHKRQLLAERQKRIEEQKEQRRRLEEQQRREKELRKQQEREQRRHYEEQMRREEERRRAEHEQEYKRKQLEEQRQAERLQRQLKQERDYLVSLQHQRQEQRPVEKKPLYHYKEGMSPSEKPAWAKEVEERSRLNRQSSPAMPHKVANRISDPNLPPRSESFSISGVQPARTPPMLRPVDPQIPHLVAVKSQGPALTASQSVHEQPTKGLSGFQEALNVTSHRVEMPRQNSDPTSENPPLPTRIEKFDRSSWLRQEEDIPPKVPQRTTSISPALARKNSPGNGSALGPRLGSQPIRASNPDLRRTEPILESPLQRTSSGSSSSSSTPSSQPSSQGGSQPGSQAGSSERTRVRANSKSEGSPVLPHEPAKVKPEESRDITRPSRPADLTALAKELRELRIEETNRPMKKVTDYSSSSEESESSEEEEEDGESETHDGTVAVSDIPRLIPTGAPGSNEQYNVGMVGTHGLETSHADSFSGSISREGTLMIRETSGEKKRSGHSDSNGFAGHINLPDLVQQSHSPAGTPTEGLGRVSTHSQEMDSGTEYGMGSSTKASFTPFVDPRVYQTSPTDEDEEDEESSAAALFTSELLRQEQAKLNEARKISVVNVNPTNIRPHSDTPEIRKYKKRFNSEILCAALWGVNLLVGTENGLMLLDRSGQGKVYNLINRRRFQQMDVLEGLNVLVTISGKKNKLRVYYLSWLRNRILHNDPEVEKKQGWITVGDLEGCIHYKVVKYERIKFLVIALKNAVEIYAWAPKPYHKFMAFKSFADLQHKPLLVDLTVEEGQRLKVIFGSHTGFHVIDVDSGNSYDIYIPSHIQGNITPHAIVILPKTDGMEMLVCYEDEGVYVNTYGRITKDVVLQWGEMPTSVAYIHSNQIMGWGEKAIEIRSVETGHLDGVFMHKRAQRLKFLCERNDKVFFASVRSGGSSQVFFMTLNRNSMMNW

SEQ ID NO: 61277 - DNA, 4059 bp, Artificial Sequence
  derived and/or modified sequence
atggccagcgacagccccgccagaagcctggacgagatcgacctgagcgccctgagagaccccgccggcatcttcgagctggtggagctggtgggcaacggcacctacggccaggtgtacaagggcagacacgtgaagaccggccagctggccgccatcaaggtgatggacgtgaccggcgacgaggaggaggagatcaagcaggagatcaacatgctgaagaagtacagccaccacagaaacatcgccacctactacggcgccttcatcaagaagaacccccccggcatggacgaccagctgtggctggtgatggagttctgcggcgccggcagcgtgaccgacctgatcaagaacaccaagggcaacaccctgaaggaggagtggatcgcctacatctgcagagagatcctgagaggcctgagccacctgcaccagcacaaggtgatccacagagacatcaagggccagaacgtgctgctgaccgagaacgccgaggtgaagctggtggacttcggcgtgagcgcccagctggacagaaccgtgggcagaagaaacaccttcatcggcaccccctactggatggcccccgaggtgatcgcctgcgacgagaaccccgacgccacctacgacttcaagagcgacctgtggagcctgggcatcaccgccatcgagatggccgagggcgccccccccctgtgcgacatgcaccccatgagagccctgttcctgatccccagaaaccccgcccccagactgaagagcaagaagtggagcaagaagttccagagcttcatcgagagctgcctggtgaagaaccacagccagagacccgccaccgagcagctgatgaagcaccccttcatcagagaccagcccaacgagagacaggtgagaatccagctgaaggaccacatcgacagaaccaagaagaagagaggcgagaaggacgagaccgagtacgagtacagcggcagcgaggaggaggaggaggagaacgacagcggcgagcccagcagcatcctgaacctgcccggcgagagcaccctgagaagagacttcctgagactgcagctggccaacaaggagagaagcgaggccctgagaagacagcagctggagcagcagcagagagagaacgaggagcacaagagacagctgctggccgagagacagaagagaatcgaggagcagaaggagcagagaagaagactggaggagcagcagagaagagagaaggagctgagaaagcagcaggagagagagcagagaagacactacgaggagcagatgagaagagaggaggagagaagaagagccgagcacgagcaggagtacatcagaagacagctggaggaggagcagagacagctggagatcctgcagcagcagctgctgcacgagcaggccctgctgctggagtacaagagaaagcagctggaggagcagagacaggccgagagactgcagagacagctgaagcaggagagagactacctggtgagcctgcagcaccagagacaggagcagagacccgtggagaagaagcccctgtaccactacaaggagggcatgagccccagcgagaagcccgcctgggccaaggaggtggaggagagaagcagactgaacagacagagcagccccgccatgccccacaaggtggccaacagaatcagcgaccccaacctgccccccagaagcgagagcttcagcatcagcggcgtgcagcccgccagaaccccccccatgctgagacccgtggacccccagatcccccacctggtggccgtgaagagccagggccccgccctgaccgccagccagagcgtgcacgagcagcccaccaagggcctgagcggcttccaggaggccctgaacgtgaccagccacagagtggagatgcccagacagaacagcgaccccaccagcgagaacccccccctgcccaccagaatcgagaagttcgacagaagcagctggctgagacaggaggaggacatcccccccaaggtgccccagagaaccaccagcatcagccccgccctggccagaaagaacagccccggcaacggcagcgccctgggccccagactgggcagccagcccatcagagccagcaaccccgacctgagaagaaccgagcccatcctggagagccccctgcagagaaccagcagcggcagcagcagcagcagcagcacccccagcagccagcccagcagccagggcggcagccagcccggcagccaggccggcagcagcgagagaaccagagtgagagccaacagcaagagcgagggcagccccgtgctgccccacgagcccgccaaggtgaagcccgaggagagcagagacatcaccagacccagcagacccgccgacctgaccgccctggccaaggagctgagagagctgagaatcgaggagaccaacagacccatgaagaaggtgaccgactacagcagcagcagcgaggagagcgagagcagcgaggaggaggaggaggacggcgagagcgagacccacgacggcaccgtggccgtgagcgacatccccagactgatccccaccggcgcccccggcagcaacgagcagtacaacgtgggcatggtgggcacccacggcctggagaccagccacgccgacagcttcagcggcagcatcagcagagagggcaccctgatgatcagagagaccagcggcgagaagaagagaagcggccacagcgacagcaacggcttcgccggccacatcaacctgcccgacctggtgcagcagagccacagccccgccggcacccccaccgagggcctgggcagagtgagcacccacagccaggagatggacagcggcaccgagtacggcatgggcagcagcaccaaggccagcttcacccccttcgtggaccccagagtgtaccagaccagccccaccgacgaggacgaggaggacgaggagagcagcgccgccgccctgttcaccagcgagctgctgagacaggagcaggccaagctgaacgaggccagaaagatcagcgtggtgaacgtgaaccccaccaacatcagaccccacagcgacacccccgagatcagaaagtacaagaagagattcaacagcgagatcctgtgcgccgccctgtggggcgtgaacctgctggtgggcaccgagaacggcctgatgctgctggacagaagcggccagggcaaggtgtacaacctgatcaacagaagaagattccagcagatggacgtgctggagggcctgaacgtgctggtgaccatcagcggcaagaagaacaagctgagagtgtactacctgagctggctgagaaacagaatcctgcacaacgaccccgaggtggagaagaagcagggctggatcaccgtgggcgacctggagggctgcatccactacaaggtggtgaagtacgagagaatcaagttcctggtgatcgccctgaagaacgccgtggagatctacgcctgggcccccaagccctaccacaagttcatggccttcaagagcttcgccgacctgcagcacaagcccctgctggtggacctgaccgtggaggagggccagagactgaaggtgatcttcggcagccacaccggcttccacgtgatcgacgtggacagcggcaacagctacgacatctacatccccagccacatccagggcaacatcaccccccacgccatcgtgatcctgcccaagaccgacggcatggagatgctggtgtgctacgaggacgagggcgtgtacgtgaacacctacggcagaatcaccaaggacgtggtgctgcagtggggcgagatgcccaccagcgtggcctacatccacagcaaccagatcatgggctggggcgagaaggccatcgagatcagaagcgtggagaccggccacctggacggcgtgttcatgcacaagagagcccagagactgaagttcctgtgcgagagaaacgacaaggtgttcttcgccagcgtgagaagcggcggcagcagccaggtgttcttcatgaccctgaacagaaacagcatgatgaactggtag

SEQ ID NO: 61278 - DNA, 3972 bp, Artificial Sequence
  derived and/or modified sequence
atggccagcgacagccccgccagaagcctggacgagatcgacctgagcgccctgagagaccccgccggcatcttcgagctggtggagctggtgggcaacggcacctacggccaggtgtacaagggcagacacgtgaagaccggccagctggccgccatcaaggtgatggacgtgaccggcgacgaggaggaggagatcaagcaggagatcaacatgctgaagaagtacagccaccacagaaacatcgccacctactacggcgccttcatcaagaagaacccccccggcatggacgaccagctgtggctggtgatggagttctgcggcgccggcagcgtgaccgacctgatcaagaacaccaagggcaacaccctgaaggaggagtggatcgcctacatctgcagagagatcctgagaggcctgagccacctgcaccagcacaaggtgatccacagagacatcaagggccagaacgtgctgctgaccgagaacgccgaggtgaagctggtggacttcggcgtgagcgcccagctggacagaaccgtgggcagaagaaacaccttcatcggcaccccctactggatggcccccgaggtgatcgcctgcgacgagaaccccgacgccacctacgacttcaagagcgacctgtggagcctgggcatcaccgccatcgagatggccgagggcgccccccccctgtgcgacatgcaccccatgagagccctgttcctgatccccagaaaccccgcccccagactgaagagcaagaagtggagcaagaagttccagagcttcatcgagagctgcctggtgaagaaccacagccagagacccgccaccgagcagctgatgaagcaccccttcatcagagaccagcccaacgagagacaggtgagaatccagctgaaggaccacatcgacagaaccaagaagaagagaggcgagaaggacgagaccgagtacgagtacagcggcagcgaggaggaggaggaggagaacgacagcggcgagcccagcagcatcctgaacctgcccggcgagagcaccctgagaagagacttcctgagactgcagctggccaacaaggagagaagcgaggccctgagaagacagcagctggagcagcagcagagagagaacgaggagcacaagagacagctgctggccgagagacagaagagaatcgaggagcagaaggagcagagaagaagactggaggagcagcagagaagagagaaggagctgagaaagcagcaggagagagagcagagaagacactacgaggagcagatgagaagagaggaggagagaagaagagccgagcacgagcaggagtacaagagaaagcagctggaggagcagagacaggccgagagactgcagagacagctgaagcaggagagagactacctggtgagcctgcagcaccagagacaggagcagagacccgtggagaagaagcccctgtaccactacaaggagggcatgagccccagcgagaagcccgcctgggccaaggaggtggaggagagaagcagactgaacagacagagcagccccgccatgccccacaaggtggccaacagaatcagcgaccccaacctgccccccagaagcgagagcttcagcatcagcggcgtgcagcccgccagaaccccccccatgctgagacccgtggacccccagatcccccacctggtggccgtgaagagccagggccccgccctgaccgccagccagagcgtgcacgagcagcccaccaagggcctgagcggcttccaggaggccctgaacgtgaccagccacagagtggagatgcccagacagaacagcgaccccaccagcgagaacccccccctgcccaccagaatcgagaagttcgacagaagcagctggctgagacaggaggaggacatcccccccaaggtgccccagagaaccaccagcatcagccccgccctggccagaaagaacagccccggcaacggcagcgccctgggccccagactgggcagccagcccatcagagccagcaaccccgacctgagaagaaccgagcccatcctggagagccccctgcagagaaccagcagcggcagcagcagcagcagcagcacccccagcagccagcccagcagccagggcggcagccagcccggcagccaggccggcagcagcgagagaaccagagtgagagccaacagcaagagcgagggcagccccgtgctgccccacgagcccgccaaggtgaagcccgaggagagcagagacatcaccagacccagcagacccgccgacctgaccgccctggccaaggagctgagagagctgagaatcgaggagaccaacagacccatgaagaaggtgaccgactacagcagcagcagcgaggagagcgagagcagcgaggaggaggaggaggacggcgagagcgagacccacgacggcaccgtggccgtgagcgacatccccagactgatccccaccggcgcccccggcagcaacgagcagtacaacgtgggcatggtgggcacccacggcctggagaccagccacgccgacagcttcagcggcagcatcagcagagagggcaccctgatgatcagagagaccagcggcgagaagaagagaagcggccacagcgacagcaacggcttcgccggccacatcaacctgcccgacctggtgcagcagagccacagccccgccggcacccccaccgagggcctgggcagagtgagcacccacagccaggagatggacagcggcaccgagtacggcatgggcagcagcaccaaggccagcttcacccccttcgtggaccccagagtgtaccagaccagccccaccgacgaggacgaggaggacgaggagagcagcgccgccgccctgttcaccagcgagctgctgagacaggagcaggccaagctgaacgaggccagaaagatcagcgtggtgaacgtgaaccccaccaacatcagaccccacagcgacacccccgagatcagaaagtacaagaagagattcaacagcgagatcctgtgcgccgccctgtggggcgtgaacctgctggtgggcaccgagaacggcctgatgctgctggacagaagcggccagggcaaggtgtacaacctgatcaacagaagaagattccagcagatggacgtgctggagggcctgaacgtgctggtgaccatcagcggcaagaagaacaagctgagagtgtactacctgagctggctgagaaacagaatcctgcacaacgaccccgaggtggagaagaagcagggctggatcaccgtgggcgacctggagggctgcatccactacaaggtggtgaagtacgagagaatcaagttcctggtgatcgccctgaagaacgccgtggagatctacgcctgggcccccaagccctaccacaagttcatggccttcaagagcttcgccgacctgcagcacaagcccctgctggtggacctgaccgtggaggagggccagagactgaaggtgatcttcggcagccacaccggcttccacgtgatcgacgtggacagcggcaacagctacgacatctacatccccagccacatccagggcaacatcaccccccacgccatcgtgatcctgcccaagaccgacggcatggagatgctggtgtgctacgaggacgagggcgtgtacgtgaacacctacggcagaatcaccaaggacgtggtgctgcagtggggcgagatgcccaccagcgtggcctacatccacagcaaccagatcatgggctggggcgagaaggccatcgagatcagaagcgtggagaccggccacctggacggcgtgttcatgcacaagagagcccagagactgaagttcctgtgcgagagaaacgacaaggtgttcttcgccagcgtgagaagcggcggcagcagccaggtgttcttcatgaccctgaacagaaacagcatgatgaactggtag

SEQ ID NO: 61279 - DNA, 4059 bp, Artificial Sequence
  derived and/or modified sequence
atggcctcagatagtcctgctcggagcctggatgaaatcgatctcagcgctctacgggaccctgccgggatattcgagctggtggaactggtaggaaacggcacatacggacaggtgtataagggccggcacgtcaagacagggcagctggccgcaatcaaagtgatggatgtgacaggggatgaagaagaggaaattaagcaggaaatcaatatgctcaagaagtattcccaccaccgcaacatagccacatattacggagctttcataaaaaaaaatccccctggcatggatgaccagttgtggctggttatggaattctgcggcgctggaagtgtcacggacctgattaagaacaccaaggggaacaccttgaaagaagagtggattgcctatatctgtagggagatcctgcggggcctgtcgcatctccaccagcataaggtgattcacagagacattaaaggacagaatgtcctgttaaccgaaaatgctgaggtcaagctcgttgacttcggcgtcagcgcccagctggaccgaaccgttgggcgtcgaaatacctttattggcaccccgtactggatggctcctgaggttatagcttgcgatgaaaatccagatgccacgtacgattttaaaagtgacctctggtccttgggcatcaccgctattgagatggcggaaggagcccctccactctgcgatatgcacccaatgagggcactgtttctgatcccccgcaatcctgcacctagactaaaatccaagaagtggtcaaagaagttccagtcctttatagagtcgtgtctcgtcaaaaaccattcacagaggcctgcgacagagcagctaatgaagcaccctttcattcgcgaccagccaaacgaaagacaggtgcgaatccagctcaaggaccacatcgaccgaacaaaaaagaagcggggtgagaaagacgaaaccgagtacgagtacagtggatcagaagaggaagaggaagagaacgactctggagagcctagctccatcctgaatctgcctggcgaatctaccttacgcagggactttctaaggctgcaattagccaacaaagaaagatcagaagcccttcgacgccaacaactcgaacagcaacagagggaaaatgaagaacataaaaggcagttgctggccgaaaggcaaaagagaattgaagaacagaaggagcaaagacggcgccttgaggagcaacagaggagagagaaagaattgcggaagcagcaggagagagaacagcgtagacattacgaggaacagatgcgtagggaagaagagcggagacgggctgagcacgaacaagaatatatccgaaggcagttagaggaagaacaacgtcagctggagatcctccagcaacaactcctgcacgaacaggctctgctgttggaatacaaaagaaaacagctcgaggagcaaaggcaggccgagcgcctacagcggcagctcaagcaggaacgagattacctcgtgagtttgcagcaccagcgccaggagcagagaccagtagagaaaaaaccactgtaccactataaagaaggtatgtccccctcagagaaaccagcttgggcgaaagaggttgaagaacgttcccgcctgaacaggcagagctccccggccatgcctcacaaggtggccaacagaatatccgacccgaatctgcctccccgtagcgagagcttttccattagcggcgtgcaacctgcccgtacgccaccaatgctcagacccgtggaccctcagattccccatctcgtggccgttaaaagccaagggcccgctttaacagctagtcagagcgtgcatgagcaaccaactaaggggttatccggctttcaggaggctcttaacgtgacctcacacagggtggaaatgccaagacaaaactcggaccccacgtcagagaatccaccgctccccacacgtattgaaaagtttgatcgatcctcttggctccgccaggaggaagacatccccccaaaggttcctcaaaggacgaccagcattagcccggcccttgctagaaagaacagccccggaaacggtagcgcactcggtcccaggctgggctcgcagcccatcagagcttcgaaccccgatctgcggcgaactgaaccaattctggaatcacctttgcaacgcacctccagcggaagcagcagcagcagctctaccccctcaagccaacccagctcgcagggagggtctcagcccgggtcccaggcgggctcatccgagcgcaccagagtgcgagctaactcaaaatcagaggggtctccagtacttccccacgaaccagcgaaagtcaaaccagaggaaagccgtgacatcacacgaccttctaggcctgctgatttaacggcattagcaaaagagctcagggagttgaggatcgaagagacaaaccggccaatgaagaaggtgacagactactctagctctagtgaagaatcagaaagcagcgaggaggaagaagaagatggggaaagcgagacacatgacggcaccgtcgctgtatcagatatacctagacttataccaacaggggcacccggaagcaatgagcaatataatgttggaatggttggcacgcacggactggaaactagccatgcagacagtttctcagggtctatctcacgcgaaggcaccctgatgattagggaaacatctggagaaaagaaacggtcaggacacagtgacagtaatggatttgcaggccacataaatctgcctgacctggtacagcaatcccacagccctgccggtacccccactgagggactgggaagggtgagtacccatagtcaagagatggacagtggcaccgagtatggaatggggtctagcacgaaagccagctttactccattcgtggatcccagagtctaccagacttcccctacggatgaggacgaggaggatgaggaatcctccgcggccgcattgttcacatccgagctgttacggcaggaacaggctaagttgaacgaagcgcggaagatcagtgtggtgaacgtgaatcctacgaacattcggccacactccgacacacctgaaattcgtaaatataaaaagaggtttaacagcgagattctgtgtgccgctctgtggggagtaaatcttctggtggggaccgagaacggtctcatgctgctggatagatcgggccaggggaaagtgtacaatctgattaatcgcagacggtttcaacaaatggacgtcctcgagggcctgaacgtgttagttacaatcagcggtaagaaaaataagctgcgtgtgtactatctcagttggttgaggaaccggatcctgcataacgaccctgaagtggaaaaaaaacagggatggatcactgtgggagacctggaaggatgtatccattacaaagtggtgaagtacgagagaattaaattccttgtgattgctctcaaaaatgcagtggaaatctacgcatgggctccaaagccctaccacaagttcatggcgttcaaaagtttcgccgatctgcagcataaaccattactggttgatctcaccgtcgaagagggccaaagactgaaggtcatttttggaagccacacaggatttcacgtgattgatgtggattccggtaactcatatgacatttacattccctctcacatacaaggcaatataaccccacacgcaatcgtcattctgccaaagacggacggtatggaaatgcttgtgtgttacgaggatgagggagtgtacgtgaacacctatgggcgaattactaaagatgtagtgttacaatggggagaaatgcccacctccgtggcatatatccactccaaccaaattatgggatggggagagaaggcaatcgaaattaggagcgtcgagacaggacacctggatggggtgtttatgcacaagagggcccagcggctgaagtttctgtgtgagcgcaatgataaggtcttttttgcctcggttagatcgggaggctcaagtcaggtgttttttatgaccctaaatagaaattcaatgatgaactggtag

SEQ ID NO: 61280 - DNA, 3972 bp, Artificial Sequence
  derived and/or modified sequence
atggcttcagattctcctgccagaagtctggacgagatagacttaagcgccctgcgagaccccgctgggatcttcgaacttgtcgagctggtgggaaatggaacctatggacaggtctataaaggacggcacgtgaaaactggacagctggctgcgattaaagtgatggacgttactggggacgaggaagaggagatcaagcaggagatcaacatgctgaagaaatacagccaccataggaacatagcaacatactatggtgcgttcatcaagaagaacccccctggtatggacgaccagctttggttagtgatggagttctgcggagctgggtctgtgactgacctgataaagaataccaaaggcaacactttgaaggaagaatggattgcatacatctgcagggagattctgaggggactctctcaccttcatcagcataaggtcattcacagagacatcaaggggcagaacgttctgctgaccgagaatgcagaggtgaaacttgttgacttcggagtgtcggctcagctggaccggaccgtggggcgtcggaacactttcattggcaccccatactggatggctcctgaagtgattgcatgcgacgagaaccctgacgccacctacgacttcaaatccgatctatggagcctcggcataactgccatagaaatggcagagggcgccccgccactgtgcgacatgcaccctatgcgggcgttgtttctgattcccaggaatcccgcgcccagactcaagagcaagaaatggtccaagaagttccagtcttttattgaaagctgtttagttaagaaccacagccaaaggcccgccacagagcagcttatgaagcatcctttcattagggatcaacccaatgagcggcaggtccgtattcaactcaaggaccacatagatcgcacaaagaagaaaagaggcgagaaggacgagacagagtatgagtactctggcagcgaggaagaagaggaggagaacgactctggtgaacctagttcaatactcaacctaccaggggaatctacacttaggcgggactttttaaggctgcagcttgctaacaaagagagatctgaggcattacggagacagcagctggagcagcagcagcgagagaatgaagagcataaacgccagttactggcagagcggcagaagcgtattgaagagcagaaggaacagcgtcggcgcctcgaagagcagcaaaggcgcgagaaggaactgcgcaagcagcaggagcgggagcaaaggcggcactacgaggaacagatgcggcgtgaagaggaaagacggagggccgaacatgaacaggaatataaaagaaaacaattggaagagcagaggcaggccgagaggctccagagacagcttaaacaggaacgagattaccttgttagtctgcaacaccagcggcaggagcagcggccagtcgaaaagaaaccactttaccactacaaggaaggcatgtctccttcagagaaacctgcttgggccaaggaggtagaagaaagatctcggctcaaccgccagagcagtcccgccatgccgcacaaggtggcgaaccggatcagtgatccaaatctgccgcccaggagcgagtctttctcgattagtggggtgcagcctgcgaggacaccccccatgcttcgacctgtcgatcctcaaattccacacctggtggctgttaaatcacaaggcccagcacttaccgcctcccaatctgttcacgaacaaccaacgaaggggctgtcaggattccaggaggccctcaatgttacttctcatagagttgaaatgccgaggcaaaactcagaccctacctctgagaatccgcctctccccacaaggatcgaaaagtttgacaggtcctcctggctgaggcaggaggaagacattccaccgaaggttccgcagcgaaccacctccatctccccagccttggctcgcaagaacagccctggcaatggctccgcactagggcctagactcggatctcagccaatccgggcgagcaaccctgatctgcgtaggacagaacctattctcgaatcaccattgcagcgcaccagcagtggttcctcctcaagctcttccacaccctcatctcagccatcaagtcaagggggatcacagccaggttctcaagccgggtccagtgaaagaactagggttcgggctaattccaaatcagagggcagtcctgttttgcctcacgagcctgctaaggtgaaacccgaagagagtcgagatatcacgcggcctagtcggcccgctgatcttactgcactagcaaaagagctacgtgagctccgcatcgaggagaccaatcggccaatgaaaaaggtaaccgactacagctcctcgagcgaggaatccgaatcatcagaagaggaggaggaagacggcgaatccgagacccacgatgggacagtcgctgtttccgacatccctcgattaatccccaccggagcacctgggtccaacgaacaatacaatgtcggcatggtgggtacacatggactcgagactagtcacgcagacagcttctctgggtctatctcacgcgaagggaccctgatgatccgcgaaacctccggcgagaagaaacgaagcgggcactcagactccaatggctttgcgggtcatataaatttgcctgatttggtccagcagtcacattctccggctgggacccctaccgaaggtctgggtagggtctcaacccacagccaggagatggatagcggtaccgagtacggcatggggtccagtactaaagccagtttcacacctttcgtagacccacgcgtttaccagacaagccctaccgacgaagacgaggaagacgaagagagctctgccgccgccctcttcacgtctgaactgttacgtcaggagcaggccaagttaaacgaagcaagaaagatcagcgtcgtcaatgtcaaccccacaaacatccgccctcatagcgacaccccagagatccgtaaatataaaaaacggttcaattctgaaatcctgtgtgcagccttgtggggggtgaacttgctggtgggaacagagaatgggctaatgcttctggatcgttcaggtcaaggtaaagtatacaacctgatcaatcggcggcgttttcagcagatggatgtcctagaaggcctaaatgtactcgtgacaatcagtggaaaaaagaacaagctcagagtctactatctaagttggctgaggaaccgcattctgcacaacgatccagaggttgaaaagaaacagggatggatcactgtcggagatctcgaaggctgcatacactacaaagttgtcaagtacgaaagaatcaagtttctggtaattgcattgaaaaatgctgtggaaatctatgcatgggcacctaagccttatcacaagttcatggcgtttaagagtttcgcggacctccagcacaagcctttgctggtggacttgactgtcgaagaggggcagcgcctaaaggtgatttttggcagccatacggggttccacgttatagacgttgatagcggcaatagctacgacatctacatcccatcccacattcagggcaacattacgccgcacgcaatcgttatcctgccaaagacggacggcatggaaatgctggtgtgttacgaggacgaaggagtgtacgtaaacacatatggtcgaattacaaaagatgttgtcctgcaatggggagaaatgccgacatcagtggcttacattcactcgaatcaaataatgggttggggagagaaggccattgaaatacggtccgtggaaaccgggcatctggatggcgtgttcatgcacaagcgcgcccaacgattgaaattcctctgtgagcggaacgacaaagtcttcttcgcctccgtcaggtcaggagggtcctctcaggtttttttcatgaccctgaatcgtaatagtatgatgaattggtag

SEQ ID NO: 61281 - DNA, 4059 bp, Artificial Sequence
  derived and/or modified sequence
atggccagtgacagccctgcccggagcctggatgaaattgacctgagcgccctgcgggaccctgctggcatctttgagctggtggagctggtgggcaatggcacctacggccaggtgtacaagggccgccacgtgaagacaggccagctggccgccatcaaggtgatggatgtgactggagatgaggaggaggagatcaagcaggagatcaacatgctgaagaagtacagccaccacaggaacatcgccacctactacggggccttcatcaagaagaaccccccaggcatggatgaccagctgtggctggtgatggagttctgtggggccggctctgtgacagacctgatcaagaacaccaagggcaacaccctgaaggaggagtggatcgcctacatctgccgggagatcctgcggggcctgagccacctgcaccagcacaaggtgatccaccgggacatcaagggccagaatgtgctgctgacagaaaatgctgaggtgaagctggtggactttggagtgtctgcccagctggacagaacagtgggcagaagaaacaccttcatcggcaccccctactggatggcccctgaggtgattgcctgtgatgagaacccagatgccacctatgacttcaagagtgacctgtggagcctgggcatcacagccatcgagatggccgagggcgccccacccctgtgtgacatgcaccccatgagggccctcttcctgatccccagaaatcctgccccccggctgaagagcaagaagtggagcaagaagttccagagcttcatcgagagctgcctggtgaagaaccacagccagaggcctgccacagagcagctgatgaagcaccccttcatccgggaccagcccaatgaaaggcaggtgcgcatccagctgaaggaccacatcgacaggaccaagaagaagagaggagagaaggatgaaacagaatatgagtacagcggcagcgaggaggaggaggaggagaatgattctggagagcccagcagcatcctgaacctgcctggagagagcaccctgcggcgggacttcctgcggctgcagctggccaacaaggagaggtctgaggccctgcggcggcagcagctggagcagcagcagagagaaaatgaggagcacaagaggcagctgctggccgagcggcagaagagaattgaggagcagaaggagcagaggcggcggctggaggagcagcagaggcgggagaaggagctgaggaagcagcaggagcgggagcagaggaggcactatgaggagcagatgaggcgggaggaggagcggcggcgggcagagcacgagcaggagtacatccggcggcagctggaggaggagcagaggcagctggagatcctgcagcagcagctgctgcacgagcaggccctgctgctggagtacaagaggaagcagctggaggagcagaggcaggccgagcggctgcagaggcagctgaagcaggagcgggactacctggtgtccctgcagcaccagaggcaggagcagaggcctgtggagaagaagcccctgtaccactacaaggagggcatgagccccagcgagaagccagcctgggccaaggaggtggaggagaggagccggctgaaccggcagagcagccctgccatgccccacaaggtggccaaccgcatcagtgaccccaacctgcccccaagaagtgagagcttcagcatcagcggcgtgcagcctgcccggaccccacccatgctgcggcctgtggacccccagatcccccacctggtggccgtgaagagccagggccctgccctgacagccagccagagcgtgcatgagcagcccaccaagggcctgagcggcttccaggaggccctgaatgtgaccagccaccgggtggagatgccccggcagaacagcgaccccaccagtgaaaatccacccctgcccaccagaattgagaagtttgacaggagctcctggctgcggcaggaggaggacatcccccccaaggtgccccagaggaccaccagcatcagccctgccctggccaggaagaacagccctggaaatggaagtgccctgggcccccggctgggcagccagcccatccgggccagcaacccagacctgcggaggacagagcccatcctggagagccccctgcagaggaccagcagcggcagcagcagcagcagcagcacccccagcagccagcccagcagccagggcggcagccagcccggcagccaggccggcagcagcgagaggaccagggtgcgggccaacagcaagtctgagggcagccctgtgctgccccatgagcccgccaaggtgaagccagaggagagccgggacatcacccggcccagcaggcctgctgacctgacagccctggccaaggagctgcgggagctgcgcatcgaggagaccaaccggcccatgaagaaggtgacagactacagcagcagcagcgaggagagcgagagcagcgaggaggaggaggaggatggagagagcgagacccatgatggcaccgtggccgtgtctgacatccccaggctcatccccaccggggcccctggcagcaatgagcagtacaacgtgggcatggtgggcacccacggcctggagaccagccacgccgacagcttcagcggcagcatcagccgggagggcaccctgatgatccgggagaccagcggggagaagaagaggagcggccacagcgacagcaatggatttgctggccacatcaacctgcctgacctggtgcagcagagccacagccctgctggcacccccacagagggcctgggccgggtgtccacccacagccaggagatggattctggaacagaatatggcatgggcagcagcaccaaggccagcttcaccccatttgtggacccccgggtgtaccagaccagccccacagatgaagatgaggaggatgaggagagcagcgctgctgccctcttcaccagcgagctgctgcggcaggagcaggccaagctgaatgaggccaggaagatctctgtggtgaatgtgaaccccaccaacatccggccccacagcgacaccccagagatcaggaagtacaagaagcgcttcaacagcgagatcctgtgtgccgccctgtggggcgtgaacctgctggtgggcacagaaaatggcctgatgctgctggacaggagcggccagggcaaggtgtacaacctgatcaacagaagacgcttccagcagatggatgtgctggagggcctgaatgtgctggtgaccatcagcggcaagaagaacaagctgcgggtgtactacctgtcctggctgaggaaccgcatcctgcacaatgaccctgaggtggagaagaagcagggctggatcaccgtgggggacctggagggctgcatccactacaaggtggtgaagtatgaaagaatcaagttcctggtgattgccctgaagaatgctgtggagatctatgcctgggcccccaagccctaccacaagttcatggccttcaagagctttgctgacctgcagcacaagcccctgctggtggacctgactgtggaggagggccagaggctgaaggtgatcttcggcagccacacaggcttccacgtgattgatgtggacagcggcaacagctatgacatctacatccccagccacatccagggcaacatcacccctcatgccatcgtcatcctgcccaagacagatggcatggagatgctggtgtgctatgaagatgagggcgtgtatgtgaacacctacggccgcatcaccaaggatgtggtgctgcagtggggcgagatgcccacctctgtggcctacatccacagcaaccagatcatgggctggggcgagaaggccatcgagatccgctctgtggagaccggccacctggatggagtcttcatgcacaagagggcccagaggctgaagttcctgtgtgaaagaaatgacaaggtgttctttgcctctgtgcgcagcggcggcagcagccaggtgttcttcatgaccctgaacagaaacagcatgatgaactggtag

SEQ ID NO: 61282 - DNA, 3972 bp, Artificial Sequence
  derived and/or modified sequence
atggccagtgacagccctgcccggagcctggatgaaattgacctgagcgccctgcgggaccctgctggcatctttgagctggtggagctggtgggcaatggcacctacggccaggtgtacaagggccgccacgtgaagacaggccagctggccgccatcaaggtgatggatgtgactggagatgaggaggaggagatcaagcaggagatcaacatgctgaagaagtacagccaccacaggaacatcgccacctactacggggccttcatcaagaagaaccccccaggcatggatgaccagctgtggctggtgatggagttctgtggggccggctctgtgacagacctgatcaagaacaccaagggcaacaccctgaaggaggagtggatcgcctacatctgccgggagatcctgcggggcctgagccacctgcaccagcacaaggtgatccaccgggacatcaagggccagaatgtgctgctgacagaaaatgctgaggtgaagctggtggactttggagtgtctgcccagctggacagaacagtgggcagaagaaacaccttcatcggcaccccctactggatggcccctgaggtgattgcctgtgatgagaacccagatgccacctatgacttcaagagtgacctgtggagcctgggcatcacagccatcgagatggccgagggcgccccacccctgtgtgacatgcaccccatgagggccctcttcctgatccccagaaatcctgccccccggctgaagagcaagaagtggagcaagaagttccagagcttcatcgagagctgcctggtgaagaaccacagccagaggcctgccacagagcagctgatgaagcaccccttcatccgggaccagcccaatgaaaggcaggtgcgcatccagctgaaggaccacatcgacaggaccaagaagaagagaggagagaaggatgaaacagaatatgagtacagcggcagcgaggaggaggaggaggagaatgattctggagagcccagcagcatcctgaacctgcctggagagagcaccctgcggcgggacttcctgcggctgcagctggccaacaaggagaggtctgaggccctgcggcggcagcagctggagcagcagcagagagaaaatgaggagcacaagaggcagctgctggccgagcggcagaagagaattgaggagcagaaggagcagaggcggcggctggaggagcagcagaggcgggagaaggagctgaggaagcagcaggagcgggagcagaggaggcactatgaggagcagatgaggcgggaggaggagcggcggcgggcagagcacgagcaggagtacaagaggaagcagctggaggagcagaggcaggccgagcggctgcagaggcagctgaagcaggagcgggactacctggtgtccctgcagcaccagaggcaggagcagaggcctgtggagaagaagcccctgtaccactacaaggagggcatgagccccagcgagaagccagcctgggccaaggaggtggaggagaggagccggctgaaccggcagagcagccctgccatgccccacaaggtggccaaccgcatcagtgaccccaacctgccccccaggtctgagagcttcagcatctctggagtgcagcctgcccggaccccacccatgctgcggcctgtggacccccagatcccccacctggtggccgtgaagagccagggccctgccctgacagccagccagagcgtgcatgagcagcccaccaagggcctgagcggcttccaggaggccctgaatgtgaccagccaccgggtggagatgccccggcagaacagcgaccccaccagcgagaacccccccctgcccacccgcatcgagaagtttgacaggagctcctggctgcggcaggaggaggacatcccccccaaggtgccccagaggaccaccagcatcagccctgccctggccaggaagaacagccctggaaatggcagcgccctgggcccccggctgggcagccagcccatccgggccagcaacccagacctgcggaggacagagcccatcctggagagccccctgcagaggaccagcagcggcagcagcagcagcagcagcacccccagcagccagcccagcagccagggcggcagccagcccggcagccaggccggcagcagcgagaggaccagggtgcgggccaacagcaagtctgagggcagccctgtgctgccccatgagcccgccaaggtgaagccagaggagagccgggacatcacccggcccagcaggcctgctgacctgacagccctggccaaggagctgcgggagctgagaattgaggagaccaaccggcccatgaagaaggtgacagactacagcagcagcagcgaggagagcgagagcagcgaggaggaggaggaggatggagagagcgagacccatgatggcaccgtggccgtgtctgacatccccaggctcatccccactggagcccctggcagcaatgagcagtacaacgtgggcatggtgggcacccacggcctggagaccagccatgctgacagcttcagcggcagcatcagccgggagggcaccctgatgatccgggagaccagcggggagaagaagaggagcggccacagcgacagcaatggatttgctggccacatcaacctgcctgacctggtgcagcagagccacagccctgctggcacccccacagagggcctgggccgggtgtccacccacagccaggagatggacagcggcacagaatatggcatgggcagcagcaccaaggccagcttcaccccatttgtggacccccgggtgtaccagaccagccccacagatgaagatgaagaagatgaggagagcagcgctgctgccctcttcaccagcgagctgctgcggcaggagcaggccaagctgaatgaggccaggaagatctctgtggtgaatgtgaaccccaccaacatccggccccacagcgacaccccagagatcaggaagtacaagaagcgcttcaacagcgagatcctgtgtgccgccctgtggggcgtgaacctgctggtgggcacagaaaatggcctgatgctgctggacagaagtggccagggcaaggtgtacaacctgatcaacagaagacgcttccagcagatggatgtgctggagggcctgaatgtgctggtgaccatcagcggcaagaagaacaagctgcgggtgtactacctgtcctggctgaggaaccgcatcctgcacaatgaccctgaggtggagaagaagcagggctggatcaccgtgggggacctggagggctgcatccactacaaggtggtgaagtatgagcgcatcaagttcctggtgattgccctgaagaatgctgtggagatctatgcctgggcccccaagccctaccacaagttcatggccttcaagagctttgctgacctgcagcacaagcccctgctggtggacctgactgtggaggagggccagaggctgaaggtgatcttcggcagccacacaggcttccacgtgattgatgtggacagcggcaacagctatgacatctacatccccagccacatccagggcaacatcaccccccacgccatcgtcatcctgcccaagacagatggcatggagatgctggtgtgctatgaagatgaaggagtgtatgtgaacacctacggccgcatcaccaaggatgtggtgctgcagtggggcgagatgcccacctctgtggcctacatccacagcaaccagatcatgggctggggcgagaaggccatcgagatccgctctgtggagaccggccacctggatggagtcttcatgcacaagagggcccagaggctgaagttcctgtgtgaaagaaatgacaaggtgttctttgcctctgtgcgcagcggcggcagcagccaggtgttcttcatgaccctgaacagaaattccatgatgaactggtag

SEQ ID NO: 61283 - DNA, 4059 bp, Artificial Sequence
  derived and/or modified sequence
atggccagcgacagccccgcccggagcctggacgagatcgacctgtctgcgttgcgggaccctgccgggattttcgaattggtcgagctcgtcggaaatgggacctacggacaggtttataagggccggcatgtaaaaacagggcagttagccgctatcaaggttatggatgttaccggggacgaggaagaagaaattaaacaggagatcaatatgctgaagaagtactcacatcaccggaacattgccacatattacggagcctttatcaagaagaatcctcccgggatggatgaccagctgtggctcgtgatggagttttgcggcgctgggtccgtgacagatcttattaagaacacgaagggaaacacattgaaagaggagtggattgcgtatatctgcagggagatactgagagggttgtctcacctgcaccaacataaagtcatacatcgggacatcaagggccaaaacgttctccttaccgaaaacgctgaggtgaagctcgttgactttggcgtgtctgcacaacttgaccggaccgtcggaaggagaaacacttttattgggacgccctattggatggcacccgaagtcattgcctgtgacgagaatcccgatgcaacatatgacttcaagtccgacttgtggtcactcggcattacggccattgaaatggctgaaggggcacctcccctgtgcgacatgcacccaatgagagctctgttcctcatccctcggaatcccgctccccggcttaagtcaaagaagtggagtaaaaaattccagagttttattgaatcatgtttggtcaagaaccattctcagagacctgccactgaacaactgatgaagcatccctttattcgagaccaacctaatgaacgccaagttcgaatccagttaaaggaccacattgatagaactaagaaaaaacggggagagaaggatgagactgagtacgagtatagcgggtctgaggaggaagaagaggaaaatgattcaggtgagcccagctcaatcttaaatcttccgggggaatccactctccgacgagattttctccggttgcaactcgccaacaaagagcggtctgaggcactgagacgccagcaactggaacagcagcagagggaaaatgaggaacacaagcgccagctgctagctgaacgacagaagcgtatcgaggaacagaaggagcagagacggcgcctcgaagaacagcaaagaagggagaaagagctcaggaagcagcaggaacgagagcagagacgccattacgaggagcaaatgcgccgagaagaggagagaaggcgagccgaacacgagcaagaatatattcgacgccaactagaggaagaacagcgacagcttgaaatcctgcagcagcagctcctgcacgagcaagctttactgctcgagtacaagcggaagcagctggaggaacagagacaggctgaacgtttgcagaggcagctgaaacaagaacgcgattacctcgtttccctgcagcaccaacggcaggagcaaaggcccgtggagaagaaacctctgtatcattacaaggaggggatgtcaccttcagagaagcctgcttgggccaaggaagtcgaagaacggagtcggttgaacaggcagtcttctcccgccatgccgcataaggtcgccaaccgcatatccgatcctaaccttccacctcgtagcgaatcctttagtatttcaggggtccaacctgcacggacccccccgatgctgcgaccagttgacccacagatcccccatttagttgccgtcaagtcccagggcccggcactgaccgcttcccagagcgtccacgaacagcccactaagggtctgtcaggattccaagaggctctcaacgtgacttctcatcgggtggaaatgccccgccaaaatagcgacccaacatctgaaaacccgcccctccccaccagaatcgagaaatttgacagaagctcctggctccggcaggaggaagatatcccccccaaggtgccccagagaacaacttcgatatcaccagccctagcaagaaaaaatagccccgggaacgggtctgcactcgggccgagactgggaagtcagccgatccgggccagtaacccggacctgcgtcggactgaacccatcctggagagcccgctacagcgcacttcctctggaagttctagttccagtagcacaccctcatcacagccaagtagccaggggggcagtcagccaggctcccaggctggtagttctgagcgaactcgtgtgcgagctaacagcaaaagtgaggggtcacccgttttgcctcacgagcccgcaaaggtgaaacccgaagagagccgcgacatcacccgcccctcacgtcccgctgacttaacagcgttggcaaaggagttaagggagctgcgaattgaggaaaccaaccgacccatgaaaaaggttactgattacagttcaagttccgaggaatcagagagctcagaggaagaagaagaggatggcgaatctgagacccatgacggcaccgtggcagtctcggacatccccaggctgatacctaccggggcccctgggagtaacgagcagtacaatgtaggcatggtaggcacacacgggctggagacaagccatgcagacagtttttcagggagcatttccagggaaggcacactcatgatccgagaaacaagcggggaaaaaaaacgcagtggacatagcgactccaacgggttcgctgggcatatcaacttgcctgacctggttcaacagtcccactctcctgcaggcactccaaccgagggtctcggcagagttagtactcattcccaggaaatggattcagggactgaatacggcatgggctccagcacaaaagcaagctttaccccttttgtggacccccgggtatatcagacttcacctactgatgaagatgaagaagatgaggagagttctgcggccgccctgtttacatccgagctgctgcggcaagagcaggccaagttaaacgaagctaggaaaatatcggtcgttaacgtgaacccgaccaacatccgaccacattctgacacccccgagatcagaaaatacaagaaacgatttaacagtgagatactgtgcgccgcgctgtggggagtgaacctcttggtgggaacagagaatggcctgatgctgctggaccgctctgggcagggaaaagtatataatttgatcaataggcgacgattccaacaaatggacgtcctggaagggttgaacgtccttgtgactatttcggggaagaagaataagttgcgtgtttattacctgagctggctgcggaaccgcatcctgcacaacgaccccgaagtcgagaagaaacaaggatggataaccgtcggagatctcgagggctgcattcattacaaggttgtgaaatatgagcggattaagttcttggttatcgcgctgaaaaacgctgttgaaatctacgcttgggcgcccaaaccctaccacaaattcatggcttttaagagctttgcagacctccagcacaagcccctgcttgtcgatttgaccgtggaggaaggacaacgcctcaaagtgatttttggcagccatacaggctttcacgttatcgacgtcgactctgggaattcttatgatatctacatacccagtcatattcaagggaatattacaccccacgctattgttattctgcccaaaaccgacggcatggagatgctggtgtgttatgaagacgagggggtgtatgtcaacacttacggtcgcattaccaaagatgtggtacttcaatggggcgagatgccgacatcagtggcatatatccactccaaccaaattatgggctggggtgagaaagccattgagatccgctcagtcgagacaggccacctcgacggcgtgtttatgcataaaagagcccagaggctaaagttcctgtgcgaacggaatgataaagtctttttcgccagtgtcaggtccggcgggagctcccaagtgttttttatgacactgaaccgaaattccatgatgaactggtag

SEQ ID NO: 61284 - DNA, 3972 bp, Artificial Sequence
  derived and/or modified sequence
atggccagcgacagccccgcccggagcctggacgagatcgacctgtccgccttgcgggaccccgccgggatttttgagcttgtggagctagtgggcaatggaacatacgggcaagtatataaagggcgccatgtcaaaactggacaactcgcagcaattaaggtgatggacgtcacaggtgacgaagaggaggaaatcaagcaagagatcaatatgctgaaaaagtatagtcatcaccggaatatcgccacttattatggcgcttttataaaaaaaaatccgccagggatggacgaccagctctggctggtgatggagttctgcggagccggttcagtgaccgatcttatcaaaaacacaaagggcaacacactgaaagaggagtggatcgcctacatttgccgggaaatcctgcggggactgtcacatctgcatcagcataaggttattcatcgcgatataaaggggcagaatgtgctactcaccgaaaacgctgaggttaaattggtggattttggagttagcgcacaactggaccgtacagtagggagaagaaatacttttatcgggactccatactggatggcacccgaagtcatagcctgtgacgagaaccccgacgccacctatgattttaagtccgacctgtggtcgctgggtattacagccattgaaatggccgaaggagccccacccctgtgtgacatgcatccaatgcgagccctgtttttgatcccgcgtaatccggctccccggcttaaatcaaagaaatggagcaagaagttccagtcttttattgagtcctgcttggtcaaaaaccacagccagcgtcccgcaacggagcaattaatgaagcatccttttatccgcgatcagcccaatgagagacaggtgaggatccagctcaaagatcacatagaccgcactaaaaagaagaggggcgaaaaagatgaaacagagtacgagtacagcggatcggaggaggaagaagaggaaaatgatagcggtgagccgagcagtatcctgaatttgcctggcgagtctaccctgcgtcgggatttcttgcgcttacaactcgctaataaggagcgatctgaagccctcaggagacaacagctggagcaacagcagagggagaatgaagagcacaagcgccagctattagcagaacggcagaaaagaattgaagaacagaaagagcagagacggaggcttgaggagcaacaacgccgggaaaaagagctccgcaaacagcaggagagagaacagcgacgccactacgaagaacagatgaggcgtgaggaggagcgcaggagagccgagcacgaacaggagtacaaacggaaacagctcgaagagcaacggcaggccgagcggctacagcgccagctgaagcaggaacgggactacctggtaagtctgcagcaccagaggcaggaacagagacctgtggaaaagaaacccctgtatcactacaaagagggaatgtccccatccgagaagcccgcgtgggctaaagaggtggaagagcggtcaagactgaatagacaaagcagccctgccatgcctcataaagttgccaatagaatttccgacccaaacctgccaccaaggagcgagagcttcagtatcagcggggtgcagccagctcggacaccaccaatgctccgccctgttgatcctcagatccctcatctagtcgctgtgaagtcccaggggcctgctctcacagccagccagtctgttcacgagcaacccacaaagggcctctcaggcttccaggaagccttgaatgtcacatcacacagggtggagatgccccggcaaaattccgatccaacttctgaaaacccgcccctcccaacgcggattgaaaaatttgacaggtcttcctggttgaggcaggaggaggacatccccccgaaagtcccacagaggaccacctccatttcacccgctttagcaaggaaaaattcacctggaaatggatcagcccttggacccaggctgggctcccagcctataagagcatcgaaccctgaccttagaaggactgagcctattcttgaatccccactgcagaggacaagctctggcagcagcagttcaagcagcacaccaagctcccagccgagtagtcaggggggatcacagcctggaagccaggccggcagcagcgaacgtaccagagtcagggcgaactcaaagtcggaaggatctcctgtgctcccgcatgagcccgccaaagtcaaaccggaggagtctcgcgacattacacggccttcacggcctgctgacctcaccgcccttgcaaaggaattacgggagctgaggattgaggaaaccaatcgtccaatgaaaaaagtgactgactattcttcatcatctgaggaaagcgagagcagcgaggaagaggaggaagatggagagtcagaaacccatgatgggacggtggccgtgtctgacatcccaagattaatacccactggagcgcctggaagtaatgagcaatacaatgtaggcatggtgggtacacacggccttgaaacctcacatgctgactccttcagcggaagtattagtcgggaagggacccttatgatcagagagacctcaggcgaaaaaaaacgctccggtcatagtgatagtaacggctttgcgggccacataaacctgccagacctggtgcagcagtcgcatagtcccgctgggactcccacagagggcctgggcagggttagcacacacagccaggaaatggattcgggcaccgaatatggtatgggctcgtccactaaggccagcttcacgcctttcgtcgaccccagggtgtatcagacttcaccgaccgatgaggacgaggaggacgaagagtctagtgccgccgcactttttacaagcgagctcctccggcaggagcaggccaaacttaatgaggcaagaaagatatctgttgtgaatgttaatccaactaatattagaccccatagcgatactcctgaaatccggaaatataaaaaacggtttaatagtgagatattgtgcgccgccctgtggggcgtcaatctcttagttgggaccgaaaatggcttgatgctgctcgacagatccggacaggggaaggtgtacaacctgatcaatcgccgcaggtttcagcagatggatgtgctcgaggggctgaacgttctggtgaccatctccgggaaaaagaataagcttcgggtatattatctgtcttggctgagaaataggatcctgcataacgaccccgaggttgagaagaagcaaggctggatcaccgtgggggacctcgagggatgcattcattataaggtggttaaatacgaacggatcaagtttctggttatcgccttaaaaaacgccgtagaaatttacgcgtgggccccgaagccttaccataagttcatggcttttaaatcattcgccgacttgcagcacaagcccttacttgtggacctcactgtggaagaaggacaaaggctgaaggtgattttcggatcccatactggtttccacgtcatcgatgtggactctggaaatagttatgatatctatatcccgtcgcatattcagggcaacatcactccccacgccatagtcatcctccctaagacagacggcatggaaatgctggtgtgctacgaggacgagggagtttatgttaatacatatgggaggattacgaaggacgtggtcctgcagtggggcgagatgccaacatccgtcgcctatattcatagcaaccaaattatgggctggggcgaaaaagcgattgaaatccgttccgtcgagaccggtcacctcgacggcgtgttcatgcacaaaagagcccaaagactgaagtttctgtgtgaacggaacgacaaggtgtttttcgcctccgtaagatccggagggagttctcaggttttttttatgacactgaaccggaactccatgatgaactggtag

SEQ ID NO: 61285 - DNA, 4059 bp, Artificial Sequence
  derived and/or modified sequence
atggccagcgactccccagctaggtccctcgacgagattgacctgtcagccctgcgggatccagcaggtatcttcgaattagtcgaactggtgggcaacggcacttatggccaggtgtataaaggccgacacgtcaagactggacaacttgccgctattaaggtgatggatgtgaccggggatgaggaagaagagatcaaacaggagatcaatatgctaaagaagtatagtcaccaccgcaatattgccacctattatggtgcattcattaagaaaaaccccccaggaatggatgaccaactgtggctggtgatggaattctgcggtgcaggatcagtgactgacctgatcaagaataccaaaggaaataccctgaaggaggagtggatcgcctatatatgcagagagatcctgcgcggactatcccatctgcaccagcataaagtgatacacagggatatcaagggccaaaacgtactgctgaccgaaaacgccgaggtcaaactcgttgacttcggagtgtctgcccaacttgataggaccgtcggacggcgtaatacatttatcggtacaccgtattggatggcaccggaggtcatagcctgtgacgagaaccctgacgccacctacgacttcaagtctgatctctggagtctgggcatcactgccatcgagatggcagaaggcgctccaccactatgcgacatgcatcccatgcgcgctctgttcctcattcctagaaacccggcacccagactgaagtcgaaaaagtggtcaaagaaattccagtccttcattgagagctgtctcgtgaaaaaccattcgcaacgccctgcaactgaacagttgatgaagcatccattcatcagggaccaaccaaacgaaaggcaggtgcggatccagcttaaggaccatatcgatcgaacaaagaagaagaggggcgaaaaggacgagactgaatatgagtacagcggaagcgaagaggaggaagaggagaatgatagcggtgagccatccagtatcctcaatttgccaggcgagagcacgttgcggagagatttccttcgcttgcaattggctaacaaggagaggtccgaagcacttcggaggcagcagctcgagcaacaacagcgagagaacgaggaacacaagagacaactgctagccgaacgacagaaaaggatcgaggaacagaaagagcagcgcagacgcctggaggagcagcagaggcgcgaaaaagaacttcgcaagcagcaggaacgcgagcagaggagacactacgaagaacagatgcggcgagaggaagaaaggaggagagccgaacacgagcaggaatacatccgcagacaactggaggaggagcaacggcagcttgagatacttcaacagcagctgcttcatgaacaggctctgctgctcgagtataagcgaaaacagctcgaagaacagagacaggcagagcggctccagcgtcagctgaagcaggagcgcgactatttggtgagcctgcagcaccaacggcaggagcagaggcccgtggaaaaaaagccattatatcactacaaagagggtatgtccccctctgagaaacctgcatgggctaaagaggtcgaggaacgaagcagactgaataggcagtcatccccagccatgcctcataaagtagcaaacagaatctctgatcccaacttgcccccaagatcagagagtttctctatctcaggcgttcagcctgcgcgtaccccccctatgctgagacctgtggatcctcagatccctcacctcgtggccgtcaagtcgcagggcccagcactgacagcctcccagagcgtccacgagcaaccaacaaagggactgtccggctttcaggaagccctgaatgtgacctcccaccgtgtggagatgcccaggcagaattctgatcccactagcgagaaccccccattacccacacgcatcgagaaatttgaccgctcctcgtggctgcggcaagaagaagatattccccctaaagtgccccaacggaccactagcatttccccagccctcgccagaaaaaacagcccaggaaacggcagtgcgctgggaccacgactgggcagtcagcctatccgggcttccaacccagatctgcgcaggactgagcccatcctggaatccccattacaacgaacttcaagcgggagcagcagttcctcctctaccccgtcttcccaaccgtcatcacaagggggatctcagccagggtctcaggccggttcatccgagaggactcgcgtgcgagccaactccaagtccgagggtagccccgtactcccacatgaaccagcgaaagttaagcctgaggagtctcgggacatcaccaggcctagccggcctgcagatctgacagcattagcaaaggagctgagggagctgcggatcgaggaaaccaatcgtcctatgaagaaagttactgactacagctcttctagcgaagaatccgagagctctgaagaggaagaggaagatggagagtcagagactcacgacgggacagtggctgtgtccgacatacccaggctaatacctacaggcgcacctggcagcaatgagcagtacaacgtggggatggtcggtacccacggtctggaaaccagtcacgctgattccttttctggaagcatctcaagagaggggacgctcatgattagggagaccagcggggagaagaagcgaagtggccactcagattccaatggtttcgccggacacatcaacctaccggacctcgtccagcagtcccatagcccagctgggacccccacagaagggctcgggcgtgtgagcacccatagtcaggagatggacagtggaacagaatatggtatggggtcttccactaaagcttcctttactcctttcgttgatcctcgggtctatcagacatccccaacggatgaggatgaagaggatgaagaaagctccgccgcagcgttgtttacatctgagttactgcgacaggagcaggctaaactgaacgaggcacgcaagatttcagtggtgaacgtgaaccctaccaatatcaggcctcattctgacacgccagagataaggaagtacaagaaacgctttaattccgagattttgtgtgcggcactttggggcgtgaatcttttggttgggactgagaacggcctgatgctattggaccgaagcgggcaagggaaggtgtataacctgatcaaccgccgtagatttcaacagatggacgtgctcgaaggtcttaacgtgcttgtgaccataagcggcaaaaagaataagctcagagtgtactacctgtcctggcttcgcaatagaattcttcacaacgaccccgaagttgagaagaaacagggatggattaccgtcggggaccttgaaggctgcatacactataaggtcgtgaagtatgagcgcatcaaattcctcgtgatcgccctcaaaaatgcagttgagatctacgcatgggcccctaaaccctatcacaaattcatggctttcaaaagcttcgccgatctgcagcacaagcccctgctcgtagaccttaccgtggaggagggtcagcggctcaaagtgatattcggctctcataccggtttccatgtgatagacgtggatagcggcaactcctatgacatctacataccctctcacatccagggaaacatcaccccccacgccatagtgattttaccaaaaactgatgggatggaaatgctcgtctgttacgaggatgagggcgtttacgtgaacacctacggaaggatcactaaggacgttgtgctgcagtggggtgagatgcccaccagtgtagcctacatacactccaatcagattatgggctggggggagaaagccatcgaaattcgctccgtggaaaccggacatttagatggggttttcatgcacaagagagcccagagactgaagttcctatgcgagcgtaacgacaaggtattcttcgcaagtgtgcggtcaggtggttccagccaggtgtttttcatgaccctcaatagaaacagcatgatgaactggtag

SEQ ID NO: 61286 - DNA, 3972 bp, Artificial Sequence
  derived and/or modified sequence
atggcttccgattcaccagctcggagcctcgacgagattgacctgtcagccttgcgcgaccccgcaggaattttcgagctggtggaactcgttgggaatggcacatatggccaggtctacaaaggcaggcatgttaaaactggccagctcgccgctattaaggtaatggatgttaccggagatgaagaggaggaaattaagcaggaaataaacatgctcaaaaaatattctcaccaccgcaatatagctacgtactacggcgcatttatcaaaaaaaacccccctggaatggatgatcagctatggctggttatggaattttgtggcgcagggagcgtgaccgatcttatcaagaatacaaaaggcaatactttgaaagaagaatggattgcgtatatctgcagggagattcttagagggctaagtcatctccaccagcataaagttatccacagggatattaagggtcaaaacgtgctgttgactgagaacgccgaggtaaagctggtagactttggagtgtccgcacagctcgaccgcaccgtgggcaggcggaatacatttatcggaacgccctattggatggcaccagaagttatagcatgcgatgagaatcctgatgcaacctatgactttaaatctgacctgtggtccttaggcatcactgccatcgaaatggccgagggagcacctccattatgcgatatgcatcctatgagagcactcttcctgatccctcgaaaccctgctcccaggttgaagagcaaaaagtggtctaagaagttccagagttttatcgaatcttgtctggttaagaatcactctcagcgtccggctaccgagcaactgatgaagcatcccttcatcagagaccagcccaacgagcggcaggtgcggatccagctgaaagatcacatcgatcggacgaaaaagaagaggggcgaaaaggacgaaactgaatatgagtactcgggctcggaggaagaggaggaggagaacgatagcggcgaacccagctccattctcaacctgcccggtgaatctacattgcgcagagatttcctcaggctgcagctggctaataaggagcgatcagaggctctgcggagacagcagctggagcagcagcagagagaaaatgaggagcacaagcgccagctactcgcagaacggcaaaagcggatcgaagagcagaaggagcagaggcgcaggcttgaggagcagcaaaggcgagaaaaagagcttcggaagcaacaagaaagagagcaaaggcggcactacgaggagcagatgcggagagaggaggagagacggagagcggagcatgaacaggagtataagagaaaacagctggaggagcaacgtcaggcagagcgcctccagcggcagctgaagcaggagagagattatctggtctcactgcagcatcagagacaagagcaaagacccgttgaaaaaaagcccctgtatcactataaagaggggatgtccccctctgagaaaccggcttgggctaaggaggtggaagaacgctcaagactgaaccgccagagctcacctgcaatgccgcacaaggtcgctaacagaataagtgacccgaacctgcccccacgcagtgagagcttttctatctccggtgtccagcccgcacggacccccccaatgttacgccctgtcgacccacagataccgcatctggtcgcggtcaagagtcagggacctgcgctcactgcgagccagagcgtgcatgagcagccaacaaaggggctctccgggttccaggaagcattaaacgtaacaagccatcgtgtggaaatgccacgccagaactccgatcccacatccgaaaacccaccgctgccaactagaattgagaagttcgacagaagcagttggcttaggcaggaagaggatatacctcctaaagtcccacagcggacaacatccatcagccccgcactcgcaagaaagaactcgccaggaaacgggagcgcactcggaccgcgtcttggatcccagcccattcgcgcatccaatcctgatctgaggaggaccgagcccatcctggaatcccctctgcagagaacttcatcgggcagctcctcttcctcttctaccccctctagtcaaccaagcagccaggggggatctcagcctggctctcaggccggttcatcggagagaacacgcgtccgagcaaatagcaaatccgagggtagcccagttttgccccacgaaccagcaaaagtgaaacccgaggagtctagggacattacgcgcccttccaggcctgcagatctgactgcactcgccaaggagctgcgggaattaagaatcgaagagaccaaccgtcccatgaagaaagtaactgactacagctcctcatcagaagaaagtgagtcctccgaggaagaggaggaagacggagagtccgaaacccatgacggcacagtagctgtaagcgatattcccagactaatccctacaggggcaccgggttcgaatgaacagtacaatgtcggcatggtgggcacccatggactggagacctcacacgccgattcattcagtggtagcatctctagggaagggactctgatgattagagagacatcaggagaaaaaaagagatcaggtcatagtgattctaacgggtttgcaggtcacataaatctgcctgatctggtgcagcaatctcattcccccgctggaacccctacagagggattagggagggtttccactcatagccaagagatggatagcggcacggaatatggcatgggatcctctaccaaagcctcatttacgcccttcgtggatccgcgagtctatcagacatcacctacagacgaggatgaggaagacgaggagagttctgccgctgctctttttaccagtgagttacttaggcaagaacaagccaaactcaatgaggctaggaagatcagtgttgtgaatgtcaatccaacaaacattcgcccacactctgatacccccgagattcgaaaatacaagaagagattcaacagcgagatcttgtgtgctgccctctggggggtgaatctgctcgtaggaaccgagaacggccttatgctccttgaccggagcgggcagggaaaggtgtacaatttaattaaccggcgacgcttccagcaaatggacgtgttagagggattgaatgttctcgttaccattagcgggaagaaaaataaactgagagtctattacttgtcttggctgaggaataggatcctgcacaatgaccctgaagtagaaaagaagcaaggttggatcacagtcggtgatcttgagggatgcatccactataaggtagtgaagtacgaacgcattaagttcttagtgatagccctgaagaacgcggtggagatctatgcatgggcgccaaagccttatcataagttcatggcattcaaaagctttgcggacctgcaacataagcctcttctcgttgatttgactgtcgaggagggccagaggttgaaagttatcttcgggtcccataccggcttccacgtaattgacgtagatagcggcaacagctacgacatttatatccccagtcacatccagggcaatattacgccccacgctattgttattcttcctaaaactgacggaatggagatgttagtttgctacgaggacgaaggagtttacgtgaatacctatgggaggattaccaaggatgtcgtacttcaatggggcgaaatgcccactagcgtcgcctatattcacagtaatcagatcatgggttggggagagaaggctatagagattagaagcgtcgaaaccggccatttggatggtgtgttcatgcataagagggcccagaggctaaagttcctatgcgaacgcaacgataaggtcttctttgccagtgtgcgctcagggggtagtagccaggtcttcttcatgaccctgaacaggaactcaatgatgaactggtag

SEQ ID NO: 61287 - DNA, 4059 bp, Artificial Sequence
  derived and/or modified sequence
atggcgagcgactccccggctcgaagcctggatgaaatagatctctcggctctgagggaccccgcagggatctttgaattggtggaacttgttggaaatggaacatacgggcaagtttataagggtcgtcatgtcaaaacgggccagcttgcagccatcaaggttatggatgtcacaggggatgaagaggaagaaatcaaacaagaaattaacatgttgaagaaatattctcatcaccggaatattgctacatactatggtgcttttatcaaaaagaacccaccaggcatggatgaccaactttggttggtgatggagttttgtggtgctggctctgtcaccgacctgatcaagaacacaaaaggtaacacgttgaaagaggagtggattgcatacatctgcagggaaatcttacgggggctgagtcacctgcaccagcataaagtgattcatcgagatattaaagggcaaaatgtcttgctgactgaaaatgcagaagttaaactagtggactttggagtcagtgctcagcttgatcgaacagtgggcaggaggaatactttcattggaactccctactggatggcaccagaagttattgcctgtgatgaaaacccagatgccacatatgatttcaagagtgacttgtggtctttgggtatcaccgccattgaaatggcagaaggtgctccccctctctgtgacatgcaccccatgagagctctcttcctcatcccccggaacccagcgcctcggctgaagtctaagaagtggtcaaaaaaattccagtcatttattgagagctgcttggtaaagaatcacagccagcgaccagcaacagaacaattgatgaagcatccatttatacgagaccaacctaatgagcgacaggtccgcattcaactcaaggaccatattgatagaacaaagaagaagcgaggagaaaaagatgagacagagtatgagtacagtggaagtgaggaagaagaggaggagaatgactcaggagagcccagctccatcctgaatctgccaggggagtcgacgctgcggagggactttctgaggctgcagctggccaacaaggagcgttctgaggccctacggaggcagcagctggagcagcagcagcgggagaatgaggagcacaagcggcagctgctggccgagcgtcagaagcgcatcgaggagcagaaagagcagaggcggcggctggaggagcaacaaaggcgagagaaggagctgcggaagcagcaggagagggagcagcgccggcactatgaggagcagatgcgccgggaggaggagaggaggcgtgcggagcatgaacaggaatacatcaggcgacagttagaggaggagcagagacagttagagatcttgcagcagcagctactgcatgaacaagctctacttctggaatataagcgcaaacaattggaagaacagagacaagcagaaagactgcagaggcagctaaagcaagaaagagactacttagtttcccttcagcatcagcggcaggagcagaggcctgtggagaagaagccactgtaccattacaaagaaggaatgagtcctagtgagaagccagcatgggccaaggaggtagaagaacggtcaaggctcaaccggcaaagttcccctgccatgcctcacaaggttgccaacaggatatctgaccccaacctgcccccaaggtcggagtccttcagcattagtggagttcagcctgctcgaacaccccccatgctcagaccagtcgatccccagatcccacatctggtagctgtaaaatcccagggacctgccttgaccgcctcccagtcagtgcacgagcagcccacaaagggcctctctgggtttcaggaggctctgaacgtgacctcccaccgcgtggagatgccacgccagaactcagatcccacctcggaaaatcctcctctccccactcgcattgaaaagtttgaccgaagctcttggttacgacaggaagaagacattccaccaaaggtgcctcaaagaacaacttctatatccccagcattagccagaaagaattctcctgggaatggtagtgctctgggacccagactaggatctcaacccatcagagcaagcaaccctgatctccggagaactgagcccatcttggagagccccttgcagaggaccagcagtggcagttcctccagctccagcacccctagctcccagcccagctcccaaggaggctcccagcctggatcacaagcaggatccagtgaacgcaccagagttcgagccaacagtaagtcagaaggatcacctgtgctcccccatgagcctgcgaaggtgaaaccagaagaatccagggacattacccggcccagtcgaccagctgatctgacggcattagccaaagaactaagagaactccggattgaagaaacaaaccgcccaatgaagaaggtgactgattactcctcctccagtgaggagtcagaaagtagcgaggaagaggaggaagatggagagagcgagacccatgatgggacagtggctgtcagcgacatacccagactgataccaacaggagctccaggcagcaacgagcagtacaatgtgggaatggtggggacgcatgggctggagacctctcatgcggacagtttcagcggcagtatttcaagagaaggaaccttgatgattagagagacgtctggagagaagaagcgatctggccacagtgacagcaatggctttgctggccacatcaacctccctgacctggtgcagcagagccattctccagctggaaccccgactgagggactggggcgcgtctcaacccattcccaggagatggactctgggactgaatatggcatggggagcagcaccaaagcctccttcaccccctttgtggaccccagagtataccagacgtctcccactgatgaagatgaagaggatgaggaatcatcagccgcagctctgtttactagcgaacttcttaggcaagaacaggccaaactcaatgaagcaagaaagatttcggtggtaaatgtaaacccaaccaacattcggcctcatagcgacacaccagaaatcagaaaatacaagaaacgattcaactcagaaatactttgtgcagctctgtggggtgtaaaccttctggtggggactgaaaatggcctgatgcttttggaccgaagtgggcaaggcaaagtctataatctgatcaaccggaggcgatttcagcagatggatgtgctagagggactgaatgtccttgtgacaatttcaggaaagaagaataagctacgagtttactatctttcatggttaagaaacagaatactacataatgacccagaagtagaaaagaaacaaggctggatcactgttggggacttggaaggctgtatacattataaagttgttaaatatgaaaggatcaaatttttggtgattgccttaaagaatgctgtggaaatatatgcttgggctcctaaaccgtatcataaattcatggcatttaagtcttttgcagatctccagcacaagcctctgctagttgatctcacggtagaagaaggtcaaagattaaaggttatttttggttcacacactggtttccatgtaattgatgttgattcaggaaactcttatgatatctacataccatctcatattcagggcaatatcactcctcatgctattgtcatcttgcctaaaacagatggaatggaaatgcttgtttgctatgaggatgagggggtgtatgtaaacacctatggccggataactaaggatgtggtgctccaatggggagaaatgcccacgtctgtggcctacattcattccaatcagataatgggctggggcgagaaagctattgagatccggtcagtggaaacaggacatttggatggagtatttatgcataagcgagctcaaaggttaaagtttctatgtgaaagaaatgataaggtattttttgcatccgtgcgatctggaggaagtagccaagtgtttttcatgaccctcaacagaaattccatgatgaactggtaa

SEQ ID NO: 61288 - DNA, 3972 bp, Artificial Sequence
  derived and/or modified sequence
atggcgagcgactccccggctcgaagcctggatgaaatagatctctcggctctgagggaccccgcagggatctttgaattggtggaacttgttggaaatggaacatacgggcaagtttataagggtcgtcatgtcaaaacgggccagcttgcagccatcaaggttatggatgtcacaggggatgaagaggaagaaatcaaacaagaaattaacatgttgaagaaatattctcatcaccggaatattgctacatactatggtgcttttatcaaaaagaacccaccaggcatggatgaccaactttggttggtgatggagttttgtggtgctggctctgtcaccgacctgatcaagaacacaaaaggtaacacgttgaaagaggagtggattgcatacatctgcagggaaatcttacgggggctgagtcacctgcaccagcataaagtgattcatcgagatattaaagggcaaaatgtcttgctgactgaaaatgcagaagttaaactagtggactttggagtcagtgctcagcttgatcgaacagtgggcaggaggaatactttcattggaactccctactggatggcaccagaagttattgcctgtgatgaaaacccagatgccacatatgatttcaagagtgacttgtggtctttgggtatcaccgccattgaaatggcagaaggtgctccccctctctgtgacatgcaccccatgagagctctcttcctcatcccccggaacccagcgcctcggctgaagtctaagaagtggtcaaaaaaattccagtcatttattgagagctgcttggtaaagaatcacagccagcgaccagcaacagaacaattgatgaagcatccatttatacgagaccaacctaatgagcgacaggtccgcattcaactcaaggaccatattgatagaacaaagaagaagcgaggagaaaaagatgagacagagtatgagtacagtggaagtgaggaagaagaggaggagaatgactcaggagagcccagctccatcctgaatctgccaggggagtcgacgctgcggagggactttctgaggctgcagctggccaacaaggagcgttctgaggccctacggaggcagcagctggagcagcagcagcgggagaatgaggagcacaagcggcagctgctggccgagcgtcagaagcgcatcgaggagcagaaagagcagaggcggcggctggaggagcaacaaaggcgagagaaggagctgcggaagcagcaggagagggagcagcgccggcactatgaggagcagatgcgccgggaggaggagaggaggcgtgcggagcatgaacaggaatataagcgcaaacaattggaagaacagagacaagcagaaagactgcagaggcagctaaagcaagaaagagactacttagtttcccttcagcatcagcggcaggagcagaggcctgtggagaagaagccactgtaccattacaaagaaggaatgagtcctagtgagaagccagcatgggccaaggaggtagaagaacggtcaaggctcaaccggcaaagttcccctgccatgcctcacaaggttgccaacaggatatctgaccccaacctgcccccaaggtcggagtccttcagcattagtggagttcagcctgctcgaacaccccccatgctcagaccagtcgatccccagatcccacatctggtagctgtaaaatcccagggacctgccttgaccgcctcccagtcagtgcacgagcagcccacaaagggcctctctgggtttcaggaggctctgaacgtgacctcccaccgcgtggagatgccacgccagaactcagatcccacctcggaaaatcctcctctccccactcgcattgaaaagtttgaccgaagctcttggttacgacaggaagaagacattccaccaaaggtgcctcaaagaacaacttctatatccccagcattagccagaaagaattctcctgggaatggtagtgctctgggacccagactaggatctcaacccatcagagcaagcaaccctgatctccggagaactgagcccatcttggagagccccttgcagaggaccagcagtggcagttcctccagctccagcacccctagctcccagcccagctcccaaggaggctcccagcctggatcacaagcaggatccagtgaacgcaccagagttcgagccaacagtaagtcagaaggatcacctgtgctcccccatgagcctgcgaaggtgaaaccagaagaatccagggacattacccggcccagtcgaccagctgatctgacggcattagccaaagaactaagagaactccggattgaagaaacaaaccgcccaatgaagaaggtgactgattactcctcctccagtgaggagtcagaaagtagcgaggaagaggaggaagatggagagagcgagacccatgatgggacagtggctgtcagcgacatacccagactgataccaacaggagctccaggcagcaacgagcagtacaatgtgggaatggtggggacgcatgggctggagacctctcatgcggacagtttcagcggcagtatttcaagagaaggaaccttgatgattagagagacgtctggagagaagaagcgatctggccacagtgacagcaatggctttgctggccacatcaacctccctgacctggtgcagcagagccattctccagctggaaccccgactgagggactggggcgcgtctcaacccattcccaggagatggactctgggactgaatatggcatggggagcagcaccaaagcctccttcaccccctttgtggaccccagagtataccagacgtctcccactgatgaagatgaagaggatgaggaatcatcagccgcagctctgtttactagcgaacttcttaggcaagaacaggccaaactcaatgaagcaagaaagatttcggtggtaaatgtaaacccaaccaacattcggcctcatagcgacacaccagaaatcagaaaatacaagaaacgattcaactcagaaatactttgtgcagctctgtggggtgtaaaccttctggtggggactgaaaatggcctgatgcttttggaccgaagtgggcaaggcaaagtctataatctgatcaaccggaggcgatttcagcagatggatgtgctagagggactgaatgtccttgtgacaatttcaggaaagaagaataagctacgagtttactatctttcatggttaagaaacagaatactacataatgacccagaagtagaaaagaaacaaggctggatcactgttggggacttggaaggctgtatacattataaagttgttaaatatgaaaggatcaaatttttggtgattgccttaaagaatgctgtggaaatatatgcttgggctcctaaaccgtatcataaattcatggcatttaagtcttttgcagatctccagcacaagcctctgctagttgatctcacggtagaagaaggtcaaagattaaaggttatttttggttcacacactggtttccatgtaattgatgttgattcaggaaactcttatgatatctacataccatctcatattcagggcaatatcactcctcatgctattgtcatcttgcctaaaacagatggaatggaaatgcttgtttgctatgaggatgagggggtgtatgtaaacacctatggccggataactaaggatgtggtgctccaatggggagaaatgcccacgtctgtggcctacattcattccaatcagataatgggctggggcgagaaagctattgagatccggtcagtggaaacaggacatttggatggagtatttatgcataagcgagctcaaaggttaaagtttctatgtgaaagaaatgataaggtattttttgcatccgtgcgatctggaggaagtagccaagtgtttttcatgaccctcaacagaaattccatgatgaactggtaa

SEQ ID NO: 61289 - protein, 1305 aa, Artificial Sequence
  derived and/or modified sequence
MASDSPARSLDEIDLSALRDPAGIFELVELVGNGTYGQVYKGRHVKTGQLAAIKVMDVTGDEEEEIKQEINMLKKYSHHRNIATYYGAFIKKNPPGMDDQLWLVMEFCGAGSVTDLIKNTKGNTLKEEWIAYICREILRGLSHLHQHKVIHRDIKGQNVLLTENAEVKLVDFGVSAQLDRTVGRRNTFIGTPYWMAPEVIACDENPDATYDFKSDLWSLGITAIEMAEGAPPLCDMHPMRALFLIPRNPAPRLKSKKWSKKFQSFIESCLVKNHSQRPATEQLMKHPFIRDQPNERQVRIQLKDHIDRTKKKRGEKDETEYEYSGSEEEEEENDSGEPSSILNLPGESTLRRDFLRLQLANKERSEALRRQQLEQQQRENEEHKRQLLAERQKRIEEQKEQRRRLEEQQRREKELRKQQEREQRRHYEEQMRREEERRRAEHEQEYIRRQLEEEQRQLEILQQQLLHEQALLLEYKRKQLEEQRQAERLQRQLKQERDYLVSLQHQRQEQRPVEKKPLYHYKEGMSPSEKPAWAKEIPHLVAVKSQGPALTASQSVHEQPTKGLSGFQEALNVTSHRVEMPRQNSDPTSENPPLPTRIEKFDRSSWLRQEEDIPPKVPQRTTSISPALARKNSPGNGSALGPRLGSQPIRASNPDLRRTEPILESPLQRTSSGSSSSSSTPSSQPSSQGGSQPGSQAGSSERTRVRANSKSEGSPVLPHEPAKVKPEESRDITRPSRPASYKKAIDEDLTALAKELRELRIEETNRPMKKVTDYSSSSEESESSEEEEEDGESETHDGTVAVSDIPRLIPTGAPGSNEQYNVGMVGTHGLETSHADSFSGSISREGTLMIRETSGEKKRSGHSDSNGFAGHINLPDLVQQSHSPAGTPTEGLGRVSTHSQEMDSGTEYGMGSSTKASFTPFVDPRVYQTSPTDEDEEDEESSAAALFTSELLRQEQAKLNEARKISVVNVNPTNIRPHSDTPEIRKYKKRFNSEILCAALWGVNLLVGTENGLMLLDRSGQGKVYNLINRRRFQQMDVLEGLNVLVTISGKKNKLRVYYLSWLRNRILHNDPEVEKKQGWITVGDLEGCIHYKVVKYERIKFLVIALKNAVEIYAWAPKPYHKFMAFKSFADLQHKPLLVDLTVEEGQRLKVIFGSHTGFHVIDVDSGNSYDIYIPSHIQGNITPHAIVILPKTDGMEMLVCYEDEGVYVNTYGRITKDVVLQWGEMPTSVAYIHSNQIMGWGEKAIEIRSVETGHLDGVFMHKRAQRLKFLCERNDKVFFASVRSGGSSQVFFMTLNRNSMMNW

SEQ ID NO: 61290 - protein, 1312 aa, Artificial Sequence
  derived and/or modified sequence
MASDSPARSLDEIDLSALRDPAGIFELVELVGNGTYGQVYKGRHVKTGQLAAIKVMDVTGDEEEEIKQEINMLKKYSHHRNIATYYGAFIKKNPPGMDDQLWLVMEFCGAGSVTDLIKNTKGNTLKEEWIAYICREILRGLSHLHQHKVIHRDIKGQNVLLTENAEVKIVDFGVSAQLDRTVGRRNTFIGTPYWMAPEVIACDENPDATYDFKSDLWSLGITAIEMAEGAPPLCDMHPMRALFLIPRNPAPRLKSKKWSKKFQSFIESCLVKNHSQRPATEQLMKHPFIRDQPNERQVRIQLKDHIDRTKKKRGEKDETEYEYSGSEEEEEENDSGEPSSILNLPGESTLRRDFLRLQLANKERSEALRRQQLEQQQRENEEHKRQLLAERQKRIEEQKEQRRRLEEQQRREKELRKQQEREQRRHYEEQMRREEERRRAEHEQEYIRRQLEEEQRQLEILQQQLLHEQALLLEYKRKQLEEQRQAERLQRQLKQERDYLVSLQHQRQEQRPVEKKPLYHYKEGMSPSEKPAWAKEIPHLVAVKSQGPALTASQSVHEQPTKGLSGFQEALNVTSHRVEMPRQNSDPTSENPPLPTRIEKFDRSSWLRQEEDIPPKVPQRTTSISPALARKNSPGNGSALGPRLGSQPIRASNPDLRRTEPILESPLQRTSSGSSSSSSTPSSQPSSQGGSQPGSQAGSSERTRVRANSKSEGSPVLPHEPAKVKPEESRDITRPSRPAVSAFLSKSFELLIYQDLTALAKELRELRIEETNRPMKKVTDYSSSSEESESSEEEEEDGESETHDGTVAVSDIPRLIPTGAPGSNEQYNVGMVGTHGLETSHADSFSGSISREGTLMIRETSGEKKRSGHSDSNGFAGHINLPDLVQQSHSPAGTPTEGLGRVSTHSQEMDSGTEYGMGSSTKASFTPFVDPRVYQTSPTDEDEEDEESSAAALFTSELLRQEQAKLNEARKISVVNVNPTNIRPHSDTPEIRKYKKRFNSEILCAALWGVNLLVGTENGLMLLDRSGQGKVYNLINRRRFQQMDVLEGLNVLVTISGKKNKLRVYYLSWLRNRILHNDPEVEKKQGWITVGDLEGCIHYKVVKYERIKFLVIALKNAVEIYAWAPKPYHKFMAFKSFADLQHKPLLVDLTVEEGQRLKVIFGSHTGFHVIDVDSGNSYDIYIPSHIQGNITPHAIVILPKTDGMEMLVCYEDEGVYVNTYGRITKDVVLQWGEMPTSVAYIHSNQIMGWGEKAIEIRSVETGHLDGVFMHKRAQRLKFLCERNDKVFFASVRSGGSSQVFFMTLNRNSMMNW

SEQ ID NO: 61291 - protein, 1297 aa, Artificial Sequence
  derived and/or modified sequence
MASDSPARSLDEIDLSALRDPAGIFELVELVGNGTYGQVYKGRHVKTGQLAAIKVMDVTGDEEEEIKQEINMLKKYSHHRNIATYYGAFIKKNPPGMDDQLWLVMEFCGAGSVTDLIKNTKGNTLKEEWIAYICREILRGLSHLHQHKVIHRDIKGQNVLLTENAEVKLVDFGVSAQLDRTVGRRNTFIGTPYWMAPEVIACDENPDATYDFKSDLWSLGITAIEMAEGAPPLCDMHPMRALFLIPRNPAPRLKSKKWSKKFQSFIESCLVKNHSQRPATEQLMKHPFIRDQPNERQVRIQLKDHIDRTKKKRGEKDETEYEYSGSEEEEEENDSGEPSSILNLPGESTLRRDFLRLQLANKERSEALRRQQLEQQQRENEEHKRQLLAERQKRIEEQKEQRRRLEEQQRREKELRKQQEREQRRHYEEQMRREEERRRAEHEQEYIRRQLEEEQRQLEILQQQLLHEQALLLEYKRKQLEEQRQAERLQRQLKQERDYLVSLQHQRQEQRPVEKKPLYHYKEGMSPSEKPAWAKEIPHLVAVKSQGPALTASQSVHEQPTKGLSGFQEALNVTSHRVEMPRQNSDPTSENPPLPTRIEKFDRSSWLRQEEDIPPKVPQRTTSISPALARKNSPGNGSALGPRLGSQPIRASNPDLRRTEPILESPLQRTSSGSSSSSSTPSSQPSSQGGSQPGSQAGSSERTRVRANSKSEGSPVLPHEPAKVKPEESRDITRPSRPADLTALAKELRELRIEETNRPMKKVTDYSSSSEESESSEEEEEDGESETHDGTVAVSDIPRLIPTGAPGSNEQYNVGMVGTHGLETSHADSFSGSISREGTLMIRETSGEKKRSGHSDSNGFAGHINLPDLVQQSHSPAGTPTEGLGRVSTHSQEMDSGTEYGMGSSTKASFTPFVDPRVYQTSPTDEDEEDEESSAAALFTSELLRQEQAKLNEARKISVVNVNPTNIRPHSDTPEIRKYKKRFNSEILCAALWGVNLLVGTENGLMLLDRSGQGKVYNLINRRRFQQMDVLEGLNVLVTISGKKNKLRVYYLSWLRNRILHNDPEVEKKQGWITVGDLEGCIHYKVVKYERIKFLVIALKNAVEIYAWAPKPYHKFMAFKSFADLQHKPLLVDLTVEEGQRLKVIFGSHTGFHVIDVDSGNSYDIYIPSHIQGNITPHAIVILPKTDGMEMLVCYEDEGVYVNTYGRITKDVVLQWGEMPTSVAYIHSNQIMGWGEKAIEIRSVETGHLDGVFMHKRAQRLKFLCERNDKVFFASVRSGGSSQVFFMTLNRNSMMNW

SEQ ID NO: 61292 - DNA, 3894 bp, Artificial Sequence
  derived and/or modified sequence
atggccagcgacagccccgccagaagcctggacgagatcgacctgagcgccctgagagaccccgccggcatcttcgagctggtggagctggtgggcaacggcacctacggccaggtgtacaagggcagacacgtgaagaccggccagctggccgccatcaaggtgatggacgtgaccggcgacgaggaggaggagatcaagcaggagatcaacatgctgaagaagtacagccaccacagaaacatcgccacctactacggcgccttcatcaagaagaacccccccggcatggacgaccagctgtggctggtgatggagttctgcggcgccggcagcgtgaccgacctgatcaagaacaccaagggcaacaccctgaaggaggagtggatcgcctacatctgcagagagatcctgagaggcctgagccacctgcaccagcacaaggtgatccacagagacatcaagggccagaacgtgctgctgaccgagaacgccgaggtgaagctggtggacttcggcgtgagcgcccagctggacagaaccgtgggcagaagaaacaccttcatcggcaccccctactggatggcccccgaggtgatcgcctgcgacgagaaccccgacgccacctacgacttcaagagcgacctgtggagcctgggcatcaccgccatcgagatggccgagggcgccccccccctgtgcgacatgcaccccatgagagccctgttcctgatccccagaaaccccgcccccagactgaagagcaagaagtggagcaagaagttccagagcttcatcgagagctgcctggtgaagaaccacagccagagacccgccaccgagcagctgatgaagcaccccttcatcagagaccagcccaacgagagacaggtgagaatccagctgaaggaccacatcgacagaaccaagaagaagagaggcgagaaggacgagaccgagtacgagtacagcggcagcgaggaggaggaggaggagaacgacagcggcgagcccagcagcatcctgaacctgcccggcgagagcaccctgagaagagacttcctgagactgcagctggccaacaaggagagaagcgaggccctgagaagacagcagctggagcagcagcagagagagaacgaggagcacaagagacagctgctggccgagagacagaagagaatcgaggagcagaaggagcagagaagaagactggaggagcagcagagaagagagaaggagctgagaaagcagcaggagagagagcagagaagacactacgaggagcagatgagaagagaggaggagagaagaagagccgagcacgagcaggagtacatcagaagacagctggaggaggagcagagacagctggagatcctgcagcagcagctgctgcacgagcaggccctgctgctggagtacaagagaaagcagctggaggagcagagacaggccgagagactgcagagacagctgaagcaggagagagactacctggtgagcctgcagcaccagagacaggagcagagacccgtggagaagaagcccctgtaccactacaaggagggcatgagccccagcgagaagcccgcctgggccaaggagatcccccacctggtggccgtgaagagccagggccccgccctgaccgccagccagagcgtgcacgagcagcccaccaagggcctgagcggcttccaggaggccctgaacgtgaccagccacagagtggagatgcccagacagaacagcgaccccaccagcgagaacccccccctgcccaccagaatcgagaagttcgacagaagcagctggctgagacaggaggaggacatcccccccaaggtgccccagagaaccaccagcatcagccccgccctggccagaaagaacagccccggcaacggcagcgccctgggccccagactgggcagccagcccatcagagccagcaaccccgacctgagaagaaccgagcccatcctggagagccccctgcagagaaccagcagcggcagcagcagcagcagcagcacccccagcagccagcccagcagccagggcggcagccagcccggcagccaggccggcagcagcgagagaaccagagtgagagccaacagcaagagcgagggcagccccgtgctgccccacgagcccgccaaggtgaagcccgaggagagcagagacatcaccagacccagcagacccgccgacctgaccgccctggccaaggagctgagagagctgagaatcgaggagaccaacagacccatgaagaaggtgaccgactacagcagcagcagcgaggagagcgagagcagcgaggaggaggaggaggacggcgagagcgagacccacgacggcaccgtggccgtgagcgacatccccagactgatccccaccggcgcccccggcagcaacgagcagtacaacgtgggcatggtgggcacccacggcctggagaccagccacgccgacagcttcagcggcagcatcagcagagagggcaccctgatgatcagagagaccagcggcgagaagaagagaagcggccacagcgacagcaacggcttcgccggccacatcaacctgcccgacctggtgcagcagagccacagccccgccggcacccccaccgagggcctgggcagagtgagcacccacagccaggagatggacagcggcaccgagtacggcatgggcagcagcaccaaggccagcttcacccccttcgtggaccccagagtgtaccagaccagccccaccgacgaggacgaggaggacgaggagagcagcgccgccgccctgttcaccagcgagctgctgagacaggagcaggccaagctgaacgaggccagaaagatcagcgtggtgaacgtgaaccccaccaacatcagaccccacagcgacacccccgagatcagaaagtacaagaagagattcaacagcgagatcctgtgcgccgccctgtggggcgtgaacctgctggtgggcaccgagaacggcctgatgctgctggacagaagcggccagggcaaggtgtacaacctgatcaacagaagaagattccagcagatggacgtgctggagggcctgaacgtgctggtgaccatcagcggcaagaagaacaagctgagagtgtactacctgagctggctgagaaacagaatcctgcacaacgaccccgaggtggagaagaagcagggctggatcaccgtgggcgacctggagggctgcatccactacaaggtggtgaagtacgagagaatcaagttcctggtgatcgccctgaagaacgccgtggagatctacgcctgggcccccaagccctaccacaagttcatggccttcaagagcttcgccgacctgcagcacaagcccctgctggtggacctgaccgtggaggagggccagagactgaaggtgatcttcggcagccacaccggcttccacgtgatcgacgtggacagcggcaacagctacgacatctacatccccagccacatccagggcaacatcaccccccacgccatcgtgatcctgcccaagaccgacggcatggagatgctggtgtgctacgaggacgagggcgtgtacgtgaacacctacggcagaatcaccaaggacgtggtgctgcagtggggcgagatgcccaccagcgtggcctacatccacagcaaccagatcatgggctggggcgagaaggccatcgagatcagaagcgtggagaccggccacctggacggcgtgttcatgcacaagagagcccagagactgaagttcctgtgcgagagaaacgacaaggtgttcttcgccagcgtgagaagcggcggcagcagccaggtgttcttcatgaccctgaacagaaacagcatgatgaactggtag

SEQ ID NO: 61293 - DNA, 3807 bp, Artificial Sequence
  derived and/or modified sequence
atggccagcgacagccccgccagaagcctggacgagatcgacctgagcgccctgagagaccccgccggcatcttcgagctggtggagctggtgggcaacggcacctacggccaggtgtacaagggcagacacgtgaagaccggccagctggccgccatcaaggtgatggacgtgaccggcgacgaggaggaggagatcaagcaggagatcaacatgctgaagaagtacagccaccacagaaacatcgccacctactacggcgccttcatcaagaagaacccccccggcatggacgaccagctgtggctggtgatggagttctgcggcgccggcagcgtgaccgacctgatcaagaacaccaagggcaacaccctgaaggaggagtggatcgcctacatctgcagagagatcctgagaggcctgagccacctgcaccagcacaaggtgatccacagagacatcaagggccagaacgtgctgctgaccgagaacgccgaggtgaagctggtggacttcggcgtgagcgcccagctggacagaaccgtgggcagaagaaacaccttcatcggcaccccctactggatggcccccgaggtgatcgcctgcgacgagaaccccgacgccacctacgacttcaagagcgacctgtggagcctgggcatcaccgccatcgagatggccgagggcgccccccccctgtgcgacatgcaccccatgagagccctgttcctgatccccagaaaccccgcccccagactgaagagcaagaagtggagcaagaagttccagagcttcatcgagagctgcctggtgaagaaccacagccagagacccgccaccgagcagctgatgaagcaccccttcatcagagaccagcccaacgagagacaggtgagaatccagctgaaggaccacatcgacagaaccaagaagaagagaggcgagaaggacgagaccgagtacgagtacagcggcagcgaggaggaggaggaggagaacgacagcggcgagcccagcagcatcctgaacctgcccggcgagagcaccctgagaagagacttcctgagactgcagctggccaacaaggagagaagcgaggccctgagaagacagcagctggagcagcagcagagagagaacgaggagcacaagagacagctgctggccgagagacagaagagaatcgaggagcagaaggagcagagaagaagactggaggagcagcagagaagagagaaggagctgagaaagcagcaggagagagagcagagaagacactacgaggagcagatgagaagagaggaggagagaagaagagccgagcacgagcaggagtacaagagaaagcagctggaggagcagagacaggccgagagactgcagagacagctgaagcaggagagagactacctggtgagcctgcagcaccagagacaggagcagagacccgtggagaagaagcccctgtaccactacaaggagggcatgagccccagcgagaagcccgcctgggccaaggagatcccccacctggtggccgtgaagagccagggccccgccctgaccgccagccagagcgtgcacgagcagcccaccaagggcctgagcggcttccaggaggccctgaacgtgaccagccacagagtggagatgcccagacagaacagcgaccccaccagcgagaacccccccctgcccaccagaatcgagaagttcgacagaagcagctggctgagacaggaggaggacatcccccccaaggtgccccagagaaccaccagcatcagccccgccctggccagaaagaacagccccggcaacggcagcgccctgggccccagactgggcagccagcccatcagagccagcaaccccgacctgagaagaaccgagcccatcctggagagccccctgcagagaaccagcagcggcagcagcagcagcagcagcacccccagcagccagcccagcagccagggcggcagccagcccggcagccaggccggcagcagcgagagaaccagagtgagagccaacagcaagagcgagggcagccccgtgctgccccacgagcccgccaaggtgaagcccgaggagagcagagacatcaccagacccagcagacccgccgacctgaccgccctggccaaggagctgagagagctgagaatcgaggagaccaacagacccatgaagaaggtgaccgactacagcagcagcagcgaggagagcgagagcagcgaggaggaggaggaggacggcgagagcgagacccacgacggcaccgtggccgtgagcgacatccccagactgatccccaccggcgcccccggcagcaacgagcagtacaacgtgggcatggtgggcacccacggcctggagaccagccacgccgacagcttcagcggcagcatcagcagagagggcaccctgatgatcagagagaccagcggcgagaagaagagaagcggccacagcgacagcaacggcttcgccggccacatcaacctgcccgacctggtgcagcagagccacagccccgccggcacccccaccgagggcctgggcagagtgagcacccacagccaggagatggacagcggcaccgagtacggcatgggcagcagcaccaaggccagcttcacccccttcgtggaccccagagtgtaccagaccagccccaccgacgaggacgaggaggacgaggagagcagcgccgccgccctgttcaccagcgagctgctgagacaggagcaggccaagctgaacgaggccagaaagatcagcgtggtgaacgtgaaccccaccaacatcagaccccacagcgacacccccgagatcagaaagtacaagaagagattcaacagcgagatcctgtgcgccgccctgtggggcgtgaacctgctggtgggcaccgagaacggcctgatgctgctggacagaagcggccagggcaaggtgtacaacctgatcaacagaagaagattccagcagatggacgtgctggagggcctgaacgtgctggtgaccatcagcggcaagaagaacaagctgagagtgtactacctgagctggctgagaaacagaatcctgcacaacgaccccgaggtggagaagaagcagggctggatcaccgtgggcgacctggagggctgcatccactacaaggtggtgaagtacgagagaatcaagttcctggtgatcgccctgaagaacgccgtggagatctacgcctgggcccccaagccctaccacaagttcatggccttcaagagcttcgccgacctgcagcacaagcccctgctggtggacctgaccgtggaggagggccagagactgaaggtgatcttcggcagccacaccggcttccacgtgatcgacgtggacagcggcaacagctacgacatctacatccccagccacatccagggcaacatcaccccccacgccatcgtgatcctgcccaagaccgacggcatggagatgctggtgtgctacgaggacgagggcgtgtacgtgaacacctacggcagaatcaccaaggacgtggtgctgcagtggggcgagatgcccaccagcgtggcctacatccacagcaaccagatcatgggctggggcgagaaggccatcgagatcagaagcgtggagaccggccacctggacggcgtgttcatgcacaagagagcccagagactgaagttcctgtgcgagagaaacgacaaggtgttcttcgccagcgtgagaagcggcggcagcagccaggtgttcttcatgaccctgaacagaaacagcatgatgaactggtag

SEQ ID NO: 61294 - DNA, 3894 bp, Artificial Sequence
  derived and/or modified sequence
atggcatccgactccccagcacgctcgttagacgagatcgatctcagtgccttgcgcgacccagccgggatctttgagctggtggagcttgtgggaaatggaacctacggacaagtttataagggcaggcacgttaagactggacaactagccgcgatcaaggtgatggacgttaccggggacgaggaggaggagatcaagcaggaaatcaacatgttaaagaagtactcccatcacagaaatattgctacctactacggcgcctttattaaaaagaatcccccagggatggacgaccagctgtggctggtaatggaattttgcggagccgggtcggtcacagacttgataaaaaataccaagggcaatacgctgaaagaagaatggatcgcttatatctgcagagaaattctgagaggcctgtctcacctccatcagcacaaagtcattcaccgggacatcaagggtcagaatgtgctgctgaccgaaaacgctgaggtgaaactggtcgatttcggagtgtcggctcagctggaccgcaccgtggggcgccggaacacatttattgggactccatattggatggctcccgaagtgatcgcctgcgatgaaaaccctgacgccacctatgacttcaaatcagacctgtggtccctggggattaccgccatcgaaatggcggagggagcccctcccttgtgcgacatgcacccaatgcgggccttattcttgatcccccgcaatccggccccgagactgaagagcaagaaatggtcaaagaagtttcagtcctttattgagagctgcctcgtaaagaaccattctcagcgcccagccaccgaacagttaatgaaacatccttttatcagagatcagccaaacgaacgccaggtacgcattcaactgaaggaccatattgatcggacaaaaaaaaaacgcggagaaaaagacgaaacggagtacgaatatagtggctctgaagaggaagaggaggagaatgatagtggagaaccctcctccatattgaatctgccgggtgaatctacactcagacgggactttctgagattgcagctggccaataaggaaagaagtgaagcccttcgaagacagcaattggagcagcaacagagggaaaacgaagagcataaaagacagctgctggcggagcggcagaaacggatcgaggaacagaaagaacagcgcaggagactggaggaacagcagcggcgggaaaaggaactgaggaagcagcaggagagggagcagagaagacactacgaagagcagatgagaagggaggaggagcgacgcagggcggaacatgagcaagaatacattcgaagacagctggaggaggaacagcgccaactcgaaattttgcagcagcagttgcttcatgagcaagcccttctgctcgaatataagcgtaagcaactggaagaacagcgtcaggctgagcggcttcagagacagttgaaacaggaacgggactacttagttagccttcaacaccaacggcaagagcagcgaccggtagagaaaaaacctctctaccattacaaggagggtatgagtccttctgaaaagcctgcctgggcgaaggaaattcctcacctcgttgcagtgaagtcccaaggtccagcattgacggcttcccaatcagtacatgagcagccgaccaagggcctttccgggtttcaggaagccttgaatgtaacctctcacagggtagaaatgcctcggcaaaacagtgatccaacctcagaaaaccccccgctgccgacacgtatcgagaaatttgatcgatctagttggctccggcaggaggaggacattccccctaaagtgccacaaaggaccacctctatatcaccagcacttgcccggaagaactctccaggcaacgggtcagccctgggaccgcgcctcggaagccagcctatcagagcatctaatcctgacctgagaaggacagaacccatcttggagtctccactacagcggaccagtagtggcagcagcagctcgtcaagcacaccctccagtcagccatcatcgcaagggggctctcagcctggctcacaggcaggctctagcgaacggactcgagtgcgggccaacagcaagtctgagggctcaccagtgctgccgcacgaaccagccaaggtcaagcctgaggagtccagggatattacaagaccaagtcgacctgccgacttgacggccctggccaaggaactgagagagctccggattgaggagacaaataggccgatgaagaaggtgaccgattactcctcctcttctgaggaaagcgagagtagcgaggaggaggaggaagacggggagtctgagacacacgacggaacggtggccgtcagcgatataccacgcctgatccctacaggtgcacccggttctaacgaacagtataacgttggtatggttggaactcacggcctggagacctcccacgccgattctttttccgggagcatatcccgagagggcacacttatgattagggaaacctctggagaaaagaagaggtctgggcattcagacagcaatggctttgccggccacatcaacctgcctgacctggttcaacagtcccattcacctgctggcacaccgacagaaggactgggccgagtgtctacacatagccaggagatggattccggcaccgaatacggcatgggttccagtactaaagcttcatttactcctttcgtcgaccctagagtttatcaaacatctccaactgatgaggatgaagaggatgaagagagctcagcggcggcgctcttcacaagcgaattactacgccaggaacaggcaaagcttaacgaggctcgcaagattagtgtagtcaacgtaaaccctaccaacatacggcctcattccgatactcccgaaatcaggaagtataaaaaacggtttaactccgaaattctctgtgcagccctgtggggtgtaaacctgttggtggggacagagaacggactgatgttattggaccgctcaggccaggggaaagtctacaacttaatcaaccggcgcaggtttcagcagatggacgtgcttgaggggctcaatgtgctggtgactatttcgggtaagaagaataaactgcgcgtctactacctatcttggctgcggaacaggatactccataacgatcccgaggtggagaaaaagcaaggctggattaccgtcggggatctcgaggggtgtattcattacaaagtggtcaaatacgagcgcattaaattccttgtgatcgcattgaagaatgcggtggagatttatgcatgggcgccaaaaccttaccataagtttatggcattcaaatcgtttgcggatctgcagcataagcccctcctcgttgacctcactgtcgaagaggggcagcgactgaaggtgatcttcggaagccacactggctttcacgtcattgacgtagatagcggaaactcttacgatatctatattccgagtcatatccaaggcaatatcactccccacgcaatcgttatcttacctaaaaccgatggtatggagatgctggtttgctatgaggacgaaggtgtatacgtgaatacctacggccgcataaccaaagatgtagttcttcagtggggcgaaatgcctacatcagtcgcttacatccattccaaccagataatgggatggggagagaaggcaatagagatcaggagcgtcgaaacaggccacttggatggggtattcatgcacaagcgggctcagcggttaaagttcctgtgcgagaggaatgacaaggtgttcttcgcttctgtgaggagcgggggatccagccaagtttttttcatgactctaaaccgaaattctatgatgaactggtag

SEQ ID NO: 61295 - DNA, 3807 bp, Artificial Sequence
  derived and/or modified sequence
atggcctccgactcacccgccaggagcctggatgagattgacctatccgcactgcgtgatcccgcaggaatcttcgaactggtggaattggtaggcaatgggacttatggtcaagtctataaaggccggcacgtgaaaacaggccagttggccgctatcaaggtgatggacgttaccggcgacgaggaggaggagattaaacaggagattaacatgctgaagaaatatagtcatcaccggaacatagctacatactacggagcattcatcaaaaagaaccctccaggcatggacgaccaactatggctggttatggagttctgcggggctgggagcgtgaccgacctaattaaaaacaccaaaggtaatacacttaaggaggagtggattgcctacatatgccgggaaattctgcggggattatcacacctgcaccagcacaaggtgatccatcgcgacatcaagggtcagaatgttctgctgactgaaaatgccgaggtaaagctagtcgatttcggggtcagcgctcaactcgaccggactgtgggcaggaggaatacctttatcggcacgccctactggatggctccagaggtgattgcttgcgacgaaaatcccgatgccacttatgatttcaagtcagatctctggtccttgggcatcactgctattgagatggctgaaggggcaccgcctttgtgtgacatgcacccgatgcgagcattgtttcttatccctcgcaatcctgcaccacggctgaagagcaagaagtggtcaaaaaagttccagtcgttcatcgagtcctgtctcgttaaaaaccactctcagaggcccgccaccgagcaactcatgaaacacccttttattagggaccagcccaacgagcgacaagtaagaatacagctcaaggatcacatcgatcggaccaagaaaaaaagaggcgagaaggatgagacagaatacgagtattccggaagtgaggaggaggaggaggagaacgatagcggggaaccgtctagcatacttaatctgcccggcgaaagtaccttgcgacgagactttcttagactgcagttggctaataaggaacggagcgaggccctgcgccggcagcagctggaacagcagcagcgcgaaaacgaggagcacaagagacaacttctggctgaacgccagaagcgaattgaagagcaaaaagaacaacggagaagactggaggagcagcaacgcagggagaaggagctgcgcaaacaacaggagcgggagcagcggcgacactacgaagaacagatgcgacgtgaggaagaacgtaggagagccgaacacgagcaagagtacaagcgcaaacagctagaagagcagcgccaggctgagagactccagcgacagttgaaacaggagcgcgactatttagttagtttgcagcaccagaggcaggaacagaggcccgtggagaagaagcccctctatcattacaaagagggaatgtcaccatccgagaagccagcttgggctaaagaaatcccacacttggttgcagtcaaaagtcagggacccgccctgacagcctctcagtctgtacacgagcagcccacaaaagggctatccggctttcaggaggctctgaacgtaacctcacatagagtggagatgccccgacagaacagcgaccccaccagcgagaatcccccccttcctacccggattgagaaatttgacaggtcaagctggttgcggcaggaggaagacataccaccaaaggtgcctcagcgcacaacgtcgatctccccggctcttgcccgcaagaatagccctgggaacgggtccgcgcttgggccacgattaggcagtcaaccaatcagagccagcaatcccgacctgagaagaaccgagcctatcctggagtccccgctccagagaacctcgagcggcagctccagttcatcttccacaccttcaagtcagccaagttcccagggtggcagccagccaggtagtcaagcaggtagcagcgagcggactagggtgagagccaactctaagtctgagggctccccagtgctgccccacgagcctgcgaaggtgaaaccagaggaatcacgcgatattacacggccttctaggccagcagatctcactgcccttgctaaggagcttagggaactgcgcattgaagagacgaacaggcctatgaaaaaggtgacagactacagttcttcctccgaagagagcgaatcatccgaggaggaggaggaggacggagaaagtgagactcacgacggaacagtggctgtgagcgatattcctcgactgatccctaccggcgcccctggcagcaacgagcagtataatgtgggcatggtgggcacccatggtctggaaacctcacatgctgatagctttagcggctccattagcagagaagggacgttgatgatccgagaaacatccggagagaaaaaaagaagtggccactctgatagtaacggctttgcaggccacatcaaccttccggacctcgtgcagcagagccacagtccagctggcacacctaccgaaggcctcggtagagtcagcacccacagccaggaaatggacagcgggaccgaatatggcatgggaagcagtacgaaagcaagtttcaccccttttgtcgacccacgagtctatcagacgagtcctacagacgaagatgaagaggacgaggagtcctcagccgcagctttatttacctccgaactgctccggcaggaacaggcaaaactgaatgaggctaggaaaatctccgtcgtaaacgtgaatcctacaaacattcgcccacactccgacacccctgagatcaggaagtataagaagcgctttaacagcgagatcctctgtgcggccttgtggggcgtcaacttactggtcgggactgagaacggtcttatgctcctagatcggagtgggcagggaaaggtctataacttgatcaatcgcaggaggttccaacagatggacgtgctagagggtctaaacgtcctcgtaacaattagtggcaagaagaataagctgcgagtgtattaccttagctggctacggaataggatcctacacaatgaccccgaggtggaaaagaaacaggggtggatcaccgtgggggatcttgaaggatgtattcattataaggttgtgaagtacgaaaggatcaaatttctggtgatcgctcttaaaaacgctgttgaaatctatgcctgggccccaaagccttaccataagtttatggcgttcaagagctttgccgacctgcagcataaaccccttctggtggacctcaccgttgaggagggtcaaagactgaaggtcatctttggtagtcacaccggatttcatgtgatcgatgtggatagtggcaattcctatgatatctacatcccgagtcatattcagggcaatatcaccccccatgccatcgttatactgcccaaaacagatggcatggaaatgctggtgtgttacgaggacgagggagtgtatgtgaacacgtacggcagaataaccaaggacgttgtgctgcagtggggagagatgcccacttccgtcgcatacattcatagcaatcagataatgggttggggcgagaaagcaattgagatccgctcggtagagactgggcacctggatggagtgttcatgcataagcgggcccagcggctaaagtttctgtgcgagcggaatgataaggtcttttttgcgtccgtaaggtcagggggttccagccaagtgtttttcatgacgctcaaccgcaacagtatgatgaactggtag

SEQ ID NO: 61296 - DNA, 3894 bp, Artificial Sequence
  derived and/or modified sequence
atggccagtgacagccctgcccggagcctggatgaaattgacctgagcgccctgcgggaccctgctggcatctttgagctggtggagctggtgggcaatggcacctacggccaggtgtacaagggccgccacgtgaagacaggccagctggccgccatcaaggtgatggatgtgactggagatgaggaggaggagatcaagcaggagatcaacatgctgaagaagtacagccaccacaggaacatcgccacctactacggggccttcatcaagaagaaccccccaggcatggatgaccagctgtggctggtgatggagttctgtggggccggctctgtgacagacctgatcaagaacaccaagggcaacaccctgaaggaggagtggatcgcctacatctgccgggagatcctgcggggcctgagccacctgcaccagcacaaggtgatccaccgggacatcaagggccagaatgtgctgctgacagaaaatgctgaggtgaagctggtggactttggagtgtctgcccagctggacagaacagtgggcagaagaaacaccttcatcggcaccccctactggatggcccctgaggtgattgcctgtgatgagaacccagatgccacctatgacttcaagagtgacctgtggagcctgggcatcacagccatcgagatggccgagggcgccccacccctgtgtgacatgcaccccatgagggccctcttcctgatccccagaaatcctgccccccggctgaagagcaagaagtggagcaagaagttccagagcttcatcgagagctgcctggtgaagaaccacagccagaggcctgccacagagcagctgatgaagcaccccttcatccgggaccagcccaatgaaaggcaggtgcgcatccagctgaaggaccacatcgacaggaccaagaagaagagaggagagaaggatgaaacagaatatgagtacagcggcagcgaggaggaggaggaggagaatgattctggagagcccagcagcatcctgaacctgcctggagagagcaccctgcggcgggacttcctgcggctgcagctggccaacaaggagaggtctgaggccctgcggcggcagcagctggagcagcagcagagagaaaatgaggagcacaagaggcagctgctggccgagcggcagaagagaattgaggagcagaaggagcagaggcggcggctggaggagcagcagaggcgggagaaggagctgaggaagcagcaggagcgggagcagaggaggcactatgaggagcagatgaggcgggaggaggagcggcggcgggcagagcacgagcaggagtacatccggcggcagctggaggaggagcagaggcagctggagatcctgcagcagcagctgctgcacgagcaggccctgctgctggagtacaagaggaagcagctggaggagcagaggcaggccgagcggctgcagaggcagctgaagcaggagcgggactacctggtgtccctgcagcaccagaggcaggagcagaggcctgtggagaagaagcccctgtaccactacaaggagggcatgagccccagcgagaagccagcctgggccaaggagatcccccacctggtggccgtgaagagccagggccctgccctgacagccagccagagcgtgcatgagcagcccaccaagggcctgagcggcttccaggaggccctgaatgtgaccagccaccgggtggagatgccccggcagaacagcgaccccaccagcgagaacccccccctgcccacccgcatcgagaagtttgacaggagctcctggctgcggcaggaggaggacatcccccccaaggtgccccagaggaccaccagcatcagccctgccctggccaggaagaacagccctggaaatggcagcgccctgggcccccggctgggcagccagcccatccgggccagcaacccagacctgcggaggacagagcccatcctggagagccccctgcagaggaccagcagcggcagcagcagcagcagcagcacccccagcagccagcccagcagccagggcggcagccagcccggcagccaggccggcagcagcgagaggaccagggtgcgggccaacagcaagtctgagggcagccctgtgctgccccatgagcccgccaaggtgaagccagaggagagccgggacatcacccggcccagcaggcctgctgacctgacagccctggccaaggagctgcgggagctgagaattgaggagaccaaccggcccatgaagaaggtgacagactacagcagcagcagcgaggagagcgagagcagcgaggaggaggaggaggatggagagagcgagacccatgatggcaccgtggccgtgtctgacatccccaggctcatccccactggagcccctggcagcaatgagcagtacaacgtgggcatggtgggcacccacggcctggagaccagccatgctgacagcttcagcggcagcatcagccgggagggcaccctgatgatccgggagaccagcggggagaagaagaggagcggccacagcgacagcaatggatttgctggccacatcaacctgcctgacctggtgcagcagagccacagccctgctggcacccccacagagggcctgggccgggtgtccacccacagccaggagatggacagcggcacagaatatggcatgggcagcagcaccaaggccagcttcaccccatttgtggacccccgggtgtaccagaccagccccacagatgaagatgaagaagatgaggagagcagcgctgctgccctcttcaccagcgagctgctgcggcaggagcaggccaagctgaatgaggccaggaagatctctgtggtgaatgtgaaccccaccaacatccggccccacagcgacaccccagagatcaggaagtacaagaagcgcttcaacagcgagatcctgtgtgccgccctgtggggcgtgaacctgctggtgggcacagaaaatggcctgatgctgctggacagaagtggccagggcaaggtgtacaacctgatcaacagaagacgcttccagcagatggatgtgctggagggcctgaatgtgctggtgaccatcagcggcaagaagaacaagctgcgggtgtactacctgtcctggctgaggaaccgcatcctgcacaatgaccctgaggtggagaagaagcagggctggatcaccgtgggggacctggagggctgcatccactacaaggtggtgaagtatgagcgcatcaagttcctggtgattgccctgaagaatgctgtggagatctatgcctgggcccccaagccctaccacaagttcatggccttcaagagctttgctgacctgcagcacaagcccctgctggtggacctgactgtggaggagggccagaggctgaaggtgatcttcggcagccacacaggcttccacgtgattgatgtggacagcggcaacagctatgacatctacatccccagccacatccagggcaacatcaccccccacgccatcgtcatcctgcccaagacagatggcatggagatgctggtgtgctatgaagatgaaggagtgtatgtgaacacctacggccgcatcaccaaggatgtggtgctgcagtggggcgagatgcccacctctgtggcctacatccacagcaaccagatcatgggctggggcgagaaggccatcgagatccgctctgtggagaccggccacctggatggagtcttcatgcacaagagggcccagaggctgaagttcctgtgtgaaagaaatgacaaggtgttctttgcctctgtgcgcagcggcggcagcagccaggtgttcttcatgaccctgaacagaaattccatgatgaactggtag

SEQ ID NO: 61297 - DNA, 3807 bp, Artificial Sequence
  derived and/or modified sequence
atggccagtgacagccctgcccggagcctggatgaaattgacctgagcgccctgcgggaccctgctggcatctttgagctggtggagctggtgggcaatggcacctacggccaggtgtacaagggccgccacgtgaagacaggccagctggccgccatcaaggtgatggatgtgactggagatgaggaggaggagatcaagcaggagatcaacatgctgaagaagtacagccaccacaggaacatcgccacctactacggggccttcatcaagaagaaccccccaggcatggatgaccagctgtggctggtgatggagttctgtggggccggctctgtgacagacctgatcaagaacaccaagggcaacaccctgaaggaggagtggatcgcctacatctgccgggagatcctgcggggcctgagccacctgcaccagcacaaggtgatccaccgggacatcaagggccagaatgtgctgctgacagaaaatgctgaggtgaagctggtggactttggagtgtctgcccagctggacagaacagtgggcagaagaaacaccttcatcggcaccccctactggatggcccctgaggtgattgcctgtgatgagaacccagatgccacctatgacttcaagagtgacctgtggagcctgggcatcacagccatcgagatggccgagggcgccccacccctgtgtgacatgcaccccatgagggccctcttcctgatccccagaaatcctgccccccggctgaagagcaagaagtggagcaagaagttccagagcttcatcgagagctgcctggtgaagaaccacagccagaggcctgccacagagcagctgatgaagcaccccttcatccgggaccagcccaatgaaaggcaggtgcgcatccagctgaaggaccacatcgacaggaccaagaagaagagaggagagaaggatgaaacagaatatgagtacagcggcagcgaggaggaggaggaggagaatgattctggagagcccagcagcatcctgaacctgcctggagagagcaccctgcggcgggacttcctgcggctgcagctggccaacaaggagaggtctgaggccctgcggcggcagcagctggagcagcagcagagagaaaatgaggagcacaagaggcagctgctggccgagcggcagaagagaattgaggagcagaaggagcagaggcggcggctggaggagcagcagaggcgggagaaggagctgaggaagcagcaggagcgggagcagaggaggcactatgaggagcagatgaggcgggaggaggagcggcggcgggcagagcacgagcaggagtacaagaggaagcagctggaggagcagaggcaggccgagcggctgcagaggcagctgaagcaggagcgggactacctggtgtccctgcagcaccagaggcaggagcagaggcctgtggagaagaagcccctgtaccactacaaggagggcatgagccccagcgagaagccagcctgggccaaggagatcccccacctggtggccgtgaagagccagggccctgccctgacagccagccagagcgtgcatgagcagcccaccaagggcctgagcggcttccaggaggccctgaatgtgaccagccaccgggtggagatgccccggcagaacagcgaccccaccagtgaaaatccacccctgcccaccagaattgagaagtttgacaggagctcctggctgcggcaggaggaggacatcccccccaaggtgccccagaggaccaccagcatcagccctgccctggccaggaagaacagccctggaaatggaagtgccctgggcccccggctgggcagccagcccatccgggccagcaacccagacctgcggaggacagagcccatcctggagagccccctgcagaggaccagcagcggcagcagcagcagcagcagcacccccagcagccagcccagcagccagggcggcagccagcccggcagccaggccggcagcagcgagaggaccagggtgcgggccaacagcaagtctgagggcagccctgtgctgccccatgagcccgccaaggtgaagccagaggagagccgggacatcacccggcccagcaggcctgctgacctgacagccctggccaaggagctgcgggagctgcgcatcgaggagaccaaccggcccatgaagaaggtgacagactacagcagcagcagcgaggagagcgagagcagcgaggaggaggaggaggatggagagagcgagacccatgatggcaccgtggccgtgtctgacatccccaggctcatccccaccggggcccctggcagcaatgagcagtacaacgtgggcatggtgggcacccacggcctggagaccagccacgccgacagcttcagcggcagcatcagccgggagggcaccctgatgatccgggagaccagcggggagaagaagaggagcggccacagcgacagcaatggatttgctggccacatcaacctgcctgacctggtgcagcagagccacagccctgctggcacccccacagagggcctgggccgggtgtccacccacagccaggagatggattctggaacagaatatggcatgggcagcagcaccaaggccagcttcaccccatttgtggacccccgggtgtaccagaccagccccacagatgaagatgaggaggatgaggagagcagcgctgctgccctcttcaccagcgagctgctgcggcaggagcaggccaagctgaatgaggccaggaagatctctgtggtgaatgtgaaccccaccaacatccggccccacagcgacaccccagagatcaggaagtacaagaagcgcttcaacagcgagatcctgtgtgccgccctgtggggcgtgaacctgctggtgggcacagaaaatggcctgatgctgctggacaggagcggccagggcaaggtgtacaacctgatcaacagaagacgcttccagcagatggatgtgctggagggcctgaatgtgctggtgaccatcagcggcaagaagaacaagctgcgggtgtactacctgtcctggctgaggaaccgcatcctgcacaatgaccctgaggtggagaagaagcagggctggatcaccgtgggggacctggagggctgcatccactacaaggtggtgaagtatgaaagaatcaagttcctggtgattgccctgaagaatgctgtggagatctatgcctgggcccccaagccctaccacaagttcatggccttcaagagctttgctgacctgcagcacaagcccctgctggtggacctgactgtggaggagggccagaggctgaaggtgatcttcggcagccacacaggcttccacgtgattgatgtggacagcggcaacagctatgacatctacatccccagccacatccagggcaacatcacccctcatgccatcgtcatcctgcccaagacagatggcatggagatgctggtgtgctatgaagatgagggcgtgtatgtgaacacctacggccgcatcaccaaggatgtggtgctgcagtggggcgagatgcccacctctgtggcctacatccacagcaaccagatcatgggctggggcgagaaggccatcgagatccgctctgtggagaccggccacctggatggagtcttcatgcacaagagggcccagaggctgaagttcctgtgtgaaagaaatgacaaggtgttctttgcctctgtgcgcagcggcggcagcagccaggtgttcttcatgaccctgaacagaaacagcatgatgaactggtag

SEQ ID NO: 61298 - DNA, 3894 bp, Artificial Sequence
  derived and/or modified sequence
atggccagcgacagccccgcccggagcctggacgagatcgacctgtccgctctgcgcgacccagctggcattttcgagctagttgaactggtgggcaacggaacctacggccaggtgtataaaggccggcacgttaagaccgggcaactcgcagccatcaaggtgatggatgttacgggcgacgaggaagaggagatcaagcaagagattaatatgctaaagaagtactcacaccaccgcaatatcgctacctactatggcgcgttcataaaaaaaaatccacccgggatggacgaccagctctggctggtaatggagttctgtggggctggatctgttacagacctgattaaaaacactaaaggaaatacactgaaggaagagtggatcgcctacatttgtagagagatcctgcgtgggctcagccacctgcatcaacacaaagtcatccatcgagatattaaaggccaaaacgtcctgctgactgagaatgccgaggtaaagctcgtcgacttcggggtgtctgcccagctggaccgcaccgtgggtcgcagaaataccttcattggaaccccttattggatggctccggaggtaatcgcttgcgatgaaaatcccgacgccacttacgactttaaatcagacctctggagtcttggcataactgctatcgaaatggctgagggcgctccccccttgtgcgacatgcatccaatgcgagccctctttctcattcctcggaacccggcccctcgcctgaagagtaaaaagtggtcaaagaagtttcagagctttatcgagtcatgtctggtgaagaaccactcacaacggcctgctactgaacagctaatgaaacatcccttcataagggaccagcccaacgaaaggcaagtgagaatccagctgaaagaccacattgacagaacaaagaagaagcgcggcgagaaagacgaaaccgaatacgaatacagtggaagtgaggaagaagaggaggagaatgactcgggcgaaccctccagcattctgaacttgcccggggagtcgacgctacggagggactttctgaggcttcagctggccaacaaggagcggtctgaagccctgcggcggcagcaactcgagcagcagcaaagggaaaacgaggagcacaagagacagctcctcgcagaaagacagaagcgcatcgaggaacaaaaagaacagaggcgcagacttgaagagcaacagaggcgcgagaaagagcttagaaagcagcaggagagagagcagagacgacactatgaagagcagatgcgcagggaggaggagcggagaagagcggaacatgagcaagagtacatccgtagacagcttgaggaagaacaacggcagttggaaattctacagcagcagcttctgcatgaacaggcactactcctagagtacaagcggaagcagcttgaggaacagagacaggccgaacggctgcagcgacagctgaagcaggaacgcgactacctcgtcagcttgcagcaccaaaggcaagaacagcgtcctgttgagaagaaacccctgtatcactacaaagagggtatgtctccgagcgaaaaaccagcttgggcaaaggagatccctcatctggtagctgtcaagagccagggacccgcattgacagccagccaatctgttcatgaacagcccactaaaggcctgagcggtttccaggaagctctgaatgttacctcgcatagggtcgagatgcctcggcagaactccgatcctacctccgaaaatccgccgctgccgaccagaatcgaaaaattcgatagatcaagttggctccgccaagaggaagatatcccacccaaggtgcctcagcggaccacttctatctcgccagctctggctagaaaaaatagccccggcaatggctcagccctcgggccacgacttggctcacagccaataagggcctcaaatcctgacttgcgtcgaactgagccgatcctcgagtcaccgttacagcggacctcttctggcagttcgtctagttcttccactccttcttcccagccatcttcgcagggaggatcacagcccggtagccaggctggaagtagcgaacgtactcgggtgagggcaaattctaaaagtgaaggatcccctgttctccctcacgagcctgctaaagtcaagcccgaggaaagccgagacatcacacgtccttctagaccagcggacctcacagcccttgccaaggagctccgcgagttgagaatcgaggagaccaatcgtccaatgaagaaggtgactgactactcaagtagttccgaagagtctgaatcttctgaggaagaagaggaggatggggagagcgagacccacgatggcactgtggccgtgtccgatattccccgactaatccccactggagccccagggagcaatgagcagtataatgttggcatggtcggtactcacggtctggagactagccacgcggacagtttctctggctctataagccgcgagggaactctgatgatccgtgagactagtggagagaagaagaggagcgggcactccgacagcaacggtttcgccggacacattaatctgccagacctggtgcaacagtctcactcccccgcaggaacaccgacagagggactgggccgagttagcacccatagccaggagatggactccggaactgaatatggtatgggaagcagcaccaaagcgagcttcacccctttcgtcgacccgcgggtgtatcagactagcccaactgatgaggacgaggaagatgaggagagctcagctgcagctcttttcactagcgaactgctgcgccaggagcaggccaagctaaacgaagctagaaagatcagcgtcgtgaacgttaaccctacaaacattaggccccacagcgacacacctgagatcagaaaatacaagaaaagatttaattcagaaattctgtgtgccgctttgtggggggtcaatctcctggtcgggactgagaatggattgatgctgctcgacaggagtgggcagggaaaagtgtataatctgattaatcgccggcggttccagcaaatggatgttctggaaggtcttaacgtattagtgacgatctctgggaaaaagaacaaactgagggtgtactatctttcctggctgaggaaccgcatccttcacaacgacccggaggttgaaaagaagcagggttggattacagtaggcgatctggaaggatgcattcattacaaagtggtaaagtacgagcgcatcaagttcctagtcattgccttgaaaaatgctgttgaaatctacgcttgggctcctaagccctaccacaaattcatggccttcaagtcctttgcggatctccaacataaacccctcctcgtggacctgacagttgaagagggtcagcggctcaaggtaatctttgggtcccatactggctttcacgtcatcgatgtggacagcggtaacagctacgatatatacatccccagccatattcagggcaacatcacacctcacgccatcgtgatcctgccgaagaccgatgggatggagatgctggtttgctacgaggatgagggcgtgtacgtaaacacctatggacgtattacaaaagacgttgtgcttcagtggggagaaatgcccacaagcgtggcctacatacattcgaaccagatcatggggtggggggaaaaagctatagaaatcagaagcgtagagaccggccatctcgatggggtctttatgcataagcgagcgcagcgccttaagtttctgtgtgagcgcaatgataaggttttctttgccagtgtccgatccggggggtcttcccaagtgttttttatgactcttaatagaaacagtatgatgaactggtag

SEQ ID NO: 61299 - DNA, 3807 bp, Artificial Sequence
  derived and/or modified sequence
atggccagcgacagccccgcccggagcctggacgagatcgacctgagcgccctccgggatcccgccggcatttttgagctagtggaactggtcggtaatggaacctatggacaagtgtacaagggccgccacgtgaaaaccggtcaactagcagccatcaaagtgatggacgtgaccggggatgaggaggaggaaataaagcaggaaatcaacatgctcaagaaatactcacaccaccgcaacatcgccacatattatggggcctttatcaaaaagaatcccccagggatggacgatcagttgtggctggtgatggaattctgtggggcgggctcagtgacggatttaatcaagaacacaaagggcaataccctgaaagaagaatggatcgcatacatatgtcgagaaattctgagaggactttctcatctgcatcagcataaagtcatccaccgagacatcaagggacaaaacgtcctcctcacagagaacgcagaggtcaaactggtcgatttcggagtgtcagcccaactagaccggacagtcggtcggcgcaacaccttcattggaaccccatattggatggccccagaggtgattgcctgcgacgagaatcccgatgccacctacgatttcaaaagcgacctgtggagtctcggaattacagccatagagatggccgaaggggcacctccactctgcgacatgcatccaatgagggcccttttcctgattccacggaaccccgccccccggctcaaatctaagaagtggtccaagaagtttcagtccttcattgagagttgcctagtcaagaatcactcacagcggcccgctaccgagcagctaatgaaacacccttttatcagagaccagcctaacgagcgacaggtccggattcagctcaaagatcacatcgaccgcaccaagaaaaaaagaggtgagaaggatgaaacagagtacgaatacagtggatccgaagaggaggaagaggagaatgacagcggagaaccttctagtatactgaacttgccaggggagagcaccctgcggagagactttctgcgtctgcagttggccaacaaggaaaggagcgaggccctgcgtcggcagcagttagagcaacagcagcgcgagaatgaggaacacaagaggcagctgctggccgagcggcagaaaagaatagaagaacagaaggaacagcgaaggcggctcgaggaacagcaacggagggagaaggaacttaggaagcaacaggagagagagcagcgacgacactacgaggaacaaatgcgtcgcgaagaagaaaggaggcgagcagagcacgaacaggaatacaaacgaaaacagctcgaggagcagagacaggcagagcggctccaacgacagctgaagcaggagcgcgattatttggtgagcctccaacaccagagacaggagcagagacctgtcgagaaaaaaccactttatcactataaagaaggcatgtccccatctgaaaagcctgcctgggccaaggagatcccccacctggttgcagtgaagtctcagggacccgctctgaccgcttctcagtcggtacatgaacagccaacgaagggattgtcggggttccaggaggctttgaacgtgacttctcaccgcgttgagatgccaaggcagaactctgatcctacgagcgagaatccccctttgcccacccgaattgagaagttcgaccgaagtagttggttgcggcaagaggaggacatacccccaaaagtcccccagagaactacgtctatcagccctgctcttgctcgcaagaattctcctggaaacggctccgctcttggccccagattaggcagccagccgattcgtgcgagcaatccggatctgcgcaggactgagcctatactggaatccccacttcagcggacctcctccggatcctcctcaagctccagcactccttcgagtcagccgtccagccaagggggatcccaaccgggctcgcaggcaggaagcagcgaaagaaccagggtaagagccaactctaaatccgagggctcacccgtgctacctcatgaaccggctaaggtgaagcctgaggaaagccgtgatattaccagaccatcacggccagctgatctcacagcgctggcaaaggaattacgggagttacgaattgaggagactaacagacccatgaaaaaagttactgattactcttcttcttccgaagaatctgagagctccgaagaagaggaagaagatggagaaagcgaaactcatgatggcacggtagccgtatccgatatccctcgattgatccctaccggtgcccccgggagcaatgagcagtacaatgttgggatggtcggcacccacggtttggagactagccacgccgactcattttccggttccatttcgagagagggtaccctaatgattcgcgagaccagcggtgagaagaagagaagtggccattcagactcgaatgggtttgctggtcatatcaatctaccagatctggtacagcagtctcactccccagctgggacgcctaccgagggcctgggcagggtatcgactcacagccaagaaatggactctggcaccgagtatgggatgggtagctccacaaaggcctctttcactccgttcgtggacccacgagtttaccagaccagcccgaccgatgaggacgaggaggatgaggagagcagcgcggccgcattatttacctccgaactgctgagacaagagcaggcaaagctaaacgaggccaggaagatctcagtggtcaatgtgaacccaaccaatatacgcccccatagtgacacccctgagatcaggaaatataagaaacgcttcaactccgaaatcctctgcgcagctctctggggcgttaatctgctcgtcgggactgaaaacggtcttatgcttctggacagatccggacagggaaaggtctataatctgatcaaccggagaagattccagcaaatggatgtgcttgaaggactgaatgtcctggtgacaatctcagggaagaaaaacaaactgcgtgtatattatctgagctggctgaggaatcgaatcctgcataatgaccctgaggttgaaaagaaacagggttggattactgttggagatctcgagggatgtattcattataaggtcgtaaagtacgaacggatcaaattcttggtcattgccctcaaaaacgctgtggagatttacgcatgggcaccaaagccataccacaagttcatggcttttaaatcttttgcagatctgcaacacaaacccctgttagtcgatttaacggtggaggaaggacaaagactgaaggtcatatttggctctcacacaggatttcatgtgattgatgttgattctgggaattcttatgacatctatatcccatcacacatccagggaaacatcacaccccatgctatagtaatcttgcccaaaacagacggtatggagatgctagtttgttacgaggatgagggagtctacgtaaatacgtatgggaggatcacgaaagacgtcgtgttacagtggggcgagatgcctacatcggttgcatacatccatagtaatcagattatgggatggggtgaaaaggcgattgagataaggtccgttgagaccggccacctggacggcgtctttatgcacaaaagagcacaacgcctaaaatttttgtgtgaacggaacgataaggtgttttttgcttccgtccgatcgggggggtccagtcaggtattctttatgactctgaaccggaacagtatgatgaattggtag

SEQ ID NO: 61300 - DNA, 3894 bp, Artificial Sequence
  derived and/or modified sequence
atggcgtccgactccccggcacgaagtctggacgaaattgacctcagcgccctgcgtgatcccgcaggaattttcgagctcgtcgagctggtgggaaacggtacctatggacaggtgtacaagggcaggcacgtgaaaacaggccagctagctgctatcaaggttatggacgtgaccggggacgaagaggaggaaatcaaacaggaaatcaatatgctgaagaagtatagccatcatcgcaacatagcaacttattacggggcatttattaagaagaaccctccaggaatggacgaccaactctggctagtgatggagttctgtggcgctggctctgtcacggacctgatcaagaacacaaagggcaacaccctgaaagaggagtggattgcttacatctgcagggaaattcttcgaggcctgagccacttgcaccagcacaaggtaattcatcgcgatataaaaggccagaacgtgctccttaccgaaaacgccgaagtgaagctggtggactttggcgtgagcgcacagttagaccgaactgtgggaaggagaaacaccttcatcggcacaccgtattggatggcgccagaagtcatcgcctgcgacgagaatcccgacgccacatacgactttaaatcagacctttggagcctgggaattacagccatcgagatggctgaaggagcacctcccctgtgtgatatgcatccaatgcgcgctctgttcctgatcccaagaaatcccgctcccagattgaagtccaaaaagtggtccaaaaagtttcaatcctttatcgagagttgtttggtgaagaatcactctcaacgacctgccaccgaacagctgatgaagcatcccttcattcgagaccagccaaacgaacgccaggtaagaattcagttgaaagatcatattgaccgtaccaaaaagaagcggggagagaaggatgagaccgagtacgagtatagcgggagtgaggaagaagaagaagaaaacgacagcggagaacccagctcaattctgaacctccctggcgaatcgacactgcgtcgtgacttccttagactccaactggccaacaaggaaaggtccgaggccctgagacgccaacagttggagcaacagcaaagggagaacgaggagcataaaaggcagctactcgcagaaaggcagaaacgaatagaagagcagaaggagcagaggaggcgactggaagagcagcagcgcagagagaaagaactgagaaaacagcaggagcgagagcagcggaggcactatgaagaacagatgcggcgtgaagaggagcggagaagggctgaacatgaacaagagtacattaggcgacagctggaggaggagcagagacaactggaaatcctgcagcaacagctgctccacgaacaggccctgctccttgagtacaaacggaagcaactcgaggagcagcggcaagctgagcgactgcagcggcaactgaagcaagagcgtgactatttagtgtcactgcagcaccagagacaggagcaaaggcccgtggagaagaagcctctctatcactataaggaggggatgagcccctcggaaaagccagcctgggccaaggagattccgcacctggtggcagtgaagagccagggcccagctctgaccgcctcccaaagcgtgcatgagcagccgactaaggggctgtcagggttccaagaagctctaaatgttactagtcacagagtggagatgccgaggcagaattcagaccctacctccgaaaatcctcccctcccgacccggatagaaaagttcgatcgctcttcctggctgcgtcaggaggaggacatcccaccgaaggtgccacagagaaccacctctatttcacccgctcttgctaggaagaactccccaggcaacgggagcgcacttggcccaagactcggatcccagcctatccgagcatcaaacccggacttacggaggactgagccaatcctcgagtctccacttcagaggactagctccgggtcaagctcatccagttcaacaccctcatcccaaccttcttcgcaaggaggtagccagccaggaagccaggccggaagttcagaacgcactcgtgttagggcaaattcaaagtctgaggggagtccggtcctgcctcatgaacccgcaaaggtgaaaccagaggaatcgcgagacatcacccgacccagcaggcccgcagatttaaccgcactggccaaggaactcagggaactgcggattgaggagactaaccggccaatgaaaaaggtgacagactactcatcttcaagtgaggagtcagaatcatctgaggaggaagaagaggatggagaaagcgagacccatgatggcaccgtcgcggtctctgacatacctagacttatccccacaggggcacccggaagtaacgagcagtacaatgtagggatggtaggaactcatggactggagacgtctcacgctgatagctttagcgggtccatctccagagagggcaccctgatgataagagagacttctggcgaaaagaagcgctcaggacattcagatagcaatggattcgctggacatattaatttaccagatctggtccagcaaagccacagtccagccggtacaccgactgagggactcggcagggtgtcgacccacagccaggaaatggattctgggacagaatacggtatggggtcctccaccaaggccagttttaccccttttgttgatccgcgtgtctatcagacatccccaacagacgaggacgaggaagatgaggagtccagcgcggcagccctcttcacatccgagctgctcagacaggagcaagccaaactgaatgaagccagaaagatttcagtggttaacgtgaaccctactaatattaggccacactctgacactcctgagatacgcaagtataagaagcgatttaacagtgagatcctatgtgctgccctgtggggggtgaacctcctagtcggcacagaaaatggacttatgttgttggacagatccgggcagggtaaggtgtacaacttgatcaatagacgccgattccagcagatggatgtccttgagggtctcaacgtgctggtgaccatttctggaaaaaaaaacaaactgagagtgtactatttgtcatggctgcgcaataggatcctgcacaatgaccctgaggtggagaaaaagcagggttggataactgttggcgacctcgaggggtgtatccattacaaagtggtcaagtacgagcggattaaattcttggtgattgccctgaaaaatgctgttgaaatttatgcctgggccccaaaaccttaccacaagtttatggcgttcaagagctttgcagacctgcagcacaagcccctgctagttgacctgaccgtggaggagggccaacgtctaaaggtgatcttcggcagtcacaccggctttcacgtcatcgacgtggactcgggaaattcttatgatatctatatcccctcacatattcaaggaaacatcaccccacacgctatcgtgatcctgcctaagactgacggaatggaaatgcttgtatgttacgaagatgaaggcgtgtatgtcaatacgtacgggaggataacaaaggatgtagttttgcaatggggcgagatgcccacaagcgtggcgtatattcacagcaaccagataatgggatggggcgagaaagccatcgaaatacggtccgtagaaactgggcatttggacggggttttcatgcacaaaagagcccagagattgaagtttttgtgcgaaagaaatgacaaagtcttctttgccagcgtgaggagcggaggaagctcccaggtgttcttcatgacattaaaccgcaactcaatgatgaattggtag

SEQ ID NO: 61301 - DNA, 3807 bp, Artificial Sequence
  derived and/or modified sequence
atggccagtgatagcccggcaaggtccctggacgaaatcgatctgagcgctctccgcgatccggctgggatttttgaactggtggagctggttgggaacggtacatacgggcaggtatacaagggtcgacacgtgaaaactggccaacttgcagcaatcaaagtgatggacgttacgggagacgaggaagaggagattaagcaagaaatcaatatgctgaaaaaatactcacatcaccgcaatatcgctacatactacggcgcttttatcaaaaagaatccacctgggatggacgaccagctgtggttagtgatggaattttgtggcgcaggtagtgtgacggatctaatcaagaacactaaaggaaacaccctgaaagaagaatggatcgcctatatatgcagggagatactccggggtctctctcatctgcaccaacacaaggtgatacatcgggatattaagggacagaatgtgctgctgacggagaacgccgaggtcaagctcgtcgatttcggtgtctctgcccaactcgataggaccgtgggacgccgtaatacattcatcggcactccctactggatggctcctgaggtcattgcctgtgatgagaatcctgacgctacttatgatttcaaatccgatctatggagcctggggattactgcaattgaaatggccgaaggagctcccccattgtgtgacatgcaccccatgagagcactgtttctgatccccagaaacccagcccctcggcttaagagtaagaagtggtctaagaagttccaatcgttcatcgaatcttgtctggttaagaatcacagtcaaagaccagctaccgagcagcttatgaaacaccctttcatccgggaccaacccaatgagcggcaggtgagaattcagcttaaggaccatatcgatcgtacaaagaagaagaggggagaaaaagacgaaacagagtatgaatattctggatccgaggaagaggaagaggagaacgatagtggcgagccttcttcgatcctgaatcttcctggggaaagcactctcagacgcgactttttgcggttgcagctggccaacaaggagcgctccgaggctctgagacgccagcagctggagcaacagcagagggaaaatgaggaacacaagcgccagctgctcgctgagagacagaaaagaattgaagagcagaaagagcagcgaagaaggctggaggaacagcaacgccgagaaaaagagctgcgaaagcagcaagagcgcgagcagagacggcattatgaagaacagatgagaagagaagaggagcgaaggagagctgagcacgaacaggagtataagagaaagcagctggaagaacagaggcaggccgagcgccttcagcgccagctcaagcaggagcgggattacctggttagcctgcagcaccagcgccaagaacagcggcctgtagagaaaaaacccctataccactacaaagaaggcatgtccccatcggagaagcctgcatgggccaaggaaatcccccaccttgtcgcagtcaagtctcaggggcctgcactgaccgctagtcagtccgttcatgaacagccaacgaaagggctgtctgggtttcaggaggctctgaacgtgacctctcacagggtggagatgcccagacagaactctgatccaacaagtgagaaccctccactccccacaaggatagagaaatttgacaggtccagctggctgaggcaggaggaggatatccccccaaaggttcctcagcgaaccactagtattagtcctgccctcgccagaaagaattcaccgggaaacgggagtgcgctcggcccaagacttggatcccagccaatacgcgcatctaatccagatctacgccgaaccgagcccattctggaatcaccgctgcagcggacaagtagcggctcaagctcaagctcctcgaccccctcaagccagccctcttcgcagggcggaagtcaaccgggatcacaggccggaagcagtgaaagaacaagggtccgggcaaattccaaatcggaagggtcaccagtgttaccacacgaaccagctaaggtgaagccggaagaatcacgagacattacgagaccttcccggccagctgacctcactgcactggccaaagagctgagggagttgagaatcgaggagaccaacagacctatgaagaaggtaaccgattattcctcctctagcgaagagagcgaaagcagtgaagaggaagaagaagatggggaatccgaaacgcacgacggtacagtggcggtgagcgacatcccacgcttgattcctaccggcgctcccggaagcaatgagcagtacaatgtggggatggtgggaacgcatgggttagagacctctcacgcagattcattcagtggctcgatttccagagagggaaccctgatgatcagggaaacctccggggaaaaaaagcggagtggccactctgacagcaacggatttgcgggtcacattaatcttcctgatctggtgcaacagtcccattcccctgccggaacgcctactgagggccttggcagagtctcaacgcacagtcaggaaatggactccggcacagagtacggcatgggcagctctacgaaggcatcttttaccccgttcgtggatccgagggtctatcagacatcacccacggacgaggacgaagaagacgaggaatcttccgccgctgccctgtttaccagtgagttactgaggcaggaacaggctaaactcaatgaagcgagaaaaatcagtgtggtcaacgttaatccgacgaacattcgcccacattctgacacgccagagatacgaaagtacaaaaagagatttaatagcgagatactatgtgcggctttgtggggagtgaacctccttgtgggcaccgagaatggtctgatgctcctggaccggagtgggcaaggcaaagtctataatctcatcaatagacgcagattccagcaaatggatgtgctggaggggctaaatgtgctggtaacaatcagcggcaagaagaataaacttagagtgtactatttgtcgtggctgagaaaccgcatactgcataacgatccagaggtggaaaagaagcaggggtggataacggtgggcgacctagagggatgtatccactacaaggttgtgaaatacgaaaggattaagtttctcgtaatcgctttgaaaaacgcggtagagatctacgcatgggcccctaaaccctaccataaattcatggcattcaagagcttcgccgatcttcagcacaagccccttttggtagatctgacagtggaggaggggcagcgtctaaaagtgatattcggcagtcatacgggcttccatgttatagacgtcgacagcggaaactcatatgatatctacatcccatctcatatacagggaaacataactccccatgcaatagtcatccttccaaaaactgatggtatggagatgctggtgtgctatgaagacgagggagtgtatgtgaacacctatggtagaataacaaaagacgtggtgctgcagtggggcgaaatgccgaccagcgtggcctacatacacagtaatcagattatgggctggggtgagaaagctattgaaattaggtccgtggaaacagggcaccttgacggggtctttatgcataagagggctcagaggctgaaatttttgtgcgagcgcaacgataaagtgttctttgcatctgtgagaagcggcggaagtagccaagttttcttcatgaccttaaacagaaattctatgatgaactggtag

SEQ ID NO: 61302 - DNA, 3894 bp, Artificial Sequence
  derived and/or modified sequence
atggcgagcgactccccggctcgaagcctggatgaaatagatctctcggctctgagggaccccgcagggatctttgaattggtggaacttgttggaaatggaacatacgggcaagtttataagggtcgtcatgtcaaaacgggccagcttgcagccatcaaggttatggatgtcacaggggatgaagaggaagaaatcaaacaagaaattaacatgttgaagaaatattctcatcaccggaatattgctacatactatggtgcttttatcaaaaagaacccaccaggcatggatgaccaactttggttggtgatggagttttgtggtgctggctctgtcaccgacctgatcaagaacacaaaaggtaacacgttgaaagaggagtggattgcatacatctgcagggaaatcttacgggggctgagtcacctgcaccagcataaagtgattcatcgagatattaaagggcaaaatgtcttgctgactgaaaatgcagaagttaaactagtggactttggagtcagtgctcagcttgatcgaacagtgggcaggaggaatactttcattggaactccctactggatggcaccagaagttattgcctgtgatgaaaacccagatgccacatatgatttcaagagtgacttgtggtctttgggtatcaccgccattgaaatggcagaaggtgctccccctctctgtgacatgcaccccatgagagctctcttcctcatcccccggaacccagcgcctcggctgaagtctaagaagtggtcaaaaaaattccagtcatttattgagagctgcttggtaaagaatcacagccagcgaccagcaacagaacaattgatgaagcatccatttatacgagaccaacctaatgagcgacaggtccgcattcaactcaaggaccatattgatagaacaaagaagaagcgaggagaaaaagatgagacagagtatgagtacagtggaagtgaggaagaagaggaggagaatgactcaggagagcccagctccatcctgaatctgccaggggagtcgacgctgcggagggactttctgaggctgcagctggccaacaaggagcgttctgaggccctacggaggcagcagctggagcagcagcagcgggagaatgaggagcacaagcggcagctgctggccgagcgtcagaagcgcatcgaggagcagaaagagcagaggcggcggctggaggagcaacaaaggcgagagaaggagctgcggaagcagcaggagagggagcagcgccggcactatgaggagcagatgcgccgggaggaggagaggaggcgtgcggagcatgaacaggaatacatcaggcgacagttagaggaggagcagagacagttagagatcttgcagcagcagctactgcatgaacaagctctacttctggaatataagcgcaaacaattggaagaacagagacaagcagaaagactgcagaggcagctaaagcaagaaagagactacttagtttcccttcagcatcagcggcaggagcagaggcctgtggagaagaagccactgtaccattacaaagaaggaatgagtcctagtgagaagccagcatgggccaaggagatcccacatctggtagctgtaaaatcccagggacctgccttgaccgcctcccagtcagtgcacgagcagcccacaaagggcctctctgggtttcaggaggctctgaacgtgacctcccaccgcgtggagatgccacgccagaactcagatcccacctcggaaaatcctcctctccccactcgcattgaaaagtttgaccgaagctcttggttacgacaggaagaagacattccaccaaaggtgcctcaaagaacaacttctatatccccagcattagccagaaagaattctcctgggaatggtagtgctctgggacccagactaggatctcaacccatcagagcaagcaaccctgatctccggagaactgagcccatcttggagagccccttgcagaggaccagcagtggcagttcctccagctccagcacccctagctcccagcccagctcccaaggaggctcccagcctggatcacaagcaggatccagtgaacgcaccagagttcgagccaacagtaagtcagaaggatcacctgtgctcccccatgagcctgcgaaggtgaaaccagaagaatccagggacattacccggcccagtcgaccagctgatctgacggcattagccaaagaactaagagaactccggattgaagaaacaaaccgcccaatgaagaaggtgactgattactcctcctccagtgaggagtcagaaagtagcgaggaagaggaggaagatggagagagcgagacccatgatgggacagtggctgtcagcgacatacccagactgataccaacaggagctccaggcagcaacgagcagtacaatgtgggaatggtggggacgcatgggctggagacctctcatgcggacagtttcagcggcagtatttcaagagaaggaaccttgatgattagagagacgtctggagagaagaagcgatctggccacagtgacagcaatggctttgctggccacatcaacctccctgacctggtgcagcagagccattctccagctggaaccccgactgagggactggggcgcgtctcaacccattcccaggagatggactctgggactgaatatggcatggggagcagcaccaaagcctccttcaccccctttgtggaccccagagtataccagacgtctcccactgatgaagatgaagaggatgaggaatcatcagccgcagctctgtttactagcgaacttcttaggcaagaacaggccaaactcaatgaagcaagaaagatttcggtggtaaatgtaaacccaaccaacattcggcctcatagcgacacaccagaaatcagaaaatacaagaaacgattcaactcagaaatactttgtgcagctctgtggggtgtaaaccttctggtggggactgaaaatggcctgatgcttttggaccgaagtgggcaaggcaaagtctataatctgatcaaccggaggcgatttcagcagatggatgtgctagagggactgaatgtccttgtgacaatttcaggaaagaagaataagctacgagtttactatctttcatggttaagaaacagaatactacataatgacccagaagtagaaaagaaacaaggctggatcactgttggggacttggaaggctgtatacattataaagttgttaaatatgaaaggatcaaatttttggtgattgccttaaagaatgctgtggaaatatatgcttgggctcctaaaccgtatcataaattcatggcatttaagtcttttgcagatctccagcacaagcctctgctagttgatctcacggtagaagaaggtcaaagattaaaggttatttttggttcacacactggtttccatgtaattgatgttgattcaggaaactcttatgatatctacataccatctcatattcagggcaatatcactcctcatgctattgtcatcttgcctaaaacagatggaatggaaatgcttgtttgctatgaggatgagggggtgtatgtaaacacctatggccggataactaaggatgtggtgctccaatggggagaaatgcccacgtctgtggcctacattcattccaatcagataatgggctggggcgagaaagctattgagatccggtcagtggaaacaggacatttggatggagtatttatgcataagcgagctcaaaggttaaagtttctatgtgaaagaaatgataaggtattttttgcatccgtgcgatctggaggaagtagccaagtgtttttcatgaccctcaacagaaattccatgatgaactggtaa

SEQ ID NO: 61303 - DNA, 3807 bp, Artificial Sequence
  derived and/or modified sequence
atggcgagcgactccccggctcgaagcctggatgaaatagatctctcggctctgagggaccccgcagggatctttgaattggtggaacttgttggaaatggaacatacgggcaagtttataagggtcgtcatgtcaaaacgggccagcttgcagccatcaaggttatggatgtcacaggggatgaagaggaagaaatcaaacaagaaattaacatgttgaagaaatattctcatcaccggaatattgctacatactatggtgcttttatcaaaaagaacccaccaggcatggatgaccaactttggttggtgatggagttttgtggtgctggctctgtcaccgacctgatcaagaacacaaaaggtaacacgttgaaagaggagtggattgcatacatctgcagggaaatcttacgggggctgagtcacctgcaccagcataaagtgattcatcgagatattaaagggcaaaatgtcttgctgactgaaaatgcagaagttaaactagtggactttggagtcagtgctcagcttgatcgaacagtgggcaggaggaatactttcattggaactccctactggatggcaccagaagttattgcctgtgatgaaaacccagatgccacatatgatttcaagagtgacttgtggtctttgggtatcaccgccattgaaatggcagaaggtgctccccctctctgtgacatgcaccccatgagagctctcttcctcatcccccggaacccagcgcctcggctgaagtctaagaagtggtcaaaaaaattccagtcatttattgagagctgcttggtaaagaatcacagccagcgaccagcaacagaacaattgatgaagcatccatttatacgagaccaacctaatgagcgacaggtccgcattcaactcaaggaccatattgatagaacaaagaagaagcgaggagaaaaagatgagacagagtatgagtacagtggaagtgaggaagaagaggaggagaatgactcaggagagcccagctccatcctgaatctgccaggggagtcgacgctgcggagggactttctgaggctgcagctggccaacaaggagcgttctgaggccctacggaggcagcagctggagcagcagcagcgggagaatgaggagcacaagcggcagctgctggccgagcgtcagaagcgcatcgaggagcagaaagagcagaggcggcggctggaggagcaacaaaggcgagagaaggagctgcggaagcagcaggagagggagcagcgccggcactatgaggagcagatgcgccgggaggaggagaggaggcgtgcggagcatgaacaggaatataagcgcaaacaattggaagaacagagacaagcagaaagactgcagaggcagctaaagcaagaaagagactacttagtttcccttcagcatcagcggcaggagcagaggcctgtggagaagaagccactgtaccattacaaagaaggaatgagtcctagtgagaagccagcatgggccaaggagatcccacatctggtagctgtaaaatcccagggacctgccttgaccgcctcccagtcagtgcacgagcagcccacaaagggcctctctgggtttcaggaggctctgaacgtgacctcccaccgcgtggagatgccacgccagaactcagatcccacctcggaaaatcctcctctccccactcgcattgaaaagtttgaccgaagctcttggttacgacaggaagaagacattccaccaaaggtgcctcaaagaacaacttctatatccccagcattagccagaaagaattctcctgggaatggtagtgctctgggacccagactaggatctcaacccatcagagcaagcaaccctgatctccggagaactgagcccatcttggagagccccttgcagaggaccagcagtggcagttcctccagctccagcacccctagctcccagcccagctcccaaggaggctcccagcctggatcacaagcaggatccagtgaacgcaccagagttcgagccaacagtaagtcagaaggatcacctgtgctcccccatgagcctgcgaaggtgaaaccagaagaatccagggacattacccggcccagtcgaccagctgatctgacggcattagccaaagaactaagagaactccggattgaagaaacaaaccgcccaatgaagaaggtgactgattactcctcctccagtgaggagtcagaaagtagcgaggaagaggaggaagatggagagagcgagacccatgatgggacagtggctgtcagcgacatacccagactgataccaacaggagctccaggcagcaacgagcagtacaatgtgggaatggtggggacgcatgggctggagacctctcatgcggacagtttcagcggcagtatttcaagagaaggaaccttgatgattagagagacgtctggagagaagaagcgatctggccacagtgacagcaatggctttgctggccacatcaacctccctgacctggtgcagcagagccattctccagctggaaccccgactgagggactggggcgcgtctcaacccattcccaggagatggactctgggactgaatatggcatggggagcagcaccaaagcctccttcaccccctttgtggaccccagagtataccagacgtctcccactgatgaagatgaagaggatgaggaatcatcagccgcagctctgtttactagcgaacttcttaggcaagaacaggccaaactcaatgaagcaagaaagatttcggtggtaaatgtaaacccaaccaacattcggcctcatagcgacacaccagaaatcagaaaatacaagaaacgattcaactcagaaatactttgtgcagctctgtggggtgtaaaccttctggtggggactgaaaatggcctgatgcttttggaccgaagtgggcaaggcaaagtctataatctgatcaaccggaggcgatttcagcagatggatgtgctagagggactgaatgtccttgtgacaatttcaggaaagaagaataagctacgagtttactatctttcatggttaagaaacagaatactacataatgacccagaagtagaaaagaaacaaggctggatcactgttggggacttggaaggctgtatacattataaagttgttaaatatgaaaggatcaaatttttggtgattgccttaaagaatgctgtggaaatatatgcttgggctcctaaaccgtatcataaattcatggcatttaagtcttttgcagatctccagcacaagcctctgctagttgatctcacggtagaagaaggtcaaagattaaaggttatttttggttcacacactggtttccatgtaattgatgttgattcaggaaactcttatgatatctacataccatctcatattcagggcaatatcactcctcatgctattgtcatcttgcctaaaacagatggaatggaaatgcttgtttgctatgaggatgagggggtgtatgtaaacacctatggccggataactaaggatgtggtgctccaatggggagaaatgcccacgtctgtggcctacattcattccaatcagataatgggctggggcgagaaagctattgagatccggtcagtggaaacaggacatttggatggagtatttatgcataagcgagctcaaaggttaaagtttctatgtgaaagaaatgataaggtattttttgcatccgtgcgatctggaggaagtagccaagtgtttttcatgaccctcaacagaaattccatgatgaactggtaa

SEQ ID NO: 61304 - protein, 1276 aa, Artificial Sequence
  derived and/or modified sequence
MASDSPARSLDEIDLSALRDPAGIFELVELVGNGTYGQVYKGRHVKTGQLAAIKVMDVTGDEEEEIKQEINMLKKYSHHRNIATYYGAFIKKNPPGMDDQLWLVMEFCGAGSVTDLIKNTKGNTLKEEWIAYICREILRGLSHLHQHKVIHRDIKGQNVLLTENAEVKLVDFGVSAQLDRTVGRRNTFIGTPYWMAPEVIACDENPDATYDFKSDLWSLGITAIEMAEGAPPLCDMHPMRALFLIPRNPAPRLKSKKWSKKFQSFIESCLVKNHSQRPATEQLMKHPFIRDQPNERQVRIQLKDHIDRTKKKRGEKDETEYEYSGSEEEEEENDSGEPSSILNLPGESTLRRDFLRLQLANKERSEALRRQQLEQQQRENEEHKRQLLAERQKRIEEQKEQRRRLEEQQRREKELRKQQEREQRRHYEEQMRREEERRRAEHEQEYKRKQLEEQRQAERLQRQLKQERDYLVSLQHQRQEQRPVEKKPLYHYKEGMSPSEKPAWAKEIPHLVAVKSQGPALTASQSVHEQPTKGLSGFQEALNVTSHRVEMPRQNSDPTSENPPLPTRIEKFDRSSWLRQEEDIPPKVPQRTTSISPALARKNSPGNGSALGPRLGSQPIRASNPDLRRTEPILESPLQRTSSGSSSSSSTPSSQPSSQGGSQPGSQAGSSERTRVRANSKSEGSPVLPHEPAKVKPEESRDITRPSRPASYKKAIDEDLTALAKELRELRIEETNRPMKKVTDYSSSSEESESSEEEEEDGESETHDGTVAVSDIPRLIPTGAPGSNEQYNVGMVGTHGLETSHADSFSGSISREGTLMIRETSGEKKRSGHSDSNGFAGHINLPDLVQQSHSPAGTPTEGLGRVSTHSQEMDSGTEYGMGSSTKASFTPFVDPRVYQTSPTDEDEEDEESSAAALFTSELLRQEQAKLNEARKISVVNVNPTNIRPHSDTPEIRKYKKRFNSEILCAALWGVNLLVGTENGLMLLDRSGQGKVYNLINRRRFQQMDVLEGLNVLVTISGKKNKLRVYYLSWLRNRILHNDPEVEKKQGWITVGDLEGCIHYKVVKYERIKFLVIALKNAVEIYAWAPKPYHKFMAFKSFADLQHKPLLVDLTVEEGQRLKVIFGSHTGFHVIDVDSGNSYDIYIPSHIQGNITPHAIVILPKTDGMEMLVCYEDEGVYVNTYGRITKDVVLQWGEMPTSVAYIHSNQIMGWGEKAIEIRSVETGHLDGVFMHKRAQRLKFLCERNDKVFFASVRSGGSSQVFFMTLNRNSMMNW

SEQ ID NO: 61305 - DNA, 3831 bp, Artificial Sequence
  derived and/or modified sequence
atggccagcgacagccccgccagaagcctggacgagatcgacctgagcgccctgagagaccccgccggcatcttcgagctggtggagctggtgggcaacggcacctacggccaggtgtacaagggcagacacgtgaagaccggccagctggccgccatcaaggtgatggacgtgaccggcgacgaggaggaggagatcaagcaggagatcaacatgctgaagaagtacagccaccacagaaacatcgccacctactacggcgccttcatcaagaagaacccccccggcatggacgaccagctgtggctggtgatggagttctgcggcgccggcagcgtgaccgacctgatcaagaacaccaagggcaacaccctgaaggaggagtggatcgcctacatctgcagagagatcctgagaggcctgagccacctgcaccagcacaaggtgatccacagagacatcaagggccagaacgtgctgctgaccgagaacgccgaggtgaagctggtggacttcggcgtgagcgcccagctggacagaaccgtgggcagaagaaacaccttcatcggcaccccctactggatggcccccgaggtgatcgcctgcgacgagaaccccgacgccacctacgacttcaagagcgacctgtggagcctgggcatcaccgccatcgagatggccgagggcgccccccccctgtgcgacatgcaccccatgagagccctgttcctgatccccagaaaccccgcccccagactgaagagcaagaagtggagcaagaagttccagagcttcatcgagagctgcctggtgaagaaccacagccagagacccgccaccgagcagctgatgaagcaccccttcatcagagaccagcccaacgagagacaggtgagaatccagctgaaggaccacatcgacagaaccaagaagaagagaggcgagaaggacgagaccgagtacgagtacagcggcagcgaggaggaggaggaggagaacgacagcggcgagcccagcagcatcctgaacctgcccggcgagagcaccctgagaagagacttcctgagactgcagctggccaacaaggagagaagcgaggccctgagaagacagcagctggagcagcagcagagagagaacgaggagcacaagagacagctgctggccgagagacagaagagaatcgaggagcagaaggagcagagaagaagactggaggagcagcagagaagagagaaggagctgagaaagcagcaggagagagagcagagaagacactacgaggagcagatgagaagagaggaggagagaagaagagccgagcacgagcaggagtacaagagaaagcagctggaggagcagagacaggccgagagactgcagagacagctgaagcaggagagagactacctggtgagcctgcagcaccagagacaggagcagagacccgtggagaagaagcccctgtaccactacaaggagggcatgagccccagcgagaagcccgcctgggccaaggagatcccccacctggtggccgtgaagagccagggccccgccctgaccgccagccagagcgtgcacgagcagcccaccaagggcctgagcggcttccaggaggccctgaacgtgaccagccacagagtggagatgcccagacagaacagcgaccccaccagcgagaacccccccctgcccaccagaatcgagaagttcgacagaagcagctggctgagacaggaggaggacatcccccccaaggtgccccagagaaccaccagcatcagccccgccctggccagaaagaacagccccggcaacggcagcgccctgggccccagactgggcagccagcccatcagagccagcaaccccgacctgagaagaaccgagcccatcctggagagccccctgcagagaaccagcagcggcagcagcagcagcagcagcacccccagcagccagcccagcagccagggcggcagccagcccggcagccaggccggcagcagcgagagaaccagagtgagagccaacagcaagagcgagggcagccccgtgctgccccacgagcccgccaaggtgaagcccgaggagagcagagacatcaccagacccagcagacccgccagctacaagaaggccatcgacgaggacctgaccgccctggccaaggagctgagagagctgagaatcgaggagaccaacagacccatgaagaaggtgaccgactacagcagcagcagcgaggagagcgagagcagcgaggaggaggaggaggacggcgagagcgagacccacgacggcaccgtggccgtgagcgacatccccagactgatccccaccggcgcccccggcagcaacgagcagtacaacgtgggcatggtgggcacccacggcctggagaccagccacgccgacagcttcagcggcagcatcagcagagagggcaccctgatgatcagagagaccagcggcgagaagaagagaagcggccacagcgacagcaacggcttcgccggccacatcaacctgcccgacctggtgcagcagagccacagccccgccggcacccccaccgagggcctgggcagagtgagcacccacagccaggagatggacagcggcaccgagtacggcatgggcagcagcaccaaggccagcttcacccccttcgtggaccccagagtgtaccagaccagccccaccgacgaggacgaggaggacgaggagagcagcgccgccgccctgttcaccagcgagctgctgagacaggagcaggccaagctgaacgaggccagaaagatcagcgtggtgaacgtgaaccccaccaacatcagaccccacagcgacacccccgagatcagaaagtacaagaagagattcaacagcgagatcctgtgcgccgccctgtggggcgtgaacctgctggtgggcaccgagaacggcctgatgctgctggacagaagcggccagggcaaggtgtacaacctgatcaacagaagaagattccagcagatggacgtgctggagggcctgaacgtgctggtgaccatcagcggcaagaagaacaagctgagagtgtactacctgagctggctgagaaacagaatcctgcacaacgaccccgaggtggagaagaagcagggctggatcaccgtgggcgacctggagggctgcatccactacaaggtggtgaagtacgagagaatcaagttcctggtgatcgccctgaagaacgccgtggagatctacgcctgggcccccaagccctaccacaagttcatggccttcaagagcttcgccgacctgcagcacaagcccctgctggtggacctgaccgtggaggagggccagagactgaaggtgatcttcggcagccacaccggcttccacgtgatcgacgtggacagcggcaacagctacgacatctacatccccagccacatccagggcaacatcaccccccacgccatcgtgatcctgcccaagaccgacggcatggagatgctggtgtgctacgaggacgagggcgtgtacgtgaacacctacggcagaatcaccaaggacgtggtgctgcagtggggcgagatgcccaccagcgtggcctacatccacagcaaccagatcatgggctggggcgagaaggccatcgagatcagaagcgtggagaccggccacctggacggcgtgttcatgcacaagagagcccagagactgaagttcctgtgcgagagaaacgacaaggtgttcttcgccagcgtgagaagcggcggcagcagccaggtgttcttcatgaccctgaacagaaacagcatgatgaactggtag

SEQ ID NO: 61306 - DNA, 3918 bp, Artificial Sequence
  derived and/or modified sequence
atggccagcgacagccccgccagaagcctggacgagatcgacctgagcgccctgagagaccccgccggcatcttcgagctggtggagctggtgggcaacggcacctacggccaggtgtacaagggcagacacgtgaagaccggccagctggccgccatcaaggtgatggacgtgaccggcgacgaggaggaggagatcaagcaggagatcaacatgctgaagaagtacagccaccacagaaacatcgccacctactacggcgccttcatcaagaagaacccccccggcatggacgaccagctgtggctggtgatggagttctgcggcgccggcagcgtgaccgacctgatcaagaacaccaagggcaacaccctgaaggaggagtggatcgcctacatctgcagagagatcctgagaggcctgagccacctgcaccagcacaaggtgatccacagagacatcaagggccagaacgtgctgctgaccgagaacgccgaggtgaagctggtggacttcggcgtgagcgcccagctggacagaaccgtgggcagaagaaacaccttcatcggcaccccctactggatggcccccgaggtgatcgcctgcgacgagaaccccgacgccacctacgacttcaagagcgacctgtggagcctgggcatcaccgccatcgagatggccgagggcgccccccccctgtgcgacatgcaccccatgagagccctgttcctgatccccagaaaccccgcccccagactgaagagcaagaagtggagcaagaagttccagagcttcatcgagagctgcctggtgaagaaccacagccagagacccgccaccgagcagctgatgaagcaccccttcatcagagaccagcccaacgagagacaggtgagaatccagctgaaggaccacatcgacagaaccaagaagaagagaggcgagaaggacgagaccgagtacgagtacagcggcagcgaggaggaggaggaggagaacgacagcggcgagcccagcagcatcctgaacctgcccggcgagagcaccctgagaagagacttcctgagactgcagctggccaacaaggagagaagcgaggccctgagaagacagcagctggagcagcagcagagagagaacgaggagcacaagagacagctgctggccgagagacagaagagaatcgaggagcagaaggagcagagaagaagactggaggagcagcagagaagagagaaggagctgagaaagcagcaggagagagagcagagaagacactacgaggagcagatgagaagagaggaggagagaagaagagccgagcacgagcaggagtacatcagaagacagctggaggaggagcagagacagctggagatcctgcagcagcagctgctgcacgagcaggccctgctgctggagtacaagagaaagcagctggaggagcagagacaggccgagagactgcagagacagctgaagcaggagagagactacctggtgagcctgcagcaccagagacaggagcagagacccgtggagaagaagcccctgtaccactacaaggagggcatgagccccagcgagaagcccgcctgggccaaggagatcccccacctggtggccgtgaagagccagggccccgccctgaccgccagccagagcgtgcacgagcagcccaccaagggcctgagcggcttccaggaggccctgaacgtgaccagccacagagtggagatgcccagacagaacagcgaccccaccagcgagaacccccccctgcccaccagaatcgagaagttcgacagaagcagctggctgagacaggaggaggacatcccccccaaggtgccccagagaaccaccagcatcagccccgccctggccagaaagaacagccccggcaacggcagcgccctgggccccagactgggcagccagcccatcagagccagcaaccccgacctgagaagaaccgagcccatcctggagagccccctgcagagaaccagcagcggcagcagcagcagcagcagcacccccagcagccagcccagcagccagggcggcagccagcccggcagccaggccggcagcagcgagagaaccagagtgagagccaacagcaagagcgagggcagccccgtgctgccccacgagcccgccaaggtgaagcccgaggagagcagagacatcaccagacccagcagacccgccagctacaagaaggccatcgacgaggacctgaccgccctggccaaggagctgagagagctgagaatcgaggagaccaacagacccatgaagaaggtgaccgactacagcagcagcagcgaggagagcgagagcagcgaggaggaggaggaggacggcgagagcgagacccacgacggcaccgtggccgtgagcgacatccccagactgatccccaccggcgcccccggcagcaacgagcagtacaacgtgggcatggtgggcacccacggcctggagaccagccacgccgacagcttcagcggcagcatcagcagagagggcaccctgatgatcagagagaccagcggcgagaagaagagaagcggccacagcgacagcaacggcttcgccggccacatcaacctgcccgacctggtgcagcagagccacagccccgccggcacccccaccgagggcctgggcagagtgagcacccacagccaggagatggacagcggcaccgagtacggcatgggcagcagcaccaaggccagcttcacccccttcgtggaccccagagtgtaccagaccagccccaccgacgaggacgaggaggacgaggagagcagcgccgccgccctgttcaccagcgagctgctgagacaggagcaggccaagctgaacgaggccagaaagatcagcgtggtgaacgtgaaccccaccaacatcagaccccacagcgacacccccgagatcagaaagtacaagaagagattcaacagcgagatcctgtgcgccgccctgtggggcgtgaacctgctggtgggcaccgagaacggcctgatgctgctggacagaagcggccagggcaaggtgtacaacctgatcaacagaagaagattccagcagatggacgtgctggagggcctgaacgtgctggtgaccatcagcggcaagaagaacaagctgagagtgtactacctgagctggctgagaaacagaatcctgcacaacgaccccgaggtggagaagaagcagggctggatcaccgtgggcgacctggagggctgcatccactacaaggtggtgaagtacgagagaatcaagttcctggtgatcgccctgaagaacgccgtggagatctacgcctgggcccccaagccctaccacaagttcatggccttcaagagcttcgccgacctgcagcacaagcccctgctggtggacctgaccgtggaggagggccagagactgaaggtgatcttcggcagccacaccggcttccacgtgatcgacgtggacagcggcaacagctacgacatctacatccccagccacatccagggcaacatcaccccccacgccatcgtgatcctgcccaagaccgacggcatggagatgctggtgtgctacgaggacgagggcgtgtacgtgaacacctacggcagaatcaccaaggacgtggtgctgcagtggggcgagatgcccaccagcgtggcctacatccacagcaaccagatcatgggctggggcgagaaggccatcgagatcagaagcgtggagaccggccacctggacggcgtgttcatgcacaagagagcccagagactgaagttcctgtgcgagagaaacgacaaggtgttcttcgccagcgtgagaagcggcggcagcagccaggtgttcttcatgaccctgaacagaaacagcatgatgaactggtag

SEQ ID NO: 61307 - DNA, 3939 bp, Artificial Sequence
  derived and/or modified sequence
atggccagcgacagccccgccagaagcctggacgagatcgacctgagcgccctgagagaccccgccggcatcttcgagctggtggagctggtgggcaacggcacctacggccaggtgtacaagggcagacacgtgaagaccggccagctggccgccatcaaggtgatggacgtgaccggcgacgaggaggaggagatcaagcaggagatcaacatgctgaagaagtacagccaccacagaaacatcgccacctactacggcgccttcatcaagaagaacccccccggcatggacgaccagctgtggctggtgatggagttctgcggcgccggcagcgtgaccgacctgatcaagaacaccaagggcaacaccctgaaggaggagtggatcgcctacatctgcagagagatcctgagaggcctgagccacctgcaccagcacaaggtgatccacagagacatcaagggccagaacgtgctgctgaccgagaacgccgaggtgaagatcgtggacttcggcgtgagcgcccagctggacagaaccgtgggcagaagaaacaccttcatcggcaccccctactggatggcccccgaggtgatcgcctgcgacgagaaccccgacgccacctacgacttcaagagcgacctgtggagcctgggcatcaccgccatcgagatggccgagggcgccccccccctgtgcgacatgcaccccatgagagccctgttcctgatccccagaaaccccgcccccagactgaagagcaagaagtggagcaagaagttccagagcttcatcgagagctgcctggtgaagaaccacagccagagacccgccaccgagcagctgatgaagcaccccttcatcagagaccagcccaacgagagacaggtgagaatccagctgaaggaccacatcgacagaaccaagaagaagagaggcgagaaggacgagaccgagtacgagtacagcggcagcgaggaggaggaggaggagaacgacagcggcgagcccagcagcatcctgaacctgcccggcgagagcaccctgagaagagacttcctgagactgcagctggccaacaaggagagaagcgaggccctgagaagacagcagctggagcagcagcagagagagaacgaggagcacaagagacagctgctggccgagagacagaagagaatcgaggagcagaaggagcagagaagaagactggaggagcagcagagaagagagaaggagctgagaaagcagcaggagagagagcagagaagacactacgaggagcagatgagaagagaggaggagagaagaagagccgagcacgagcaggagtacatcagaagacagctggaggaggagcagagacagctggagatcctgcagcagcagctgctgcacgagcaggccctgctgctggagtacaagagaaagcagctggaggagcagagacaggccgagagactgcagagacagctgaagcaggagagagactacctggtgagcctgcagcaccagagacaggagcagagacccgtggagaagaagcccctgtaccactacaaggagggcatgagccccagcgagaagcccgcctgggccaaggagatcccccacctggtggccgtgaagagccagggccccgccctgaccgccagccagagcgtgcacgagcagcccaccaagggcctgagcggcttccaggaggccctgaacgtgaccagccacagagtggagatgcccagacagaacagcgaccccaccagcgagaacccccccctgcccaccagaatcgagaagttcgacagaagcagctggctgagacaggaggaggacatcccccccaaggtgccccagagaaccaccagcatcagccccgccctggccagaaagaacagccccggcaacggcagcgccctgggccccagactgggcagccagcccatcagagccagcaaccccgacctgagaagaaccgagcccatcctggagagccccctgcagagaaccagcagcggcagcagcagcagcagcagcacccccagcagccagcccagcagccagggcggcagccagcccggcagccaggccggcagcagcgagagaaccagagtgagagccaacagcaagagcgagggcagccccgtgctgccccacgagcccgccaaggtgaagcccgaggagagcagagacatcaccagacccagcagacccgccgtgagcgccttcctgagcaagagcttcgagctgctgatctaccaggacctgaccgccctggccaaggagctgagagagctgagaatcgaggagaccaacagacccatgaagaaggtgaccgactacagcagcagcagcgaggagagcgagagcagcgaggaggaggaggaggacggcgagagcgagacccacgacggcaccgtggccgtgagcgacatccccagactgatccccaccggcgcccccggcagcaacgagcagtacaacgtgggcatggtgggcacccacggcctggagaccagccacgccgacagcttcagcggcagcatcagcagagagggcaccctgatgatcagagagaccagcggcgagaagaagagaagcggccacagcgacagcaacggcttcgccggccacatcaacctgcccgacctggtgcagcagagccacagccccgccggcacccccaccgagggcctgggcagagtgagcacccacagccaggagatggacagcggcaccgagtacggcatgggcagcagcaccaaggccagcttcacccccttcgtggaccccagagtgtaccagaccagccccaccgacgaggacgaggaggacgaggagagcagcgccgccgccctgttcaccagcgagctgctgagacaggagcaggccaagctgaacgaggccagaaagatcagcgtggtgaacgtgaaccccaccaacatcagaccccacagcgacacccccgagatcagaaagtacaagaagagattcaacagcgagatcctgtgcgccgccctgtggggcgtgaacctgctggtgggcaccgagaacggcctgatgctgctggacagaagcggccagggcaaggtgtacaacctgatcaacagaagaagattccagcagatggacgtgctggagggcctgaacgtgctggtgaccatcagcggcaagaagaacaagctgagagtgtactacctgagctggctgagaaacagaatcctgcacaacgaccccgaggtggagaagaagcagggctggatcaccgtgggcgacctggagggctgcatccactacaaggtggtgaagtacgagagaatcaagttcctggtgatcgccctgaagaacgccgtggagatctacgcctgggcccccaagccctaccacaagttcatggccttcaagagcttcgccgacctgcagcacaagcccctgctggtggacctgaccgtggaggagggccagagactgaaggtgatcttcggcagccacaccggcttccacgtgatcgacgtggacagcggcaacagctacgacatctacatccccagccacatccagggcaacatcaccccccacgccatcgtgatcctgcccaagaccgacggcatggagatgctggtgtgctacgaggacgagggcgtgtacgtgaacacctacggcagaatcaccaaggacgtggtgctgcagtggggcgagatgcccaccagcgtggcctacatccacagcaaccagatcatgggctggggcgagaaggccatcgagatcagaagcgtggagaccggccacctggacggcgtgttcatgcacaagagagcccagagactgaagttcctgtgcgagagaaacgacaaggtgttcttcgccagcgtgagaagcggcggcagcagccaggtgttcttcatgaccctgaacagaaacagcatgatgaactggtag

SEQ ID NO: 61308 - DNA, 3831 bp, Artificial Sequence
  derived and/or modified sequence
atggccagcgatagccccgcccgttcattggacgagatcgacctgtctgccctcagggatccagcaggaatctttgagcttgtcgagctagttggaaacggaacatacggacaggtgtacaagggcaggcatgtgaagaccggacagcttgcggcaataaaagtgatggatgttactggcgacgaagaggaagaaatcaagcaggaaattaatatgcttaaaaagtacagccaccacagaaacattgctacatattacggtgcattcatcaaaaaaaatccgccaggaatggatgatcagctctggctggtcatggaattttgcggggccggctcagtgactgaccttatcaaaaataccaaaggcaatacgctaaaggaagaatggatcgcctacatttgcagagagatccttcgtggcttgagtcacctgcaccaacacaaggtgattcaccgtgacatcaagggtcagaacgtcctgttgacagagaacgcggaggtgaaactggtggactttggtgttagcgcccagctggatcgcacagtgggccgccggaatacctttatcgggaccccctactggatggctcccgaggtcattgcctgtgatgaaaatccagatgccacctatgacttcaaatccgacctgtggtccctaggaattacagccatagagatggcagagggggccccccccctctgcgacatgcacccaatgcgtgcgttgttcttgatccccaggaacccagccccgcggctgaagtctaagaagtggtcgaaaaagttccaatcgttcatcgagagctgcctggtgaagaaccactcccagcgacctgccacagagcaactgatgaagcatcctttcatccgcgaccagcctaatgaaagacaggtacggatccagctcaaggaccacatcgatcggacaaagaaaaagcgaggagaaaaggacgaaaccgagtatgagtactcaggctccgaggaagaggaggaagaaaatgatagtggtgagccatcttcaatcctgaacttaccaggagagtcaacactgagaagggactttttgagactgcagctggctaataaggagagatcagaggctctccgccggcagcagctggaacagcaacagagagaaaatgaggagcacaagagacagctccttgctgaacgacagaaacgcattgaggagcaaaaggaacagcgccgacgcctcgaagagcagcagcggagagagaaggagctacggaagcagcaggaaagggagcaacggaggcattatgaggaacagatgagacgcgaagaggaaagacggagagccgaacacgaacaggagtataagcggaagcagctggaagaacagagacaggccgaaaggctccagaggcaactaaaacaggaacgggattacctggtcagcttacagcaccagcggcaagagcagcggcctgtagagaagaaacccctataccactacaaggaaggcatgagcccctcagagaagcccgcatgggcgaaggagatccctcatctggtcgctgttaaatcccaagggccagctctgacggccagccagtccgttcatgagcaaccgacaaaaggactttcgggctttcaggaagccttaaacgtaacttctcatagggtggagatgccaagacagaattcagatcctaccagtgaaaatccacctctccccaccaggattgaaaaatttgatcgatcttcgtggctgcggcaggaggaagacatcccgccaaaggtcccacagcgcacaacaagcatctctcctgcactggcgcggaaaaattctccaggtaacggaagtgccctggggcccaggttaggctctcaacctatacgcgctagcaaccctgacctccgccgcacggaacccattttagaaagtcctttacagcgtacaagcagtggctcatctagttcttcatccaccccgtccagccaaccaagctctcagggcggatctcagcccggatcccaggccggaagtagcgaaagaaccagggttagagcaaactctaaatcagagggttcgccagtattaccacacgaaccagccaaggtgaagccagaagaaagtagagatattactagaccgagtcgcccagcttcgtacaaaaaagccattgacgaggatcttacggctctcgccaaagaactgagagagctgagaatcgaagagacaaacaggcccatgaagaaggtaacggactattcgtctagctccgaggagagtgagtcctccgaagaagaggaagaggacggcgaatctgaaacgcatgacggtaccgtagccgtgtccgacatcccccgacttattcccaccggagcaccaggctcaaacgagcagtacaatgtcggcatggtagggactcacggactggagacaagtcatgccgatagcttcagcggttcgatttcaagggagggtaccctaatgattcgagaaacatccggcgaaaagaagagaagcggtcattccgatagcaacgggttcgcaggccatatcaatttaccagatctcgtacaacagtctcattcccccgcaggaactcctacggaaggcctggggagggtcagcacacacagccaagagatggattctggaacagagtacgggatggggagttccacaaaggctagtttcacccctttcgtcgatccccgcgtataccaaacctcacctacagatgaagatgaggaagatgaggagagttccgccgctgccctcttcactagcgagctcctgagacaagagcaggcaaagttaaacgaagcgaggaagataagcgtggttaatgtcaaccctacaaacattagaccccactctgacaccccagagatccgcaaatacaagaaacgatttaattcggagatactctgcgcggctctgtggggcgttaacctgctggtcggaacggagaacgggttaatgctgctggaccgctctggtcagggaaaggtgtacaacctgattaaccggaggaggttccaacaaatggacgtgctggagggtttaaatgtgttggtgaccatctcgggtaaaaaaaataaactgcgggtgtactacctatcatggctgcgaaacagaattttacacaacgaccctgaggtagaaaaaaagcaggggtggatcacagttggcgatctggaagggtgcatacactataaggtggtgaagtatgagagaattaaattcttggtcatagcattgaaaaatgcggttgaaatatacgcatgggctcccaagccctatcataagtttatggcatttaagtcgttcgctgatctgcagcataaaccactccttgtggacctgacagttgaagagggacagcgactcaaagtgattttcggctcacacaccgggtttcatgtgatcgacgtcgacagtgggaacagctatgacatctatatccctagtcacatacaaggcaacataaccccacatgcaattgtgatcttaccgaagaccgacgggatggagatgctggtctgctacgaggacgagggggtgtatgtaaacacatatgggcgcattacgaaggatgtagtgttgcagtggggcgaaatgccgacaagcgtggcctatattcactctaatcagataatgggatggggagagaaagcaatcgagatcagatctgtggaaacaggccacttagacggtgtgtttatgcataagagagcacaacgccttaagttcttgtgcgagcgaaacgataaagttttttttgcctccgtgcgcagtggaggcagctctcaggtgttttttatgaccctgaataggaacagcatgatgaattggtag

SEQ ID NO: 61309 - DNA, 3918 bp, Artificial Sequence
  derived and/or modified sequence
atggcctctgactcgcctgcaaggagcttggatgagatcgacctgtccgcccttcgagatccggcaggaatttttgagctcgtggaactggtgggaaacggaacatacgggcaagtgtacaaagggcgccatgtgaagacgggccagttggccgccatcaaggttatggatgtgaccggagacgaggaggaagagattaagcaggagatcaatatgttgaagaagtattcgcatcatcggaacattgccacatactacggcgcttttatcaaaaagaaccctccaggaatggacgatcagctgtggctcgtgatggagttctgcggtgctgggagtgtcacagatctcattaaaaataccaaagggaacacccttaaggaagaatggatagcctatatttgccgcgagatcttgaggggcctgtctcatctgcatcagcacaaggttatccaccgcgacattaaagggcagaatgttttgctgacagagaatgccgaagtgaaactggtcgattttggcgtttcagcacagctagacagaacagttgggcggagaaacactttcattgggactccctactggatggcacctgaagttatcgcttgcgatgaaaatcctgacgctacatacgatttcaagtctgatctctggagcttaggcatcacagccattgagatggctgagggcgctccaccactgtgcgatatgcatcccatgcgggcactgttcttgataccaaggaatcctgctcccagactgaaaagcaagaaatggagcaagaagttccagtctttcatcgaaagttgtctcgttaagaaccactcgcagcggcccgctacagagcaactcatgaagcaccctttcatacgggatcagcctaacgaaaggcaggtccggattcagttgaaggatcacattgaccgcaccaagaaaaaaaggggcgagaaggatgagaccgagtatgagtactctggctcagaggaagaagaagaggagaatgattccggagagcccagttccatcctgaacctgccaggtgaatctaccctccgcagggacttccttcggctacaattggcgaacaaggagaggagcgaggcactcaggaggcaacagctggaacagcagcagcgcgaaaatgaagagcataagaggcagcttctggctgagcgtcagaaaaggattgaggagcagaaggagcaaaggcgccgattagaggagcagcagagaagggagaaggaacttaggaagcagcaggagcgggaacagcggcgacattatgaggaacagatgagacgagaggaggagcggcgacgcgccgaacacgagcaggaatacatacgtcggcaactggaggaggagcagcggcagctggaaattctgcagcaacaattgctccacgaacaagcattactgctagaatataagaggaaacaacttgaggagcagcgccaggctgaaagactccagcggcagctcaagcaagaacgtgattatctggttagcctccaacatcagcggcaggagcagcgtcccgttgagaagaagcccctctaccactataaggaagggatgtccccttccgagaaaccggcttgggcgaaagaaatccctcatctcgtggcagtcaagtctcagggaccggcccttacggcatctcaaagtgtccacgaacagccaactaaaggcctgtcaggctttcaagaggcgctcaacgtgacctcacaccgcgtggaaatgcctaggcagaattctgaccctacctctgaaaacccacccctaccaactaggatcgagaaatttgaccgttcctcttggctgagacaggaagaggacatacctcctaaagttccccagagaaccaccagcatcagtcctgctctggcaaggaaaaactctcctgggaatgggagcgcgctgggaccaagacttggaagtcagcctatcagggctagtaaccccgatctgagacggacggagcccatcttagaatctcctttacagcgcacatcgagtgggagctcatccagtagctccacaccttcttctcagccctccagccaggggggctcccagccaggcagtcaggccggctcaagtgaacgtacacgggttagagctaactccaagtcggagggcagccccgtgctgcctcacgagcccgctaaggtcaagcccgaagaaagcagggatatcacccgccccagccgccccgctagttataagaaggctatcgacgaggacttgacagccctggcaaaagaacttagagagctgaggatagaggaaactaatcgccccatgaagaaggttactgactattcctcatctagcgaagaatccgaatcaagtgaagaagaggaagaagacggcgaatctgagacacacgatggcactgtggccgttagcgacatccctcgcctgatccccactggggcaccagggagcaacgagcagtacaatgtgggcatggtgggtactcatggtctggagacatcccacgctgactccttctctggtagcatatcacgggaaggaacgcttatgatacgtgaaacctctggagagaagaagaggtctgggcatagtgacagtaatggctttgctgggcatattaacctccccgacctggtgcagcagagccatagtccggctggcacccccacagagggcctcggtagggtgagtacccacagccaagaaatggattcaggcactgagtacggcatgggctcctcaactaaggcatcattcactccttttgtagatccccgggtgtaccaaacctctcctaccgatgaagatgaggaagacgaggaaagcagcgctgccgcactgtttacatctgaactgttgcggcaggagcaggctaaactcaatgaagcacggaaaatctccgtagtaaacgtgaacccaaccaacatccgccctcactctgatactcctgagatccgtaaatataaaaaaaggttcaactctgaaatactctgcgccgcgctgtggggcgttaacctactagtcggaacagaaaatggactgatgctcctcgataggagtgggcagggcaaagtatacaacctgatcaataggcgacgcttccagcaaatggatgtactcgaaggattgaacgtgctggttaccatatctgggaaaaagaataaattaagggtctattatctcagttggctaaggaatcgcatactgcataatgacccagaggtggagaagaagcaaggctggatcactgtgggcgacttagaaggatgcattcactacaaagtggttaaatacgaaaggattaaatttctagtgatagccctcaagaatgctgtggagatctatgcgtgggctcctaaaccctaccacaagttcatggccttcaaaagcttcgcggacctgcagcacaagcctctgcttgtggatctcactgtcgaagaggggcagaggcttaaggttatcttcggatcacatactgggttccatgtgatcgacgtggactctgggaattcatacgacatctatattccttcgcatatacagggaaatattaccccccatgcaattgtgatcctgcccaagacggacgggatggagatgctcgtgtgctatgaagacgaaggcgtttacgtcaacacatacgggagaatcactaaggatgttgtgctccagtggggagagatgccgactagcgttgcatacatccactcaaaccagattatgggttggggcgagaaagccatcgagatcaggagtgtagagaccggtcaccttgacggagtttttatgcataaaagagcccaacgattaaagtttctgtgtgagcgtaacgataaggtctttttcgcatcagttagatcgggaggaagctcccaggtcttcttcatgactctgaatcggaatagcatgatgaattggtag

SEQ ID NO: 61310 - DNA, 3939 bp, Artificial Sequence
  derived and/or modified sequence
atggcatccgacagcccagccagaagtctggatgaaatcgatcttagtgccctcagagaccccgccggcattttcgaactggtggagctcgtagggaacggaacttacggccaagtctacaagggaaggcacgttaaaaccggtcagctcgctgcaatcaaggtcatggacgtgaccggcgacgaggaggaagagattaaacaggaaatcaatatgctaaagaagtatagtcatcatcggaatattgcgacctattatggtgcattcataaaaaagaatccccctggcatggacgaccagctgtggctggtaatggagttttgtggggccggttcagttactgacctcattaaaaacaccaagggtaatacactgaaagaagagtggatcgcctatatctgccgagaaatcctcagggggttgagccacttgcatcagcacaaagtcatacacagggatataaaaggacaaaacgtgcttctcactgagaatgccgaggtgaaaatagtcgactttggagtgtctgcccagttggaccgtaccgtgggacgtcggaacacttttattgggactccatattggatggcaccagaggttatagcttgtgacgagaaccccgatgccacctacgacttcaagagcgacctgtggtccctcggaatcacggccattgagatggcggagggcgccccacccctgtgtgatatgcatcccatgcgagccttatttctgattcctcgtaatcccgccccacgccttaaatctaagaagtggtccaaaaaattccagagctttatagaaagttgtcttgtgaagaaccactctcaaaggcccgcaaccgaacaactgatgaaacatccttttatccgagatcaacctaatgagcgacaagttcggatccagctcaaggaccacatagaccgcaccaaaaagaagcgcggggaaaaggacgagactgaatacgaatattcggggagcgaagaagaagaggaggaaaacgatagcggagagccttcttcaatcctgaatttgcccggagagtccaccttgcgaagggatttccttaggctccagttggccaataaggagcggagcgaggccctccgccgtcagcagttggagcagcagcagcgggaaaatgaggaacataaacgccagctgctcgcagaacgccaaaaaaggatagaagaacagaaagaacagagaaggaggctcgaggaacagcagcggcgggaaaaggaactgcgcaagcagcaggaacgagaacagcgcagacactacgaggaacagatgcggcgcgaggaagagcgccgtcgcgctgagcacgagcaggagtacatcaggaggcagctggaagaggaacagcggcagctggaaatcttgcagcagcagttgctccatgaacaggccttgttgctggagtacaagaggaagcagctggaggaacagcggcaagccgagagacttcagcgccagctgaagcaggaacgagactacctagtgagcctacagcatcagcgccaggagcagaggcccgtagagaagaagcccctgtatcactataaagaagggatgagcccttccgagaagccagcctgggctaaggagattccgcacttggtggccgtaaagtcccaggggcccgcgctaacggcctcccaaagtgtgcacgagcaaccaaccaaagggctgtccgggtttcaggaagcactcaacgtcaccagtcaccgcgtggagatgccacgtcagaactccgatcctacctccgagaaccctcccctcccaacgcgcattgagaagttcgaccgaagtagttggctgcgtcaggaagaagatattccacctaaggtgccgcagcgaacaacctccatcagtccggctctggcccggaagaactctccaggcaatgggtctgccttgggcccgaggttgggctctcagcccatcagggccagtaatcctgacctccgtagaacagaacctatattggaatctccactgcagaggacaagcagcgggtcatcgtcatcctcatctacaccatcgtctcaacccagttcccaggggggctcacagcccggcagtcaggccgggtcaagcgaaaggactcgtgttcgtgcaaactctaagtctgagggttctcctgtgctgccccatgagcccgctaaggtaaaaccagaagagtcacgagacattactagaccctctcgcccagcggtgtctgcatttctctctaagtcattcgaactgctgatttatcaggatttgacggctctagctaaggaattgagggagctgcggatcgaggaaactaaccgacccatgaagaaggtgacggactattcaagcagctcggaggagtcagagagtagcgaggaagaggaagaggacggcgagtccgagacacatgacgggaccgtggccgtgtccgatattccgcgactcattccaactggagcccctggctccaacgaacaatataacgtaggcatggtcggtacacatggtctggagacaagtcatgccgacagctttagcggttcaatctcccgggaaggcaccttaatgattcgagaaacatccggtgagaagaagagatcgggccatagtgatagcaacgggttcgctggacatataaatctccccgatctcgtacaacagtcgcacagcccagccggcactccgaccgaaggcctaggacgcgtgagcacccactcccaagagatggactccgggaccgagtatggtatgggttcttcaacgaaggcatccttcaccccctttgttgatcccagagtttatcagacatcccctacggacgaagatgaggaagacgaagagtcatccgcagctgcccttttcacaagcgagctgctgcggcaagagcaggcaaagctcaacgaggctcgcaagatttcagtcgtcaatgtcaatccgaccaacattagaccccatagcgacacccctgagatacgtaagtacaagaagcgctttaacagcgagattctgtgtgcagctctctggggtgtcaaccttctggtgggtactgagaatggccttatgctgctcgatcggagcggccaggggaaggtttataatttgatcaatcgtaggcgatttcaacaaatggatgtgctggaggggctgaatgtgctggtaaccatttcgggcaagaagaacaaactaagagtgtattacctctcatggctgagaaacagaatcctccataacgaccctgaggtagagaagaaacagggatggattaccgtgggcgacctggaggggtgtattcactacaaagtggtgaagtatgaacgcattaaatttctggttattgcgctaaagaatgcagtagagatttatgcctgggccccaaaaccctaccacaaatttatggctttcaagtccttcgctgacttacagcataagccactcctggtggacctgactgtcgaggagggccagagattaaaagtcatcttcggtagccacacaggtttccatgtgattgacgtcgacagtggcaacagctatgatatttacataccttcccacatccaggggaacattactccccacgctattgtgatcctcccgaagactgacggaatggagatgctggtttgttacgaggatgaaggcgtgtatgttaacacgtatggaagaatcactaaggacgtcgtgctgcagtggggagagatgccaacttccgttgcctacatccattccaaccaaatcatgggctggggcgaaaaagccatcgagatcagatccgtggagacaggacatctggatggagtgtttatgcacaagcgcgctcagagactcaagttcctgtgcgagaggaatgataaagtattcttcgctagtgttcgatcaggcggatctagccaggtgttcttcatgacgttgaataggaattcgatgatgaattggtag

SEQ ID NO: 61311 - DNA, 3831 bp, Artificial Sequence
  derived and/or modified sequence
atggccagtgacagccctgcccggagcctggatgaaattgacctgagcgccctgcgggaccctgctggcatctttgagctggtggagctggtgggcaatggcacctacggccaggtgtacaagggccgccacgtgaagacaggccagctggccgccatcaaggtgatggatgtgactggagatgaggaggaggagatcaagcaggagatcaacatgctgaagaagtacagccaccacaggaacatcgccacctactacggggccttcatcaagaagaaccccccaggcatggatgaccagctgtggctggtgatggagttctgtggggccggctctgtgacagacctgatcaagaacaccaagggcaacaccctgaaggaggagtggatcgcctacatctgccgggagatcctgcggggcctgagccacctgcaccagcacaaggtgatccaccgggacatcaagggccagaatgtgctgctgacagaaaatgctgaggtgaagctggtggactttggagtgtctgcccagctggacagaacagtgggcagaagaaacaccttcatcggcaccccctactggatggcccctgaggtgattgcctgtgatgagaacccagatgccacctatgacttcaagagtgacctgtggagcctgggcatcacagccatcgagatggccgagggcgccccacccctgtgtgacatgcaccccatgagggccctcttcctgatccccagaaatcctgccccccggctgaagagcaagaagtggagcaagaagttccagagcttcatcgagagctgcctggtgaagaaccacagccagaggcctgccacagagcagctgatgaagcaccccttcatccgggaccagcccaatgaaaggcaggtgcgcatccagctgaaggaccacatcgacaggaccaagaagaagagaggagagaaggatgaaacagaatatgagtacagcggcagcgaggaggaggaggaggagaatgattctggagagcccagcagcatcctgaacctgcctggagagagcaccctgcggcgggacttcctgcggctgcagctggccaacaaggagaggtctgaggccctgcggcggcagcagctggagcagcagcagagagaaaatgaggagcacaagaggcagctgctggccgagcggcagaagagaattgaggagcagaaggagcagaggcggcggctggaggagcagcagaggcgggagaaggagctgaggaagcagcaggagcgggagcagaggaggcactatgaggagcagatgaggcgggaggaggagcggcggcgggcagagcacgagcaggagtacaagaggaagcagctggaggagcagaggcaggccgagcggctgcagaggcagctgaagcaggagcgggactacctggtgtccctgcagcaccagaggcaggagcagaggcctgtggagaagaagcccctgtaccactacaaggagggcatgagccccagcgagaagccagcctgggccaaggagatcccccacctggtggccgtgaagagccagggccctgccctgacagccagccagagcgtgcatgagcagcccaccaagggcctgagcggcttccaggaggccctgaatgtgaccagccaccgggtggagatgccccggcagaacagcgaccccaccagtgaaaatccacccctgcccaccagaattgagaagtttgacaggagctcctggctgcggcaggaggaggacatcccccccaaggtgccccagaggaccaccagcatcagccctgccctggccaggaagaacagccctggaaatggaagtgccctgggcccccggctgggcagccagcccatccgggccagcaacccagacctgcggaggacagagcccatcctggagagccccctgcagaggaccagcagcggcagcagcagcagcagcagcacccccagcagccagcccagcagccagggcggcagccagcccggcagccaggccggcagcagcgagaggaccagggtgcgggccaacagcaagtctgagggcagccctgtgctgccccatgagcccgccaaggtgaagccagaggagagccgggacatcacccggcccagcaggcctgccagctacaagaaggccattgatgaggacctgacagccctggccaaggagctgcgggagctgcgcatcgaggagaccaaccggcccatgaagaaggtgacagactacagcagcagcagcgaggagagcgagagcagcgaggaggaggaggaggatggagagagcgagacccatgatggcaccgtggccgtgtctgacatccccaggctcatccccaccggggcccctggcagcaatgagcagtacaacgtgggcatggtgggcacccacggcctggagaccagccacgccgacagcttcagcggcagcatcagccgggagggcaccctgatgatccgggagaccagcggggagaagaagaggagcggccacagcgacagcaatggatttgctggccacatcaacctgcctgacctggtgcagcagagccacagccctgctggcacccccacagagggcctgggccgggtgtccacccacagccaggagatggattctggaacagaatatggcatgggcagcagcaccaaggccagcttcaccccatttgtggacccccgggtgtaccagaccagccccacagatgaagatgaggaggatgaggagagcagcgctgctgccctcttcaccagcgagctgctgcggcaggagcaggccaagctgaatgaggccaggaagatctctgtggtgaatgtgaaccccaccaacatccggccccacagcgacaccccagagatcaggaagtacaagaagcgcttcaacagcgagatcctgtgtgccgccctgtggggcgtgaacctgctggtgggcacagaaaatggcctgatgctgctggacaggagcggccagggcaaggtgtacaacctgatcaacagaagacgcttccagcagatggatgtgctggagggcctgaatgtgctggtgaccatcagcggcaagaagaacaagctgcgggtgtactacctgtcctggctgaggaaccgcatcctgcacaatgaccctgaggtggagaagaagcagggctggatcaccgtgggggacctggagggctgcatccactacaaggtggtgaagtatgaaagaatcaagttcctggtgattgccctgaagaatgctgtggagatctatgcctgggcccccaagccctaccacaagttcatggccttcaagagctttgctgacctgcagcacaagcccctgctggtggacctgactgtggaggagggccagaggctgaaggtgatcttcggcagccacacaggcttccacgtgattgatgtggacagcggcaacagctatgacatctacatccccagccacatccagggcaacatcacccctcatgccatcgtcatcctgcccaagacagatggcatggagatgctggtgtgctatgaagatgagggcgtgtatgtgaacacctacggccgcatcaccaaggatgtggtgctgcagtggggcgagatgcccacctctgtggcctacatccacagcaaccagatcatgggctggggcgagaaggccatcgagatccgctctgtggagaccggccacctggatggagtcttcatgcacaagagggcccagaggctgaagttcctgtgtgaaagaaatgacaaggtgttctttgcctctgtgcgcagcggcggcagcagccaggtgttcttcatgaccctgaacagaaacagcatgatgaactggtag

SEQ ID NO: 61312 - DNA, 3918 bp, Artificial Sequence
  derived and/or modified sequence
atggccagtgacagccctgcccggagcctggatgaaattgacctgagcgccctgcgggaccctgctggcatctttgagctggtggagctggtgggcaatggcacctacggccaggtgtacaagggccgccacgtgaagacaggccagctggccgccatcaaggtgatggatgtgactggagatgaggaggaggagatcaagcaggagatcaacatgctgaagaagtacagccaccacaggaacatcgccacctactacggggccttcatcaagaagaaccccccaggcatggatgaccagctgtggctggtgatggagttctgtggggccggctctgtgacagacctgatcaagaacaccaagggcaacaccctgaaggaggagtggatcgcctacatctgccgggagatcctgcggggcctgagccacctgcaccagcacaaggtgatccaccgggacatcaagggccagaatgtgctgctgacagaaaatgctgaggtgaagctggtggactttggagtgtctgcccagctggacagaacagtgggcagaagaaacaccttcatcggcaccccctactggatggcccctgaggtgattgcctgtgatgagaacccagatgccacctatgacttcaagagtgacctgtggagcctgggcatcacagccatcgagatggccgagggcgccccacccctgtgtgacatgcaccccatgagggccctcttcctgatccccagaaatcctgccccccggctgaagagcaagaagtggagcaagaagttccagagcttcatcgagagctgcctggtgaagaaccacagccagaggcctgccacagagcagctgatgaagcaccccttcatccgggaccagcccaatgaaaggcaggtgcgcatccagctgaaggaccacatcgacaggaccaagaagaagagaggagagaaggatgaaacagaatatgagtacagcggcagcgaggaggaggaggaggagaatgattctggagagcccagcagcatcctgaacctgcctggagagagcaccctgcggcgggacttcctgcggctgcagctggccaacaaggagaggtctgaggccctgcggcggcagcagctggagcagcagcagagagaaaatgaggagcacaagaggcagctgctggccgagcggcagaagagaattgaggagcagaaggagcagaggcggcggctggaggagcagcagaggcgggagaaggagctgaggaagcagcaggagcgggagcagaggaggcactatgaggagcagatgaggcgggaggaggagcggcggcgggcagagcacgagcaggagtacatccggcggcagctggaggaggagcagaggcagctggagatcctgcagcagcagctgctgcacgagcaggccctgctgctggagtacaagaggaagcagctggaggagcagaggcaggccgagcggctgcagaggcagctgaagcaggagcgggactacctggtgtccctgcagcaccagaggcaggagcagaggcctgtggagaagaagcccctgtaccactacaaggagggcatgagccccagcgagaagccagcctgggccaaggagatcccccacctggtggccgtgaagagccagggccctgccctgacagccagccagagcgtgcatgagcagcccaccaagggcctgagcggcttccaggaggccctgaatgtgaccagccaccgggtggagatgccccggcagaacagcgaccccaccagcgagaacccccccctgcccacccgcatcgagaagtttgacaggagctcctggctgcggcaggaggaggacatcccccccaaggtgccccagaggaccaccagcatcagccctgccctggccaggaagaacagccctggaaatggcagcgccctgggcccccggctgggcagccagcccatccgggccagcaacccagacctgcggaggacagagcccatcctggagagccccctgcagaggaccagcagcggcagcagcagcagcagcagcacccccagcagccagcccagcagccagggcggcagccagcccggcagccaggccggcagcagcgagaggaccagggtgcgggccaacagcaagtctgagggcagccctgtgctgccccatgagcccgccaaggtgaagccagaggagagccgggacatcacccggcccagcaggcctgccagctacaagaaggccattgatgaggacctgacagccctggccaaggagctgcgggagctgagaattgaggagaccaaccggcccatgaagaaggtgacagactacagcagcagcagcgaggagagcgagagcagcgaggaggaggaggaggatggagagagcgagacccatgatggcaccgtggccgtgtctgacatccccaggctcatccccactggagcccctggcagcaatgagcagtacaacgtgggcatggtgggcacccacggcctggagaccagccatgctgacagcttcagcggcagcatcagccgggagggcaccctgatgatccgggagaccagcggggagaagaagaggagcggccacagcgacagcaatggatttgctggccacatcaacctgcctgacctggtgcagcagagccacagccctgctggcacccccacagagggcctgggccgggtgtccacccacagccaggagatggacagcggcacagaatatggcatgggcagcagcaccaaggccagcttcaccccatttgtggacccccgggtgtaccagaccagccccacagatgaagatgaagaagatgaggagagcagcgctgctgccctcttcaccagcgagctgctgcggcaggagcaggccaagctgaatgaggccaggaagatctctgtggtgaatgtgaaccccaccaacatccggccccacagcgacaccccagagatcaggaagtacaagaagcgcttcaacagcgagatcctgtgtgccgccctgtggggcgtgaacctgctggtgggcacagaaaatggcctgatgctgctggacagaagtggccagggcaaggtgtacaacctgatcaacagaagacgcttccagcagatggatgtgctggagggcctgaatgtgctggtgaccatcagcggcaagaagaacaagctgcgggtgtactacctgtcctggctgaggaaccgcatcctgcacaatgaccctgaggtggagaagaagcagggctggatcaccgtgggggacctggagggctgcatccactacaaggtggtgaagtatgagcgcatcaagttcctggtgattgccctgaagaatgctgtggagatctatgcctgggcccccaagccctaccacaagttcatggccttcaagagctttgctgacctgcagcacaagcccctgctggtggacctgactgtggaggagggccagaggctgaaggtgatcttcggcagccacacaggcttccacgtgattgatgtggacagcggcaacagctatgacatctacatccccagccacatccagggcaacatcaccccccacgccatcgtcatcctgcccaagacagatggcatggagatgctggtgtgctatgaagatgaaggagtgtatgtgaacacctacggccgcatcaccaaggatgtggtgctgcagtggggcgagatgcccacctctgtggcctacatccacagcaaccagatcatgggctggggcgagaaggccatcgagatccgctctgtggagaccggccacctggatggagtcttcatgcacaagagggcccagaggctgaagttcctgtgtgaaagaaatgacaaggtgttctttgcctctgtgcgcagcggcggcagcagccaggtgttcttcatgaccctgaacagaaattccatgatgaactggtag

SEQ ID NO: 61313 - DNA, 3939 bp, Artificial Sequence
  derived and/or modified sequence
atggccagtgacagccctgcccggagcctggatgaaattgacctgagcgccctgcgggaccctgctggcatctttgagctggtggagctggtgggcaatggcacctacggccaggtgtacaagggccgccacgtgaagacaggccagctggccgccatcaaggtgatggatgtgactggagatgaggaggaggagatcaagcaggagatcaacatgctgaagaagtacagccaccacaggaacatcgccacctactacggggccttcatcaagaagaaccccccaggcatggatgaccagctgtggctggtgatggagttctgtggggccggctctgtgacagacctgatcaagaacaccaagggcaacaccctgaaggaggagtggatcgcctacatctgccgggagatcctgcggggcctgagccacctgcaccagcacaaggtgatccaccgggacatcaagggccagaatgtgctgctgacagaaaatgctgaggtgaagatcgtggactttggagtgtctgcccagctggacagaacagtgggcagaagaaacaccttcatcggcaccccctactggatggcccctgaggtgattgcctgtgatgagaacccagatgccacctatgacttcaagagtgacctgtggagcctgggcatcacagccatcgagatggccgagggcgccccacccctgtgtgacatgcaccccatgagggccctcttcctgatccccagaaatcctgccccccggctgaagagcaagaagtggagcaagaagttccagagcttcatcgagagctgcctggtgaagaaccacagccagaggcctgccacagagcagctgatgaagcaccccttcatccgggaccagcccaatgaaaggcaggtgcgcatccagctgaaggaccacatcgacaggaccaagaagaagagaggagagaaggatgaaacagaatatgagtacagcggcagcgaggaggaggaggaggagaatgattctggagagcccagcagcatcctgaacctgcctggagagagcaccctgcggcgggacttcctgcggctgcagctggccaacaaggagaggtctgaggccctgcggcggcagcagctggagcagcagcagagagaaaatgaggagcacaagaggcagctgctggccgagcggcagaagagaattgaggagcagaaggagcagaggcggcggctggaggagcagcagaggcgggagaaggagctgaggaagcagcaggagcgggagcagaggaggcactatgaggagcagatgaggcgggaggaggagcggcggcgggcagagcacgagcaggagtacatccggcggcagctggaggaggagcagaggcagctggagatcctgcagcagcagctgctgcacgagcaggccctgctgctggagtacaagaggaagcagctggaggagcagaggcaggccgagcggctgcagaggcagctgaagcaggagcgggactacctggtgtccctgcagcaccagaggcaggagcagaggcctgtggagaagaagcccctgtaccactacaaggagggcatgagccccagcgagaagccagcctgggccaaggagatcccccacctggtggccgtgaagagccagggccctgccctgacagccagccagagcgtgcatgagcagcccaccaagggcctgagcggcttccaggaggccctgaatgtgaccagccaccgggtggagatgccccggcagaacagcgaccccaccagcgagaacccccccctgcccacccgcatcgagaagtttgacaggagctcctggctgcggcaggaggaggacatcccccccaaggtgccccagaggaccaccagcatcagccctgccctggccaggaagaacagccctggaaatggcagcgccctgggcccccggctgggcagccagcccatccgggccagcaacccagacctgcggaggacagagcccatcctggagagccccctgcagaggaccagcagcggcagcagcagcagcagcagcacccccagcagccagcccagcagccagggcggcagccagcccggcagccaggccggcagcagcgagaggaccagggtgcgggccaacagcaagtctgagggcagccctgtgctgccccatgagcccgccaaggtgaagccagaggagagccgggacatcacccggcccagcaggcctgctgtgtctgccttcctgagcaagagctttgagctgctgatctaccaggacctgacagccctggccaaggagctgcgggagctgcgcatcgaggagaccaaccggcccatgaagaaggtgacagactacagcagcagcagcgaggagagcgagagcagcgaggaggaggaggaggatggagagagcgagacccatgatggcaccgtggccgtgtctgacatccccaggctcatccccaccggggcccctggcagcaatgagcagtacaacgtgggcatggtgggcacccacggcctggagaccagccacgccgacagcttcagcggcagcatcagccgggagggcaccctgatgatccgggagaccagcggggagaagaagaggagcggccacagcgacagcaatggatttgctggccacatcaacctgcctgacctggtgcagcagagccacagccctgctggcacccccacagagggcctgggccgggtgtccacccacagccaggagatggattctggaacagaatatggcatgggcagcagcaccaaggccagcttcaccccatttgtggacccccgggtgtaccagaccagccccacagatgaagatgaggaggatgaggagagcagcgctgctgccctcttcaccagcgagctgctgcggcaggagcaggccaagctgaatgaggccaggaagatctctgtggtgaatgtgaaccccaccaacatccggccccacagcgacaccccagagatcaggaagtacaagaagcgcttcaacagcgagatcctgtgtgccgccctgtggggcgtgaacctgctggtgggcacagaaaatggcctgatgctgctggacaggagcggccagggcaaggtgtacaacctgatcaacagaagacgcttccagcagatggatgtgctggagggcctgaatgtgctggtgaccatcagcggcaagaagaacaagctgcgggtgtactacctgtcctggctgaggaaccgcatcctgcacaatgaccctgaggtggagaagaagcagggctggatcaccgtgggggacctggagggctgcatccactacaaggtggtgaagtatgaaagaatcaagttcctggtgattgccctgaagaatgctgtggagatctatgcctgggcccccaagccctaccacaagttcatggccttcaagagctttgctgacctgcagcacaagcccctgctggtggacctgactgtggaggagggccagaggctgaaggtgatcttcggcagccacacaggcttccacgtgattgatgtggacagcggcaacagctatgacatctacatccccagccacatccagggcaacatcacccctcatgccatcgtcatcctgcccaagacagatggcatggagatgctggtgtgctatgaagatgagggcgtgtatgtgaacacctacggccgcatcaccaaggatgtggtgctgcagtggggcgagatgcccacctctgtggcctacatccacagcaaccagatcatgggctggggcgagaaggccatcgagatccgctctgtggagaccggccacctggatggagtcttcatgcacaagagggcccagaggctgaagttcctgtgtgaaagaaatgacaaggtgttctttgcctctgtgcgcagcggcggcagcagccaggtgttcttcatgaccctgaacagaaacagcatgatgaactggtag

SEQ ID NO: 61314 - DNA, 3831 bp, Artificial Sequence
  derived and/or modified sequence
atggccagcgacagccccgcccggagcctggacgagatcgacctgtctgcactccgagaccctgctgggatcttcgaactagtggaactggtgggcaacgggacttacgggcaggtctacaagggcagacatgtgaaaaccggacagttagctgctatcaaggtgatggatgttacaggggacgaggaggaggagattaagcaggaaatcaacatgctgaaaaagtactcccaccacaggaacatagccacctactacggagcatttatcaagaaaaatccccccgggatggatgatcagctctggttggtgatggaattctgcggggcgggcagtgtgaccgatttgatcaaaaataccaaggggaacactctgaaggaagagtggatcgcatacatctgccgggagatcttgcggggtctttctcaccttcaccagcacaaggtgatccatcgcgatatcaaaggacagaacgtcctcctgaccgagaacgctgaagtgaagctcgtcgacttcggcgtctctgcacagctggaccgtaccgtcggccggcggaacacctttataggcacaccttattggatggctcctgaggtgatcgcctgtgacgaaaacccagacgccacttacgactttaagtccgatctctggagtctgggcataacggccatcgagatggcagaaggtgccccacccctctgtgacatgcatcccatgcgcgccctgttcctgattcctagaaatccagcccctcgcctcaagtcaaaaaaatggagcaaaaaatttcagtcctttatcgaaagttgtttagtcaaaaaccacagtcagaggccagccacggaacaactgatgaaacatcccttcatacgggatcaacctaatgaaaggcaggtgcgcatccagctcaaagaccacatcgataggactaaaaaaaaacgcggtgaaaaagatgaaacagagtacgagtattccggctctgaggaagaggaggaggagaatgattctggggagccttcctcaattctgaatctcccaggcgaatccacgctaagaagagactttctgagactgcagctggcaaacaaggaaagaagcgaggctctgcggaggcaacaactggagcagcagcagagggagaacgaggaacataagcgccaactgctggctgaaaggcaaaagaggatagaggagcagaaggagcagaggcgccgcttagaggaacaacagcgtcgggagaaggagctgagaaagcaacaagagcgggaacagcgcaggcattacgaagaacagatgagaagggaagaggagcgacgaagggctgaacacgagcaagagtacaagcgtaaacaacttgaggaacaacgacaagccgaaagactgcaacgccaactgaagcaagagcgcgactatttggtcagtctgcagcaccagcgccaagaacagagacccgtggagaaaaaaccgctgtaccactataaggagggcatgagcccatcagaaaagccggcctgggccaaggagattcctcacctcgtggcggtcaagtcccaagggccagccctgaccgcatctcagagtgttcatgagcagcctactaaaggcctgtcgggcttccaggaagctctaaatgttactagccatagagtggaaatgccccgccagaacagcgatccaacaagcgaaaaccctcctttacccactcggatagaaaaatttgaccggtcgagttggttacggcaagaagaggatattcctcccaaggtgcctcaaaggacaacaagcatatcccccgcactggcacggaagaatagccccggaaatggttcagccctcggcccccgcctcggctctcagcctataagggcttcgaaccctgatcttcggaggacagaacccatccttgagagtcctctgcagcgtacatccagcggaagtagttcctcaagctccacaccatcttcccagccatcctcacaaggcggcagccagcctggcagtcaggcgggttcatcagaaagaactagggtgcgcgcaaatagtaaaagcgaggggagccccgtcctacctcacgagcccgcaaaagtcaaacccgaggagtctagggacattactcgcccgtcacgccccgccagctacaaaaaggccatcgatgaggatctcaccgccttagctaaagagctgagggaactgcggatcgaggagacaaaccgccctatgaagaaggtaactgactactcatctagtagcgaagagtcagagtcctctgaggaggaagaagaggacggtgaatcggaaacccacgacggtacagtggcggtgtcagatatcccgcggctcatccccaccggggctcccgggtcaaatgaacagtataacgtcggtatggtcggcacacacggcctggagacttctcacgcagacagcttttctggcagcattagtcgtgagggcactcttatgatacgagagaccagtggagagaaaaaacgcagcggccattccgactctaacggttttgcgggacacattaacctgcctgatctggttcagcaatcacattccccagccggtacacctactgaaggactggggcgagtctcaacccactcccaagagatggacagcggcaccgaatatgggatggggagcagcacaaaggcatcctttacccctttcgtggaccccagagtatatcagacatctccaacggacgaagacgaagaggatgaggagtctagcgcagccgccctctttacgtccgaactcttaaggcaggagcaggcaaaattaaacgaggctaggaagatttctgttgttaacgtcaaccctacaaacataaggcctcactccgacacccccgaaattcggaaatataagaagcgattcaacagcgagattctctgtgcagccctttggggcgtgaacctgctggtgggaaccgaaaacgggctaatgctgttagaccgctccgggcaggggaaggtatataacctgatcaatagacgaaggttccagcagatggatgttttagagggcttgaatgttctcgtgaccatttcaggaaagaaaaacaagctgagggtgtattatctgtcttggctccgcaacaggatccttcataatgatccggaggtagagaagaaacaagggtggataaccgttggagacctagagggctgcattcactacaaagtggttaagtacgagaggatcaagtttctcgtcatcgcactgaaaaacgccgtagaaatatatgcctgggcccccaaaccatatcataaattcatggccttcaagtccttcgctgacctgcagcacaaacctctcttggtcgatctcaccgtagaagagggtcagcgcctgaaagtgatcttcggctcacacactgggtttcacgtgatcgatgtggatagtggtaactcttatgacatatatataccttcccatattcaggggaatattacgccgcatgccattgtgatccttcccaaaacagatggcatggaaatgttggtatgctacgaagatgaaggcgtatacgttaatacctacggacgcattaccaaagacgttgttttgcagtggggagaaatgcccaccagcgttgcctacatccactctaatcagattatgggttggggggaaaaggctatcgagattcggtcggtggagacaggccacctggatggagtctttatgcataagagggcacagcgtctcaagttcctttgtgagcgtaacgacaaggtgttctttgcctctgttcgcagtggaggttcctctcaagtcttcttcatgaccctgaatagaaattcaatgatgaattggtag

SEQ ID NO: 61315 - DNA, 3918 bp, Artificial Sequence
  derived and/or modified sequence
atggccagcgacagccccgcccggagcctggacgagatcgacctgtctgctctgcgagaccccgcaggcattttcgaactcgttgagctcgttggtaacgggacttatggccaagtctacaagggacggcacgtgaaaactggccagctggccgctattaaggtaatggatgtgactggtgacgaggaagaagagatcaagcaagagattaacatgctgaagaaatatagccaccatagaaacatcgcgacatattacggcgcctttatcaaaaaaaacccgcctgggatggacgatcaactctggctggtcatggagttctgcggagctggctcagttactgacttaatcaaaaatactaaagggaataccctgaaggaggaatggattgcgtatatatgtagggaaatattacggggactgtctcatcttcaccaacacaaagtgatccaccgcgatataaaaggacagaatgttctgctgaccgaaaacgctgaagtaaaactagtcgactttggagtgagtgcgcagctggacaggactgtggggcgtcggaatacattcattggaacaccctactggatggccccagaagtgatcgcttgtgacgagaatcctgacgcgacttacgacttcaaaagcgacctttggagcttgggaattacagccattgagatggccgagggggctccccccctttgcgatatgcacccgatgcgggccctgttcctaattccacgaaatcccgctccaagactaaaatcaaaaaaatggtccaaaaagtttcagtccttcattgaatcctgcctcgtgaaaaatcacagtcagcgccctgccaccgagcagcttatgaagcacccgtttattcgcgaccagcctaacgagcgtcaggtgaggatccagcttaaggaccacattgatcgcactaaaaagaaaagaggggaaaaggatgagaccgagtacgagtatagcggcagcgaggaggaagaagaggaaaacgactccggcgaaccgagttccatcctgaacctccctggggagagtacgcttcggcgggatttcctaagactccagttggccaataaagagcgatccgaagcgctgaggcgccagcaactggagcaacaacagagagagaatgaagaacacaagagacaacttttggccgagaggcaaaagcggattgaggagcaaaaggagcagcgccgtaggctcgaagagcagcagagacgcgagaaggagttacggaaacagcaggaacgagagcagaggcggcactatgaagagcagatgagacgtgaagaggagcggagaagagctgagcacgaacaggagtatattcgccgccagctcgaagaggagcagagacagctcgagattctccagcagcaactccttcacgagcaggccttgctgctggagtataaaagaaagcagctggaggaacagaggcaagccgagcgcctccagaggcaacttaagcaggagcgcgactatctggtgtctctgcagcaccagcggcaggagcagcggcctgtcgagaagaagccattataccattataaagaaggaatgtctccatccgagaaacccgcctgggccaaagaaattccacacctggtcgcagtaaagagccagggccccgctctcacagccagccaaagtgtccacgaacagcccactaaaggactgagcgggttccaggaggctctgaacgtgaccagccacagggtggagatgcccagacaaaactccgatcccacctcagaaaaccccccactgccaacacgaattgagaagttcgaccgcagtagttggcttcggcaagaagaggacattcccccaaaagttccacagcggactaccagtatcagcccagcacttgcccgtaaaaattcccccggcaacggctctgctctcgggccgcgcttgggttcacaaccaataagggccagtaaccccgatttgcgccgtacggaacctattctggagagccccctacagcgcacctcttctgggagcagcagtagcagctccaccccctctagccaaccttcgtctcagggtgggtcccagcctggctcccaggcggggtcttccgagagaaccagagtcagagccaacagcaaatctgagggaagccccgtgcttccacacgagcctgctaaggttaaacccgaggagagtcgcgacatcacaaggcctagtcgacctgcatcatacaaaaaggcaatcgacgaggatttgacagctttggcaaaggagctgagagagctgcgcattgaagagacgaaccgccccatgaaaaaggttacagattattcgagctcaagcgaggagagcgaatcaagtgaggaagaggaggaagacggagagagcgaaacgcacgacggaacagttgctgtaagcgatatcccacgcctgattccaacaggcgccccagggagcaatgagcagtataacgtagggatggttggaacccacggcctggagacttcccatgctgattcattctccgggagcatctcccgggagggcaccttaatgattagggagacgtccggcgagaaaaagcgatccgggcatagcgacagcaacggattcgccggccatattaatctcccggatttggtgcagcaatcccactctcccgccgggacacctactgaggggctcggcagggtgtctacacattctcaggagatggacagcggcactgaatacggtatgggcagctcaactaaagcctctttcacgccctttgtcgatcccagggtgtaccagacctctccaaccgatgaggatgaagaggacgaagagagctcagctgccgcccttttcacttctgaactgctcaggcaggaacaggctaagctgaacgaggcacggaagatttcagttgtgaacgtaaatcccacaaatattcgcccgcacagcgacaccccagaaatcaggaagtataagaagaggttcaacagcgagatcttatgcgccgctctatggggagtcaatctgctggtgggaaccgaaaacggactgatgctcttagacagaagcgggcaaggtaaagtgtataatttaataaatcgtcggcgattccagcagatggacgtcctggagggtctaaatgtcctggtaacgatttccggtaagaagaataagttaagagtttactacctctcttggctccgcaatagaatactgcataacgaccccgaggtagagaagaagcagggatggataacagtaggagatctagaagggtgtatccactataaagtcgtgaagtatgagagaatcaagtttctggtgattgccttgaagaatgccgtggagatatatgcctgggctccaaaaccataccacaagttcatggcattcaaatcatttgccgatctgcagcacaaaccattgctggtcgatctgacagtcgaagagggccagcgcttgaaggttattttcggcagccatacaggctttcacgtgattgatgttgattcaggcaactcctacgacatttatattcccagccatatacagggaaacatcacaccacatgccattgtgattctccccaagaccgacgggatggaaatgttggtgtgctacgaagacgaaggcgtgtacgtgaatacatacggtcggattacaaaggacgtggttctgcagtggggagagatgcctaccagcgtggcttatattcacagcaaccagatcatgggatggggagagaaagctatcgagatccggagtgtcgaaactggccaccttgacggagtgttcatgcacaagagggcccaaagactgaagttcctgtgtgaacgcaacgataaggtgttctttgcctcagtacgaagcggaggttcttcacaggtcttttttatgactcttaataggaattcgatgatgaattggtag

SEQ ID NO: 61316 - DNA, 3939 bp, Artificial Sequence
  derived and/or modified sequence
atggccagcgacagccccgcccggagcctggacgagatcgacctgtcggccctccgagaccctgccggaattttcgagctggtggaactggtgggaaatggaacatacggacaagtctataaggggaggcacgtcaaaaccggccaattagcagctatcaaggtgatggatgtcacgggggacgaggaagaagagataaaacaggaaattaacatgttgaaaaaatattcacatcacaggaacattgccacttactatggagccttcatcaagaagaaccctcctgggatggatgaccagctctggctggtaatggaattctgcggagccggttctgtaaccgacctcatcaaaaacacaaagggtaacaccctcaaggaggaatggatagcttacatttgcagggaaatcctgaggggactgtctcaccttcatcagcacaaggtgatacacagggacattaaaggacagaacgtgctcctgaccgaaaacgcggaggtgaaaatcgttgacttcggcgtgagtgcacaactcgataggacagtgggcagacgcaatacttttatcgggactccttattggatggcaccagaggtgatcgcctgtgatgagaacccggacgccacttatgatttcaaatcagacctttggagcctggggatcactgcaatcgaaatggccgagggggccccccctctatgcgatatgcaccctatgagagccctctttctcataccaaggaatcccgccccaagactgaagtccaagaagtggtctaagaagtttcagtcatttatagaatcctgcctagtaaagaatcactctcagcgccccgccaccgagcaactcatgaagcatcctttcattagagatcagcctaacgaaagacaagtccgcattcagctgaaggatcacatcgaccgaacgaagaagaaaaggggagaaaaggacgagacggagtacgagtattcagggtctgaagaagaggaagaggagaacgactctggagagccaagttcaatcctgaatctcccaggagaatccactttgaggagggacttcctgcggctacagttggccaacaaagagaggagtgaggccttgcgccgccagcaactggagcagcaacagagagagaacgaagaacataaacgccagcttctcgctgagcgtcagaaacgtattgaggagcaaaaagaacagcggagaagattggaggagcagcagagacgggaaaaggagcttagaaaacaacaggagcgagaacagaggcggcattacgaagaacagatgcggagggaggaagagcgccggagagccgagcatgaacaggaatacatcaggagacaattggaagaagaacagcgacagctggaaattctgcagcagcagcttcttcacgaacaggcactgctgctcgagtataagcgtaagcagctggaagagcagcgacaggctgaaagacttcagcggcagcttaagcaggagcgggattatttagtgtccctccagcaccagagacaagaacagcgacccgttgagaaaaagcccttgtaccattataaggaaggaatgtcaccatcagagaagccggcgtgggctaaggagatcccgcatttagtggccgtgaaaagtcagggcccggccctgactgcctcccagtccgttcatgaacaacccaccaagggactgagtggctttcaggaagcgctcaatgtgaccagtcacagagtggaaatgccaaggcagaattccgatcccaccagcgagaacccgcccctgcccacacgaatcgagaagtttgatagaagtagctggctgaggcaagaagaagacatccctcctaaggtccctcagaggacaacatcaataagccccgcactagcccgcaagaattccccaggcaacggaagcgcccttggcccccgcctcgggtcccaacctattcgagcctcgaatccagacttgaggcggaccgagccaattctcgagagtcctctacaaagaacttccagcggatccagtagctcttcaagcacgccttctagccaacctagcagccagggcggcagccagcccgggtcccaggcgggttcttccgagagaaccagggtgagagcaaatagcaagtcagaagggtcacccgttctcccacatgaacccgctaaagtgaaacccgaggagtcgagagatatcactcgcccgagccgccctgccgtgtcggctttcctctcaaaatcgtttgaattgctgatttaccaggacctgactgctctggccaaggaactgcgcgaactgaggatcgaggagaccaacaggccaatgaagaaagtgaccgattattcctcttcctctgaggaatccgagtcttctgaggaagaggaggaggacggcgaatctgagacccacgacggcacagtggccgttagcgacatcccccgtcttatcccaaccggcgcgccagggtccaacgaacagtacaacgtggggatggtcggaacccacggcctagaaacctcccacgccgacagtttttcaggcagcatcagccgggaaggaacacttatgatcagagaaactagcggagaaaagaaacggtctggacacagcgattccaatggatttgccggccatataaacctgccagacctcgttcagcagtcacacagccccgctggaactccaactgagggattagggagggtttcgactcactctcaggagatggactcagggacagagtacggcatgggatcatccaccaaagcgtcatttacaccatttgtggatcctcgggtctaccagacctcacctacagatgaggacgaggaggatgaagagtcatccgccgccgctctgttcacttccgagcttcttcgacaagaacaggcaaagctcaatgaagcccggaaaatctcagtggtcaatgttaaccctacaaatattcgcccccattctgacacgccggaaatcaggaagtataagaaacgctttaactccgagatactgtgtgccgctctttggggagtgaatcttctggttgggacagaaaatggactgatgctgctcgatcgcagtggacagggtaaagtctacaaccttatcaatcgccgcaggtttcagcagatggatgtgcttgagggcttgaatgtgctggtcaccattagcggtaaaaagaataaacttagagtctattacctctcgtggcttagaaacagaatcttacacaatgatcctgaggtcgaaaaaaagcaagggtggatcacagtgggcgatcttgaagggtgtatccattataaagtggtgaagtacgagcgaatcaaattcctggttatagctctaaagaacgcagtcgaaatatatgcttgggcgcctaagccatatcacaagtttatggcatttaagtccttcgccgatctgcaacataagcctttattagtggatttgacagtggaagagggccagcgactcaaggtgattttcggtagccataccggatttcacgtgatcgacgtggattcaggcaattcttatgatatatacattccgagccacattcagggtaatattacaccacacgctatcgttatcctgccaaagactgacggcatggaaatgcttgtgtgttacgaggatgaaggcgtttatgtaaacacctacggtaggattaccaaggacgtggttctgcaatggggagagatgcccaccagcgtggcatatattcacagcaatcaaatcatgggctggggcgagaaggctattgaaattcggagcgtcgagaccggacacctagacggggtatttatgcacaagcgtgcacaaaggttaaaattcctgtgtgagagaaatgataaggtattctttgcatcagtgaggagtggtgggagcagccaagtgttctttatgactctcaacagaaacagtatgatgaactggtag

SEQ ID NO: 61317 - DNA, 3831 bp, Artificial Sequence
  derived and/or modified sequence
atggcctcagactctccggctcggtcactggatgagatcgatttgagcgccctgcgggaccccgctggtatctttgagttagttgagctggttggcaacgggacgtacgggcaggtgtataagggaagacacgtgaagacaggacagctagccgcaataaaggtaatggacgtaactggtgacgaggaggaagagatcaagcaggagataaatatgctgaaaaagtactcgcatcaccgcaacatcgccacatattacggcgcttttattaagaagaaccccccaggaatggacgaccagctgtggctggtgatggaattctgtggagctggcagcgtcactgacctaattaaaaatactaaaggtaatacactcaaggaggaatggatcgcttacatttgtcgggagatcctgcggggtctatcgcacttgcatcagcataaggttattcaccgggacattaaaggacagaacgtcctgttgacagaaaacgccgaagtgaagctggttgactttggagtcagtgcccagcttgacagaaccgtggggaggcgcaacactttcattggcaccccctattggatggctccagaggtgatcgcttgtgacgagaacccggacgctacctacgacttcaagtcagacctctggagtctgggaatcacagctatcgagatggcagaaggcgctcctcctctttgcgatatgcatcctatgcgcgcactattcctgatcccgagaaacccggctcctagactgaaaagcaagaagtggtctaagaaattccagtcttttatcgaatcctgtctggtcaagaaccattcgcaacggccagccacagagcaactcatgaagcatcccttcattagggaccaacctaacgaacgacaggtgagaattcagttgaaagaccatatcgacaggacgaagaaaaagcgcggtgagaaagacgagaccgagtacgaatatagcgggtccgaagaggaggaagaagagaacgattccggggaacctagctccatcctcaacttacctggagaatctaccttacggcgtgatttcctgcggttgcagttggctaataaggaacgcagcgaggccctccgcagacagcagctggagcagcagcaaagggaaaacgaggaacataagagacaactgcttgccgagaggcagaagcggattgaagaacaaaaagagcagaggcggagattggaggagcagcaaagacgggagaaggagctgagaaaacagcaggaaagggagcaacgacgacattacgaagagcaaatgagacgtgaggaagaacgcagaagggctgagcacgaacaggaatataaacggaaacagctcgaggaacagcgacaggctgaaagactgcaacgccaactgaaacaggagcgcgactacctcgtctcactacagcatcagcgccaggagcagcggccagtggagaagaagccactttaccactacaaggaggggatgtctccctccgagaagccggcttgggcaaaagagattccgcacctcgtggctgtgaaaagccaaggaccagctctgactgcatcccagtcggtgcatgaacaaccgacaaaaggcctgtctggcttccaagaggctctgaatgtgacttcacaccgagtggagatgccaaggcagaattctgatcctacttccgagaatccacccctacccacacgaattgagaagttcgacaggtcttcttggttacgtcaggaagaagatattccacccaaggtgccccaaaggacaacaagtatctccccagctctagccaggaaaaattctccagggaatggttctgctctgggacccagacttggctcacagcccatacgcgcaagcaaccctgacctccgcagaacagagcctatcctggaatccccgctgcagcggaccagcagtgggagttctagttcatcttctacaccttcgtcccagccctcctctcagggaggcagtcagccgggttcacaagcagggagcagtgaacgtacacgggtccgagctaattcgaagtcggaggggtccccggtactgcctcatgagcctgccaaagtgaagccggaagaatcaagagatataacccgtccaagtaggcccgcaagctataagaaggccatcgacgaggacctcaccgccctggctaaagagctgagagagctgcgtatcgaagaaacaaaccgaccaatgaagaaggtgaccgactatagctcctcttcagaggaatcggagtcttcggaggaagaagaggaggacggagagtccgaaacccacgacggcacagtcgctgtatcagacattccacgcttaattcccacaggcgctccgggatcaaacgaacagtataatgtaggcatggtaggcacgcacggcctggagacctcacatgctgattcattttcagggtccataagccgcgaaggaacactgatgattcgcgagactagcggtgaaaaaaaacggtccggacactcagattcaaacgggttcgccggacacatcaacttacccgaccttgtgcagcagagccacagtcctgcgggaacaccaacagaaggactggggagggtgagtacacactctcaggaaatggattccggtaccgagtacggcatggggtcatctactaaggcctcgttcacaccctttgtggaccctcgtgtgtatcagacatcccctaccgacgaggacgaagaggatgaagagtcttctgccgctgcattattcacctctgaactcctcaggcaagagcaggctaaacttaatgaggcgcgaaaaatcagtgtggttaacgttaatcccaccaatataaggccccacagcgatactcccgagatccgaaagtataagaaaagattcaatagcgaaatcctatgtgctgcactgtggggtgtgaatttactggtcggcaccgagaacggcctgatgcttctggaccgttctggccaaggcaaggtttataacctcatcaacagacgaagatttcaacagatggacgtgctggaaggcctgaatgtgctcgtaaccatctccggtaaaaaaaataagttgcgcgtttattacctcagctggttgcgtaatcgcattctgcataacgacccagaggtggaaaaaaaacagggatggatcaccgttggagatctcgagggttgtattcactacaaggttgtaaaatatgagcgcataaagttcttagtaatcgcactgaaaaatgccgtggaaatatacgcatgggctccaaagccttaccataagtttatggcttttaagagctttgcagatctgcagcataagccccttcttgtggatctcactgtcgaagagggacaacgcctgaaagtcattttcggcagccatacgggtttccacgtgatagacgtggatagtggcaatagttacgacatttacataccttcccatatccaaggtaacatcacgccccacgcaatagtgattctcccaaaaactgatgggatggagatgttagtctgttacgaggacgaaggcgtttacgtcaatacctatggaaggatcacaaaagacgtggtgcttcagtggggggaaatgcccacgagtgtcgcttatatccacagtaatcagatcatgggatggggcgagaaggccatcgagatacgctccgttgagactggccatctggatggagtgtttatgcacaagagggctcagcgattaaagttcctctgcgagagaaatgataaggtgttcttcgcaagcgtgcgtagtggtggcagctcacaagtgttctttatgaccctgaacagaaactctatgatgaattggtag

SEQ ID NO: 61318 - DNA, 3918 bp, Artificial Sequence
  derived and/or modified sequence
atggcctcagactctcctgccaggagtttggatgaaatagatcttagtgctcttagggatcccgctggaatttttgaactggttgagttagtgggaaacggcacttacggccaggtgtacaaaggcaggcatgtgaaaactggtcaattggctgcaatcaaggttatggatgtcactggagacgaggaagaggaaatcaagcaagagattaacatgttgaaaaaatacagtcaccatagaaacatcgccacctattacggtgcattcattaagaaaaaccctccaggcatggatgatcagttgtggttggtgatggagttctgtggcgctgggagcgtgacagacctcatcaagaacacaaagggaaatacactgaaagaggagtggatcgcttatatttgcagggaaatccttcgaggtctcagccatttacatcagcacaaagtgattcatagagacataaagggacagaacgtcttactaaccgaaaatgcggaagtaaagctcgtggattttggagtgagcgctcagctcgaccgtactgtcgggagacgcaacaccttcatcggcacaccatattggatggccccagaggtcatagcctgcgatgagaaccctgacgctacgtacgactttaagtctgatttgtggagtctaggcatcacagccatcgagatggcagagggcgcacctcccttgtgcgacatgcaccctatgagagccctattcctgatccctcggaaccctgcccctcgcctgaagtctaaaaagtggtctaaaaagttccaatcctttatagaatcttgtttagtcaaaaaccacagtcagaggccggctaccgaacagctgatgaagcaccccttcatcagagaccaacccaatgaacgccaggtgcgcattcagctcaaggaccacattgatagaaccaagaaaaagcgaggggagaaagatgagactgagtatgaatatagcggcagtgaggaagaggaagaagaaaacgactcgggagagccgagcagcattctgaacctgcctggagaatctactctgaggcgcgatttcctccgcctgcagctggcaaacaaggagaggagcgaggcgctcaggagacagcagcttgagcagcagcagagagaaaacgaagagcacaagcggcagctcctcgccgagaggcagaagaggattgaggaacagaaagagcagagacggagactcgaggaacagcagaggagggagaaggaactgagaaaacaacaagaacgtgagcagcgcagacactacgaggaacaaatgcgaagagaggaagagagaagaagagccgagcacgaacaggaatatatcagacggcagctggaggaagagcagcgtcaactagaaatcctgcagcagcaactgctacatgagcaggccctcttgctcgagtacaagcgtaaacaactggaagagcagaggcaggcagaacggctccaaaggcagctaaaacaggagagagactacctcgtctctctgcagcaccagcgtcaagaacaacgacccgtggagaagaagccattgtatcactacaaagaaggaatgagtccgagcgagaaacctgcctgggctaaggagatcccacatctggtagccgtgaaatcccaagggccagccttgaccgctagccagagtgtccatgaacagcccaccaaggggctgtctggtttccaggaggcgctcaatgtgacatcacacagagtcgagatgccaagacagaactcagacccaaccagcgagaatccgccactgccaaccaggattgaaaagtttgataggagttcatggctcaggcaagaagaggacattccgccaaaagttcctcagcggaccaccagcatcagccctgcccttgccaggaagaacagcccaggaaatggatccgcgctgggcccacgcctagggagccagcccatccgggctagtaatcctgacttgcggaggactgagcctattctggaaagccccctccagcgcacatcatctggcagtagtagttcctcctccacgccgtcatcccaaccatcaagccagggaggatctcagccagggtcacaagccggttccagtgagcggacccgggtaagagccaacagcaagtccgaaggaagcccggttttgccccacgagcccgcaaaggtcaagcctgaagaatcgcgtgacataactcggcctagtagacccgcaagctataaaaaggctatagatgaggatctgactgcactggctaaagagctgcgcgagctgaggatagaggaaacgaaccgtcccatgaaaaaagtcacggactactcgagttcatccgaggaatccgaatccagtgaggaagaggaggaggatggagagtccgaaacccacgacggcaccgttgcggtctcagacatccctaggctgatccccaccggagcacctggctctaatgaacaatacaatgtcggcatggtcggcacacatggactagaaacctcccatgctgatagcttctctggatcaattagcagggaggggaccttgatgataagggaaacatctggagagaagaagaggagcgggcacagcgattcaaacgggttcgccggacacataaacctccctgatcttgtacagcagtcacatagccccgctggcactccgaccgagggattaggcagagtgagcacccatagccaggagatggactccgggactgagtatgggatgggctcaagcactaaggcctcatttaccccttttgtggaccccagagtgtatcagacaagccctacagacgaggacgaagaagatgaagaatcttctgcagctgccctgtttacaagcgagctgctccgacaggagcaggctaagctgaacgaggctagaaagatctccgtcgttaacgttaacccaacgaacatcagacctcactcagatacccctgagattcgcaagtacaagaagaggttcaactctgaaatcctctgcgctgccctgtggggagttaacctgctggtgggaactgaaaatggtttgatgctgcttgaccggagcggacagggaaaggtgtataatctgatcaacagacgccgtttccagcagatggatgtgcttgaaggattaaacgtgcttgtgaccattagcggtaagaagaacaaactgcgagtgtactacctgtcatggctgcgcaacagaattctgcacaatgaccctgaggtggagaagaagcaggggtggatcaccgtcggtgatcttgaagggtgtattcactataaagttgtcaagtatgaaaggatcaagtttttggttatcgcactgaaaaacgccgtggagatatatgcctgggccccaaaaccgtatcacaagttcatggctttcaaaagttttgccgacctccagcacaaaccgctcctggtcgacctgactgtagaagaggggcagaggctgaaggtgatcttcgggtcacacaccgggttccacgtgatagatgttgactcgggaaattcatacgacatttatattccctcccacatccagggcaacatcaccccacacgccatcgttattctccccaaaacagacggaatggagatgctggtttgttatgaggacgaaggcgtctacgtgaatacgtacgggagaatcactaaagatgtggtgctccagtggggcgaaatgcctacctcagtcgcctatatccattcaaatcagattatggggtggggcgaaaaggctattgagattcggtccgtcgagaccggacatttagatggagtattcatgcacaaacgcgcacagaggctgaagttcctttgtgagcgaaatgataaagtcttctttgcgagtgtgagaagcggcggatcatcgcaggtctttttcatgacccttaaccggaattcaatgatgaattggtag

SEQ ID NO: 61319 - DNA, 3939 bp, Artificial Sequence
  derived and/or modified sequence
atggcctccgattcccccgctagatctctggacgagattgatctctctgcactacgcgaccctgctgggattttcgagctggtcgagcttgttggaaatgggacatatggccaagtgtataaaggacggcatgtgaagacaggacagcttgctgccataaaggtgatggacgtgaccggggatgaggaagaggagataaaacaggagattaacatgctgaaaaaatatagccatcatcgcaacatcgctacctactacggagccttcattaagaaaaatcccccaggcatggatgaccaactgtggctggttatggaattttgtggagcagggtctgtgactgatttaattaaaaacacaaagggtaatactttaaaggaagagtggattgcatacatttgtcgggagatactgaggggcctgtctcacttgcatcagcataaggtgatccacagagacattaaaggacagaacgttctattaacggagaatgctgaggtgaagatagtggactttggcgtgagtgcccaactggaccgtaccgtcggtaggcgcaacactttcatcgggacaccatactggatggccccagaagtgattgcatgtgacgaaaaccccgacgccacgtacgatttcaaatccgatctgtggtccctggggatcactgctatagagatggccgaaggcgctccccctctgtgtgacatgcacccgatgagggccttatttcttatcccccgaaatccagcccctcggctgaaaagcaagaaatggagcaaaaaatttcagtcatttattgagagctgtcttgtcaaaaatcattcccaaaggcctgctacggagcaactgatgaagcacccttttatccgtgaccagcccaatgagcgtcaggtgagaattcagctcaaggatcacatcgatcgtaccaagaaaaaacggggtgagaaggacgagacagagtacgagtactccggatctgaagaagaagaagaggagaacgactccggggagccctccagcattttgaacctgcctggggaatcaaccctccggagggactttttacgtctgcagttggccaataaggaaagaagcgaggccctacgtcggcagcaactcgaacagcagcaacgggagaatgaagaacataaaagacagctacttgcagagcgccagaagcggattgaggaacaaaaggagcagcgacgccgtctcgaggaacagcagagacgggaaaaagaactcagaaaacagcaggagcgtgagcagcggagacattatgaggagcagatgaggcgcgaagaggagaggcggagagctgaacatgaacaggagtatattcggcgacagctcgaggaggagcagcgccagctagaaatccttcaacagcaattacttcacgagcaggccctcctccttgagtataagcgcaagcagcttgaagagcagcgtcaggctgagcgccttcagagacagctcaaacaggagcgggactaccttgtaagcctccaacaccagcggcaggaacagagacccgtcgagaaaaaacccctctaccattataaggagggaatgtccccatccgaaaaaccggcttgggcgaaggagatcccccatttggtggcagttaagagtcagggacccgcactgaccgcatctcaatcagtgcacgaacagccgacaaagggcttatcagggttccaagaggctctgaacgtcaccagccacagagtggaaatgccccgtcagaattctgatcccacatcggagaaccctccacttcccacccgtattgagaagttcgaccgttcctcctggctgaggcaggaagaagatattccacccaaggtgcctcagcggacaactagcatctcccccgcactcgcgagaaaaaatagtcccggaaatggcagcgccctcggccctcgcttgggctcgcaaccgattagagcatccaatcccgatctgcgcaggacagaacctattctcgaatcaccattgcagcggacgagcagcggcagcagttcttcgagttctacgcctagtagccagccctcgtcccagggcggatcacagccaggtagccaagccggttcaagtgaacgtacaagagtaagggccaacagcaagtcagaagggagcccagttctccctcatgagccggctaaggtcaagccggaggagtcgcgcgacatcacacgaccttctcgaccagccgtatccgcattcctgtcgaaaagctttgaattactgatctaccaggacctgactgcgttggcgaaggagttgcgggagctgcgcatagaagagacgaatagacctatgaaaaaagtaaccgattacagcagctcttcagaggaatccgagtctagtgaagaggaggaggaggacggagagtctgaaacccacgatggcacagtcgctgtctccgatattccaagactgataccaaccggagctcccggtagtaatgagcaatacaacgtgggaatggtaggaacacacgggctggagacttctcacgcagatagctttagcgggtccatctcgcgcgaaggcaccctcatgatccgcgaaacctccggggaaaaaaaacgcagcggacattcagactctaatgggtttgcgggacacatcaacctccccgaccttgtgcagcaatcacattcaccagcaggaaccccgaccgagggtctgggtcgggtttcaactcactcccaagaaatggattcaggcactgaatacggaatgggctcttcaacaaaagccagctttactcctttcgtagacccacgtgtgtatcagacttctccaaccgacgaggatgaagaagatgaggagtccagcgccgcagcgctttttacgtctgagcttctgcggcaggagcaagcaaaattgaatgaggccaggaagatcagcgttgttaatgttaacccaaccaatattagacctcattcagatacccctgaaattcggaagtacaaaaagagatttaatagcgaaatcctgtgcgctgccttgtggggagtgaacctactcgtcgggactgaaaacggcctgatgctcctggaccgcagcggccagggcaaggtgtacaaccttatcaaccggaggagattccagcagatggatgtgttagaggggttgaacgtcctggttacaatttcaggaaagaagaacaaactccgggtctattacctgtcctggttgcggaataggattctgcacaatgacccggaagtcgaaaaaaagcaaggctggatcactgttggtgatttggagggctgcattcattacaaagtggtcaaatacgaacggatcaagttcctagtgatcgccctgaagaatgcagtggagatatacgcctgggctcccaaaccttaccataagtttatggcctttaagtccttcgctgatctgcagcacaagccactgttggtcgatttgacagttgaagaagggcagcgactcaaagtgatcttcgggagccataccgggttccatgtaatcgacgtggactccggtaacagttacgacatctatatccccagccacatccagggtaacatcaccccccacgccatagtgatcctgcctaaaaccgacggaatggagatgctcgtctgctatgaggatgaaggggtctatgttaacacatatggccgtataacaaaggacgtggtcctgcagtggggggagatgccgacctcagtcgcatatatccactccaatcagattatggggtggggcgagaaagccatcgaaatcagatcagtagaaaccgggcatctggatggagtgttcatgcataagcgcgctcagcgcctgaagttcctctgtgaacgcaatgataaggttttcttcgcatccgtccgaagcggtggttccagccaggtgttttttatgaccctcaatagaaactcaatgatgaattggtag

SEQ ID NO: 61320 - DNA, 4727 bp, Artificial Sequence
  derived and/or modified sequence
attataacagccaatgcagccgccatccacgcacaagcaaagaagcatgtcccatttaaatacacccacgcagccccagcgcccttagccgatcggggcgctcagcccacacgcaccgctgctcggggcttggagatccgcgcaggctgggctcccggacccggcggaccgacgcgcggaggatcgggatccggcgctgtggggctggggtgggcgggggaggctgggcccggggcctctggcgcgacacccgcatgaggacgcgagtgaaatagaccaaggtggaatttccaagggaaaagcttcggggtggttttggtccatttctccagcgaagaagtagacatggcgagcgactccccggctcgaagcctggatgaaatagatctctcggctctgagggaccccgcagggatctttgaattggtggaacttgttggaaatggaacatacgggcaagtttataagggtcgtcatgtcaaaacgggccagcttgcagccatcaaggttatggatgtcacaggggatgaagaggaagaaatcaaacaagaaattaacatgttgaagaaatattctcatcaccggaatattgctacatactatggtgcttttatcaaaaagaacccaccaggcatggatgaccaactttggttggtgatggagttttgtggtgctggctctgtcaccgacctgatcaagaacacaaaaggtaacacgttgaaagaggagtggattgcatacatctgcagggaaatcttacgggggctgagtcacctgcaccagcataaagtgattcatcgagatattaaagggcaaaatgtcttgctgactgaaaatgcagaagttaaactagtggactttggagtcagtgctcagcttgatcgaacagtgggcaggaggaatactttcattggaactccctactggatggcaccagaagttattgcctgtgatgaaaacccagatgccacatatgatttcaagagtgacttgtggtctttgggtatcaccgccattgaaatggcagaaggtgctccccctctctgtgacatgcaccccatgagagctctcttcctcatcccccggaacccagcgcctcggctgaagtctaagaagtggtcaaaaaaattccagtcatttattgagagctgcttggtaaagaatcacagccagcgaccagcaacagaacaattgatgaagcatccatttatacgagaccaacctaatgagcgacaggtccgcattcaactcaaggaccatattgatagaacaaagaagaagcgaggagaaaaagatgagacagagtatgagtacagtggaagtgaggaagaagaggaggagaatgactcaggagagcccagctccatcctgaatctgccaggggagtcgacgctgcggagggactttctgaggctgcagctggccaacaaggagcgttctgaggccctacggaggcagcagctggagcagcagcagcgggagaatgaggagcacaagcggcagctgctggccgagcgtcagaagcgcatcgaggagcagaaagagcagaggcggcggctggaggagcaacaaaggcgagagaaggagctgcggaagcagcaggagagggagcagcgccggcactatgaggagcagatgcgccgggaggaggagaggaggcgtgcggagcatgaacaggaatataagcgcaaacaattggaagaacagagacaagcagaaagactgcagaggcagctaaagcaagaaagagactacttagtttcccttcagcatcagcggcaggagcagaggcctgtggagaagaagccactgtaccattacaaagaaggaatgagtcctagtgagaagccagcatgggccaaggagatcccacatctggtagctgtaaaatcccagggacctgccttgaccgcctcccagtcagtgcacgagcagcccacaaagggcctctctgggtttcaggaggctctgaacgtgacctcccaccgcgtggagatgccacgccagaactcagatcccacctcggaaaatcctcctctccccactcgcattgaaaagtttgaccgaagctcttggttacgacaggaagaagacattccaccaaaggtgcctcaaagaacaacttctatatccccagcattagccagaaagaattctcctgggaatggtagtgctctgggacccagactaggatctcaacccatcagagcaagcaaccctgatctccggagaactgagcccatcttggagagccccttgcagaggaccagcagtggcagttcctccagctccagcacccctagctcccagcccagctcccaaggaggctcccagcctggatcacaagcaggatccagtgaacgcaccagagttcgagccaacagtaagtcagaaggatcacctgtgctcccccatgagcctgcgaaggtgaaaccagaagaatccagggacattacccggcccagtcgaccagctagctacaaaaaagctatagatgaggatctgacggcattagccaaagaactaagagaactccggattgaagaaacaaaccgcccaatgaagaaggtgactgattactcctcctccagtgaggagtcagaaagtagcgaggaagaggaggaagatggagagagcgagacccatgatgggacagtggctgtcagcgacatacccagactgataccaacaggagctccaggcagcaacgagcagtacaatgtgggaatggtggggacgcatgggctggagacctctcatgcggacagtttcagcggcagtatttcaagagaaggaaccttgatgattagagagacgtctggagagaagaagcgatctggccacagtgacagcaatggctttgctggccacatcaacctccctgacctggtgcagcagagccattctccagctggaaccccgactgagggactggggcgcgtctcaacccattcccaggagatggactctgggactgaatatggcatggggagcagcaccaaagcctccttcaccccctttgtggaccccagagtataccagacgtctcccactgatgaagatgaagaggatgaggaatcatcagccgcagctctgtttactagcgaacttcttaggcaagaacaggccaaactcaatgaagcaagaaagatttcggtggtaaatgtaaacccaaccaacattcggcctcatagcgacacaccagaaatcagaaaatacaagaaacgattcaactcagaaatactttgtgcagctctgtggggtgtaaaccttctggtggggactgaaaatggcctgatgcttttggaccgaagtgggcaaggcaaagtctataatctgatcaaccggaggcgatttcagcagatggatgtgctagagggactgaatgtccttgtgacaatttcaggaaagaagaataagctacgagtttactatctttcatggttaagaaacagaatactacataatgacccagaagtagaaaagaaacaaggctggatcactgttggggacttggaaggctgtatacattataaagttgttaaatatgaaaggatcaaatttttggtgattgccttaaagaatgctgtggaaatatatgcttgggctcctaaaccgtatcataaattcatggcatttaagtcttttgcagatctccagcacaagcctctgctagttgatctcacggtagaagaaggtcaaagattaaaggttatttttggttcacacactggtttccatgtaattgatgttgattcaggaaactcttatgatatctacataccatctcatattcagggcaatatcactcctcatgctattgtcatcttgcctaaaacagatggaatggaaatgcttgtttgctatgaggatgagggggtgtatgtaaacacctatggccggataactaaggatgtggtgctccaatggggagaaatgcccacgtctgtggcctacattcattccaatcagataatgggctggggcgagaaagctattgagatccggtcagtggaaacaggacatttggatggagtatttatgcataagcgagctcaaaggttaaagtttctatgtgaaagaaatgataaggtattttttgcatccgtgcgatctggaggaagtagccaagtgtttttcatgaccctcaacagaaattccatgatgaactggtaacagaagagcacttggcacttatcttcatggcgttatttctaatttaaaagaacataactcatgtggacttatgccagtctagaggcagaatcagaaggcttggttgaacatatcgctttccctttttcctctccctccgcccctcccagtacagtccatctttcaatgttgcagcctggttgagaaggagagaaaaaggtggcaggaatttccaggagatccccaagaatgctgccttgtctgtggacaaagatggaccatgtgcccttcggaattagggatagaaacaaatattgtgtgctcttaacgattaagctgtgttatggtgggttttcaggtttttaccttttttctttacccctttactctgcaagaatggggaaagaatgcatactgcgaaaatgagtcttttaaattctgtctgcctactagttttaagtatatggtatgttgtaaaatttccaatgatgagagacagcacaataaatgtaccttatctccttaggctgaaggccataactacatagtggagtaatttaagaactctcttg

SEQ ID NO: 61321 - DNA, 3918 bp, Artificial Sequence
  derived and/or modified sequence
atggcgagcgactccccggctcgaagcctggatgaaatagatctctcggctctgagggaccccgcagggatctttgaattggtggaacttgttggaaatggaacatacgggcaagtttataagggtcgtcatgtcaaaacgggccagcttgcagccatcaaggttatggatgtcacaggggatgaagaggaagaaatcaaacaagaaattaacatgttgaagaaatattctcatcaccggaatattgctacatactatggtgcttttatcaaaaagaacccaccaggcatggatgaccaactttggttggtgatggagttttgtggtgctggctctgtcaccgacctgatcaagaacacaaaaggtaacacgttgaaagaggagtggattgcatacatctgcagggaaatcttacgggggctgagtcacctgcaccagcataaagtgattcatcgagatattaaagggcaaaatgtcttgctgactgaaaatgcagaagttaaactagtggactttggagtcagtgctcagcttgatcgaacagtgggcaggaggaatactttcattggaactccctactggatggcaccagaagttattgcctgtgatgaaaacccagatgccacatatgatttcaagagtgacttgtggtctttgggtatcaccgccattgaaatggcagaaggtgctccccctctctgtgacatgcaccccatgagagctctcttcctcatcccccggaacccagcgcctcggctgaagtctaagaagtggtcaaaaaaattccagtcatttattgagagctgcttggtaaagaatcacagccagcgaccagcaacagaacaattgatgaagcatccatttatacgagaccaacctaatgagcgacaggtccgcattcaactcaaggaccatattgatagaacaaagaagaagcgaggagaaaaagatgagacagagtatgagtacagtggaagtgaggaagaagaggaggagaatgactcaggagagcccagctccatcctgaatctgccaggggagtcgacgctgcggagggactttctgaggctgcagctggccaacaaggagcgttctgaggccctacggaggcagcagctggagcagcagcagcgggagaatgaggagcacaagcggcagctgctggccgagcgtcagaagcgcatcgaggagcagaaagagcagaggcggcggctggaggagcaacaaaggcgagagaaggagctgcggaagcagcaggagagggagcagcgccggcactatgaggagcagatgcgccgggaggaggagaggaggcgtgcggagcatgaacaggaatacatcaggcgacagttagaggaggagcagagacagttagagatcttgcagcagcagctactgcatgaacaagctctacttctggaatataagcgcaaacaattggaagaacagagacaagcagaaagactgcagaggcagctaaagcaagaaagagactacttagtttcccttcagcatcagcggcaggagcagaggcctgtggagaagaagccactgtaccattacaaagaaggaatgagtcctagtgagaagccagcatgggccaaggagatcccacatctggtagctgtaaaatcccagggacctgccttgaccgcctcccagtcagtgcacgagcagcccacaaagggcctctctgggtttcaggaggctctgaacgtgacctcccaccgcgtggagatgccacgccagaactcagatcccacctcggaaaatcctcctctccccactcgcattgaaaagtttgaccgaagctcttggttacgacaggaagaagacattccaccaaaggtgcctcaaagaacaacttctatatccccagcattagccagaaagaattctcctgggaatggtagtgctctgggacccagactaggatctcaacccatcagagcaagcaaccctgatctccggagaactgagcccatcttggagagccccttgcagaggaccagcagtggcagttcctccagctccagcacccctagctcccagcccagctcccaaggaggctcccagcctggatcacaagcaggatccagtgaacgcaccagagttcgagccaacagtaagtcagaaggatcacctgtgctcccccatgagcctgcgaaggtgaaaccagaagaatccagggacattacccggcccagtcgaccagctagctacaaaaaagctatagatgaggatctgacggcattagccaaagaactaagagaactccggattgaagaaacaaaccgcccaatgaagaaggtgactgattactcctcctccagtgaggagtcagaaagtagcgaggaagaggaggaagatggagagagcgagacccatgatgggacagtggctgtcagcgacatacccagactgataccaacaggagctccaggcagcaacgagcagtacaatgtgggaatggtggggacgcatgggctggagacctctcatgcggacagtttcagcggcagtatttcaagagaaggaaccttgatgattagagagacgtctggagagaagaagcgatctggccacagtgacagcaatggctttgctggccacatcaacctccctgacctggtgcagcagagccattctccagctggaaccccgactgagggactggggcgcgtctcaacccattcccaggagatggactctgggactgaatatggcatggggagcagcaccaaagcctccttcaccccctttgtggaccccagagtataccagacgtctcccactgatgaagatgaagaggatgaggaatcatcagccgcagctctgtttactagcgaacttcttaggcaagaacaggccaaactcaatgaagcaagaaagatttcggtggtaaatgtaaacccaaccaacattcggcctcatagcgacacaccagaaatcagaaaatacaagaaacgattcaactcagaaatactttgtgcagctctgtggggtgtaaaccttctggtggggactgaaaatggcctgatgcttttggaccgaagtgggcaaggcaaagtctataatctgatcaaccggaggcgatttcagcagatggatgtgctagagggactgaatgtccttgtgacaatttcaggaaagaagaataagctacgagtttactatctttcatggttaagaaacagaatactacataatgacccagaagtagaaaagaaacaaggctggatcactgttggggacttggaaggctgtatacattataaagttgttaaatatgaaaggatcaaatttttggtgattgccttaaagaatgctgtggaaatatatgcttgggctcctaaaccgtatcataaattcatggcatttaagtcttttgcagatctccagcacaagcctctgctagttgatctcacggtagaagaaggtcaaagattaaaggttatttttggttcacacactggtttccatgtaattgatgttgattcaggaaactcttatgatatctacataccatctcatattcagggcaatatcactcctcatgctattgtcatcttgcctaaaacagatggaatggaaatgcttgtttgctatgaggatgagggggtgtatgtaaacacctatggccggataactaaggatgtggtgctccaatggggagaaatgcccacgtctgtggcctacattcattccaatcagataatgggctggggcgagaaagctattgagatccggtcagtggaaacaggacatttggatggagtatttatgcataagcgagctcaaaggttaaagtttctatgtgaaagaaatgataaggtattttttgcatccgtgcgatctggaggaagtagccaagtgtttttcatgaccctcaacagaaattccatgatgaactggtaa

SEQ ID NO: 61322 - DNA, 5662 bp, Artificial Sequence
  derived and/or modified sequence
attataacagccaatgcagccgccatccacgcacaagcaaagaagcatgtcccatttaaatacacccacgcagccccagcgcccttagccgatcggggcgctcagcccacacgcaccgctgctcggggcttggagatccgcgcaggctgggctcccggacccggcggaccgacgcgcggaggatcgggatccggcgctgtggggctggggtgggcgggggaggctgggcccggggcctctggcgcgacacccgcatgaggacgcgagtgaaatagaccaaggtggaatttccaagggaaaagcttcggggtggttttggtccatttctccagcgaagaagtagacatggcgagcgactccccggctcgaagcctggatgaaatagatctctcggctctgagggaccccgcagggatctttgaattggtggaacttgttggaaatggaacatacgggcaagtttataagggtcgtcatgtcaaaacgggccagcttgcagccatcaaggttatggatgtcacaggggatgaagaggaagaaatcaaacaagaaattaacatgttgaagaaatattctcatcaccggaatattgctacatactatggtgcttttatcaaaaagaacccaccaggcatggatgaccaactttggttggtgatggagttttgtggtgctggctctgtcaccgacctgatcaagaacacaaaaggtaacacgttgaaagaggagtggattgcatacatctgcagggaaatcttacgggggctgagtcacctgcaccagcataaagtgattcatcgagatattaaagggcaaaatgtcttgctgactgaaaatgcagaagttaaaatagtggactttggagtcagtgctcagcttgatcgaacagtgggcaggaggaatactttcattggaactccctactggatggcaccagaagttattgcctgtgatgaaaacccagatgccacatatgatttcaagagtgacttgtggtctttgggtatcaccgccattgaaatggcagaaggtgctccccctctctgtgacatgcaccccatgagagctctcttcctcatcccccggaacccagcgcctcggctgaagtctaagaagtggtcaaaaaaattccagtcatttattgagagctgcttggtaaagaatcacagccagcgaccagcaacagaacaattgatgaagcatccatttatacgagaccaacctaatgagcgacaggtccgcattcaactcaaggaccatattgatagaacaaagaagaagcgaggagaaaaagatgagacagagtatgagtacagtggaagtgaggaagaagaggaggagaatgactcaggagagcccagctccatcctgaatctgccaggggagtcgacgctgcggagggactttctgaggctgcagctggccaacaaggagcgttctgaggccctacggaggcagcagctggagcagcagcagcgggagaatgaggagcacaagcggcagctgctggccgagcgtcagaagcgcatcgaggagcagaaagagcagaggcggcggctggaggagcaacaaaggcgagagaaggagctgcggaagcagcaggagagggagcagcgccggcactatgaggagcagatgcgccgggaggaggagaggaggcgtgcggagcatgaacaggaatacatcaggcgacagttagaggaggagcagagacagttagagatcttgcagcagcagctactgcatgaacaagctctacttctggaatataagcgcaaacaattggaagaacagagacaagcagaaagactgcagaggcagctaaagcaagaaagagactacttagtttcccttcagcatcagcggcaggagcagaggcctgtggagaagaagccactgtaccattacaaagaaggaatgagtcctagtgagaagccagcatgggccaaggagatcccacatctggtagctgtaaaatcccagggacctgccttgaccgcctcccagtcagtgcacgagcagcccacaaagggcctctctgggtttcaggaggctctgaacgtgacctcccaccgcgtggagatgccacgccagaactcagatcccacctcggaaaatcctcctctccccactcgcattgaaaagtttgaccgaagctcttggttacgacaggaagaagacattccaccaaaggtgcctcaaagaacaacttctatatccccagcattagccagaaagaattctcctgggaatggtagtgctctgggacccagactaggatctcaacccatcagagcaagcaaccctgatctccggagaactgagcccatcttggagagccccttgcagaggaccagcagtggcagttcctccagctccagcacccctagctcccagcccagctcccaaggaggctcccagcctggatcacaagcaggatccagtgaacgcaccagagttcgagccaacagtaagtcagaaggatcacctgtgctcccccatgagcctgcgaaggtgaaaccagaagaatccagggacattacccggcccagtcgaccagctgtgagtgcttttctctccaagagttttgaactcttaatttaccaggatctgacggcattagccaaagaactaagagaactccggattgaagaaacaaaccgcccaatgaagaaggtgactgattactcctcctccagtgaggagtcagaaagtagcgaggaagaggaggaagatggagagagcgagacccatgatgggacagtggctgtcagcgacatacccagactgataccaacaggagctccaggcagcaacgagcagtacaatgtgggaatggtggggacgcatgggctggagacctctcatgcggacagtttcagcggcagtatttcaagagaaggaaccttgatgattagagagacgtctggagagaagaagcgatctggccacagtgacagcaatggctttgctggccacatcaacctccctgacctggtgcagcagagccattctccagctggaaccccgactgagggactggggcgcgtctcaacccattcccaggagatggactctgggactgaatatggcatggggagcagcaccaaagcctccttcaccccctttgtggaccccagagtataccagacgtctcccactgatgaagatgaagaggatgaggaatcatcagccgcagctctgtttactagcgaacttcttaggcaagaacaggccaaactcaatgaagcaagaaagatttcggtggtaaatgtaaacccaaccaacattcggcctcatagcgacacaccagaaatcagaaaatacaagaaacgattcaactcagaaatactttgtgcagctctgtggggtgtaaaccttctggtggggactgaaaatggcctgatgcttttggaccgaagtgggcaaggcaaagtctataatctgatcaaccggaggcgatttcagcagatggatgtgctagagggactgaatgtccttgtgacaatttcaggaaagaagaataagctacgagtttactatctttcatggttaagaaacagaatactacataatgacccagaagtagaaaagaaacaaggctggatcactgttggggacttggaaggctgtatacattataaagttgttaaatatgaaaggatcaaatttttggtgattgccttaaagaatgctgtggaaatatatgcttgggctcctaaaccgtatcataaattcatggcatttaagtcttttgcagatctccagcacaagcctctgctagttgatctcacggtagaagaaggtcaaagattaaaggttatttttggttcacacactggtttccatgtaattgatgttgattcaggaaactcttatgatatctacataccatctcatattcagggcaatatcactcctcatgctattgtcatcttgcctaaaacagatggaatggaaatgcttgtttgctatgaggatgagggggtgtatgtaaacacctatggccggataactaaggatgtggtgctccaatggggagaaatgcccacgtctgtggcctacattcattccaatcagataatgggctggggcgagaaagctattgagatccggtcagtggaaacaggacatttggatggagtatttatgcataagcgagctcaaaggttaaagtttctatgtgaaagaaatgataaggtattttttgcatccgtgcgatctggaggaagtagccaagtgtttttcatgaccctcaacagaaattccatgatgaactggtaacagaagagcacttggcacttatcttcatggcgttatttctaatttaaaagaacataactcatgtggacttatgccagtctagaggcagaatcagaaggcttggttgaacatatcgctttccctttttcctctccctccgcccctcccagtacagtccatctttcaatgttgcagcctggttgagaaggagagaaaaaggtggcaggaatttccaggagatccccaagaatgctgccttgtctgtggacaaagatggaccatgtgcccttcggaattagggatagaaacaaatattgtgtgctcttaacgattaagctgtgttatggtgggttttcaggtttttaccttttttctttacccctttactctgcaagaatggggaaagaatgcatactgcgaaaatgagtcttttaaattctgtctgcctactagttttaagtatatggtatgttgtaaaatttccaatgatgagagacagcacaataaatgtaccttatctccttaggctgaaggccataactacatagtggagtaatttaagaactctcttgccttcaccaacccaaaaggttgctttttgatagcaactggctaatgaatttttaaaaagagaagaaaaatactagttttcccctcttttgggaaatagattttaaatggctaaactactagccttaaaactactagtctaataaaatcaactaccacttttgtgaatctgacaggccacatttttatatggccctttacagaatggagtgtgttgaacaggatactaacgccattgagttgagctggcctagcgatggagggacactctaacacaactttccctcagctattatgcaacagatcagggaaaaagatgggatgacagatggggtcagacagaaagagcttctgggaaacaagcttacatagtcttttttaaaatgcacaaagcctcccagctaagaggtcacttggtttgggcttcattaggactgagactttgttgagttctttctgggacttggagagtggatgatattcaggctctgaacattcccagcgctctcccgagggtgccactttctcaagatgaaaactgtgactgaaaaaattaataataaatgtttctgagctgcctgtgttctccctgtgtgggtgagagaagggactagactcctaagcctgcctcagatacaagaggcatcattggctccaattttagagaacttgaaagcaaggctttggacaaaattttgagaccctaatcactttaccttcctccaaattacccaacatacggtaaacaacatttgtgcagaagtatgtatgtatttagttcaggttgacttgtgtccttataaactcttactcaaatgatttgaacttt

SEQ ID NO: 61323 - protein, 1268 aa, Artificial Sequence
  derived and/or modified sequence
MASDSPARSLDEIDLSALRDPAGIFELVELVGNGTYGQVYKGRHVKTGQLAAIKVMDVTGDEEEEIKQEINMLKKYSHHRNIATYYGAFIKKNPPGMDDQLWLVMEFCGAGSVTDLIKNTKGNTLKEEWIAYICREILRGLSHLHQHKVIHRDIKGQNVLLTENAEVKLVDFGVSAQLDRTVGRRNTFIGTPYWMAPEVIACDENPDATYDFKSDLWSLGITAIEMAEGAPPLCDMHPMRALFLIPRNPAPRLKSKKWSKKFQSFIESCLVKNHSQRPATEQLMKHPFIRDQPNERQVRIQLKDHIDRTKKKRGEKDETEYEYSGSEEEEEENDSGEPSSILNLPGESTLRRDFLRLQLANKERSEALRRQQLEQQQRENEEHKRQLLAERQKRIEEQKEQRRRLEEQQRREKELRKQQEREQRRHYEEQMRREEERRRAEHEQEYKRKQLEEQRQAERLQRQLKQERDYLVSLQHQRQEQRPVEKKPLYHYKEGMSPSEKPAWAKEIPHLVAVKSQGPALTASQSVHEQPTKGLSGFQEALNVTSHRVEMPRQNSDPTSENPPLPTRIEKFDRSSWLRQEEDIPPKVPQRTTSISPALARKNSPGNGSALGPRLGSQPIRASNPDLRRTEPILESPLQRTSSGSSSSSSTPSSQPSSQGGSQPGSQAGSSERTRVRANSKSEGSPVLPHEPAKVKPEESRDITRPSRPADLTALAKELRELRIEETNRPMKKVTDYSSSSEESESSEEEEEDGESETHDGTVAVSDIPRLIPTGAPGSNEQYNVGMVGTHGLETSHADSFSGSISREGTLMIRETSGEKKRSGHSDSNGFAGHINLPDLVQQSHSPAGTPTEGLGRVSTHSQEMDSGTEYGMGSSTKASFTPFVDPRVYQTSPTDEDEEDEESSAAALFTSELLRQEQAKLNEARKISVVNVNPTNIRPHSDTPEIRKYKKRFNSEILCAALWGVNLLVGTENGLMLLDRSGQGKVYNLINRRRFQQMDVLEGLNVLVTISGKKNKLRVYYLSWLRNRILHNDPEVEKKQGWITVGDLEGCIHYKVVKYERIKFLVIALKNAVEIYAWAPKPYHKFMAFKSFADLQHKPLLVDLTVEEGQRLKVIFGSHTGFHVIDVDSGNSYDIYIPSHIQGNITPHAIVILPKTDGMEMLVCYEDEGVYVNTYGRITKDVVLQWGEMPTSVAYIHSNQIMGWGEKAIEIRSVETGHLDGVFMHKRAQRLKFLCERNDKVFFASVRSGGSSQVFFMTLNRNSMMNW

SEQ ID NO: 61324 - protein, 164 aa, Artificial Sequence
  derived and/or modified sequence
MSVDPLSSKALKIKRELSENTPHLSDEALMGLSVRELNRHLRGLSAEEVTRLKQRRRTLKNRGYAASCRVKRVCQKEELQKQKSELEREVDKLARENAAMRLELDALRGKCEALQGFARSVAAARGPATLVAPASVITIVKSTPGSGSGPAHGPDPAHGPASCS

SEQ ID NO: 61325 - protein, 126 aa, Artificial Sequence
  derived and/or modified sequence
MSVDPLSSKALKIKRELSENTPHLSDEALMGLSVRELNRHLRGLSAEEVTRLKQRRRTLKNRGYAASCRVKRVCQKEELQKQKSELEREVDKLARENAAMRLELDALRGKCEALQGFARSVAAARG

SEQ ID NO: 61326 - protein, 93 aa, Artificial Sequence
  derived and/or modified sequence
MGLSVRELNRHLRGLSAEEVTRLKQRRRTLKNRGYAASCRVKRVCQKEELQKQKSELEREVDKLARENAAMRLELDALRGKCEALQGFARSVA

SEQ ID NO: 61327 - protein, 135 aa, Artificial Sequence
  derived and/or modified sequence
MGLSVRELNRHLRGLSAEEVTRLKQRRRTLKNRGYAASCRVKRVCQKEELQKQKSELEREVDKLARENAAMRLELDALRGKCEALQGFARSVAAARGPATLVAPASVITIVKSTPGSGSGPAHGPDPAHGPASCS

SEQ ID NO: 61328 - DNA, 2450 bp, Artificial Sequence
  derived and/or modified sequence
cgggtcggtgacgtcaccgcatgactgggtttttatgaatgaaaggaatcctgtgagtgagtaattccgggaagctcgccttacaactccgcgcggcctcggccccctgcgccgcccgccccacaacaaaactcagcgcagcgctcccgggcgcccggttcagagcgacctgcggctcagagcggaggggagactgaccggagcgcggatcgggacagcggccgggacagcggcgagacgcgcgtgtgtgagcgcgccggaccaagcgggcccagaagcgggtctgcagcccagagggcaccttctgcaaacatgtctgtggatcccctatccagcaaagctctaaagatcaagcgagagctgagcgagaacacgccgcacctgtcggacgaggcgctgatggggctgtcggtgcgcgagctgaaccggcatctgcgcgggctctccgccgaggaggtgacacggctcaagcagcggcgccgcacactcaaaaaccgtggctacgccgccagctgccgcgtgaagcgcgtgtgccagaaggaggagctgcagaagcagaagtcggagctggagcgcgaggtggacaagctggcgcgcgagaacgccgccatgcgcctggagctcgacgcgctgcgcggcaagtgcgaggcgctgcagggcttcgcgcgctccgtggccgccgcccgcgggcccgccacgctcgtggcgccggccagcgtcatcaccatcgtcaagtccaccccgggctcggggtctggccccgcccacggcccggaccccgcccacggcccggcctcctgctcctagtgcccgcccccgccatgcctcagccacgcccctccggcctcagctccctccccaaagtgcctgagcgccgcctctgtgcccaggtcccatttctctgcagcactggccccttggtgcacacacattcccttcgtgggccctgtcttcctcttgcagccccccaaactgggaccgaatgaccctgggaaggggaacttgggtaggttggggatggggcagaggtctggatctgggatcgcccttggctgaaagtttagcctttttagattgagagatacagagccggcttagagaacagctgttgggggagaagagggcacccctcatcttggaaactgctcttattgtgccaatatgccctccaaaccctcccaggattcaaagctaggtttggctgtctgtgacttacgggaccgtcctgctgagaaattgcactgaagagatgcccccacctctggttgggcctgggggtgcctggccttccgaaactaaaagagtgggtgggaagactagtgaaacccagttcacggatggggaaacaggcctgaggtcacatttcacttagtggttgtgttgggaccaaaacctgggtgtcctcactgctgccctgagtccagccatggttttcagggggacagtggacagggactcagaaatgtggtgggagggcctccctggcttgggagaccgctctctgcaagggagggggagagaagcagagggagagagaaggtgacacggatggaagagtgggaaggagctggcctggctcagccctaggctgtccctgcagccagggtgtccgggggctggccagtcagagaaagggggccatggactgctgtggcaaatagggagacaaggagacagaccctgcagtcctactacagtctggagtggggtcctaagaagaagggtcccacctcaacccctgtcagtgtccactgtggggtgggggctgacccctgcctttgattgtcattctcctgggaagcccagtctcagtccctcccccaacactgtccacactgcccctccccactgtttatttattgcacggatctaagttattctccccagccagagcccgagctcctgctccctgggaaaagtggcgtatggccctgagctgggctttatattttatatctgcaaataaatcacattttatcttatatttagggaaagccggagagcaacaacaaaaaatgtttaagccgggcgcggtggctcacatctgtaatcccagcactttgggagtccaaggagggggatcgcttgagtccaggagtttgagaccagcctggacaacatggtgaaaccccatctctacaaaaaatacaaaaattagccatgcatggtggctcatgcctgtagtcccagctacttgggaggctgaggcaggaggatcacttaagcccagaaggcagaggttgtagtgagctgagatcgcaccactgcactccagcctgggcaacatagcaaaatcctgtctcaaaaaaaaagttaaaaaatattgcccggctcctagaatttatttatttcctgacttacagcaagcgagttatcgtcttctgtattttgtagactttctaaataaagtcaaattctttctttttccacagagaataaaaaaaaaaaaa

SEQ ID NO: 61329 - DNA, 495 bp, Artificial Sequence
  derived and/or modified sequence
atgagcgtggaccccctgagcagcaaggccctgaagatcaagagagagctgagcgagaacaccccccacctgagcgacgaggccctgatgggcctgagcgtgagagagctgaacagacacctgagaggcctgagcgccgaggaggtgaccagactgaagcagagaagaagaaccctgaagaacagaggctacgccgccagctgcagagtgaagagagtgtgccagaaggaggagctgcagaagcagaagagcgagctggagagagaggtggacaagctggccagagagaacgccgccatgagactggagctggacgccctgagaggcaagtgcgaggccctgcagggcttcgccagaagcgtggccgccgccagaggccccgccaccctggtggcccccgccagcgtgatcaccatcgtgaagagcacccccggcagcggcagcggccccgcccacggccccgaccccgcccacggccccgccagctgcagctag

SEQ ID NO: 61330 - DNA, 381 bp, Artificial Sequence
  derived and/or modified sequence
atgagcgtggaccccctgagcagcaaggccctgaagatcaagagagagctgagcgagaacaccccccacctgagcgacgaggccctgatgggcctgagcgtgagagagctgaacagacacctgagaggcctgagcgccgaggaggtgaccagactgaagcagagaagaagaaccctgaagaacagaggctacgccgccagctgcagagtgaagagagtgtgccagaaggaggagctgcagaagcagaagagcgagctggagagagaggtggacaagctggccagagagaacgccgccatgagactggagctggacgccctgagaggcaagtgcgaggccctgcagggcttcgccagaagcgtggccgccgccagaggctag

SEQ ID NO: 61331 - DNA, 495 bp, Artificial Sequence
  derived and/or modified sequence
atgagtgtggacccactctcctctaaggcattaaagatcaaaagggagctttctgagaatactccacacctatccgacgaagcactgatggggctctccgtgagagaactgaatcggcacctccgcgggttatcggcagaagaagtgacaagactgaagcagcgtcgacgcacgctcaagaatcgaggttacgcagcttcctgcagagtgaagagggtctgccagaaagaagaattacagaagcagaaatccgaacttgaaagagaggtcgacaagctggctagagagaacgctgcgatgcggctggaactggatgcgctgagagggaagtgtgaggcacttcagggcttcgccagatcggtcgctgcagcccgcgggcccgccactctggtcgctcctgcttctgtaatcactattgttaaatccactcctggcagtggatctgggccagcgcatggtcccgacccagcacatgggcctgctagctgctcgtag

SEQ ID NO: 61332 - DNA, 495 bp, Artificial Sequence
  derived and/or modified sequence
atgtctgtggaccctttaagcagtaaggctctaaagataaaacgcgagctgtcagagaacaccccccatttgtctgatgaagctctgatgggcctgtcagttcgggaactcaatcgacacttgagagggcttagcgccgaagaggtgactagattaaaacagcgccggaggacgttaaagaatagaggatatgcggcgtcctgtagagtcaaaagagtttgtcagaaggaagaactgcagaagcagaagtctgaattagagcgagaagtggacaagctggctagggaaaatgcagccatgcgcttagagctggacgctttgcgcggcaagtgtgaggcccttcaggggttcgcgcggtctgtggctgcggccagaggccctgccaccctggtggccccagccagcgtgatcacgatcgtaaagagcaccccgggaagcggctccggtccggcccacgggcccgaccccgctcatggtcctgcatcttgtagttag

SEQ ID NO: 61333 - DNA, 381 bp, Artificial Sequence
  derived and/or modified sequence
atgtccgtggacccactgagcagtaaggccttgaaaataaaacgcgaactcagtgagaatactcctcatctgagtgatgaagccctgatgggcctgtccgtacgagaactgaatcgacacttgagagggttatccgccgaagaggtgacacgcctcaagcagcggaggcgcaccctgaagaacagggggtatgctgccagctgccgcgtgaaacgtgtgtgtcagaaagaggaacttcagaaacaaaagtcggagctggaaagggaagtggacaagcttgctagagagaatgccgccatgcgcctagaactggacgccctgcggggcaaatgtgaggctctccagggctttgctcgaagcgtcgccgctgctagaggatag

SEQ ID NO: 61334 - DNA, 495 bp, Artificial Sequence
  derived and/or modified sequence
atgtcagtcgatccgctttcatctaaggcgttgaagataaagcgagaattgtctgagaatactccacacctgtctgacgaggccctgatggggctgagcgttagagaactaaaccggcacctacgaggacttagcgctgaggaggttacgaggttgaaacaacggcgtagaacactcaaaaataggggctatgcagcatcctgtcgagtgaagagggtgtgccagaaggaggaattacagaaacagaaaagcgagctggaaagggaggtggacaagctggccagggaaaatgccgcgatgaggctggagctggacgcattgcgagggaagtgtgaagcactgcagggatttgcccgatcagttgccgccgcgcgcgggccggcaaccctggttgctcccgcctccgtgattacaattgtgaaaagtacgcctggcagtggatccggtcccgcccatggacccgaccccgctcatgggcccgctagctgcagttag

SEQ ID NO: 61335 - DNA, 495 bp, Artificial Sequence
  derived and/or modified sequence
atgtctgttgacccactcagcagcaaggctctcaagattaagagggagctgagcgaaaacacaccacacctgtccgacgaagcccttatgggccttagcgttagggaactcaacagacatctcagaggtctgtccgcggaagaagtcactaggctcaaacagcgtcgacgaaccctgaaaaaccgaggctatgcggcgtcttgtcgagtcaaaagggtctgccagaaggaagaactgcagaagcagaagtccgaacttgagcgcgaggtggataaactcgctcgcgagaatgctgccatgaggttggagctcgacgcgcttcgaggaaagtgcgaagccctgcagggtttcgcccggtccgtggctgctgctagggggcccgcaactctggtggcgcccgccagtgtcatcaccatcgtgaaatccactccaggttcgggtagcggccccgcccacggacccgatccagcgcacgggcctgcttcctgctcttag

SEQ ID NO: 61336 - DNA, 495 bp, Artificial Sequence
  derived and/or modified sequence
atgtctgtggaccccctgagcagcaaggccctgaagatcaagcgggagctgtctgagaacaccccccacctgagtgatgaggccctgatgggcctgtctgtgcgggagctgaacagacacctgcggggcctgtctgctgaggaggtgacccggctgaagcagaggaggaggaccctgaagaacagaggctatgctgccagctgccgggtgaagagggtgtgccagaaggaggagctgcagaagcagaagtctgagctggagcgggaggtggacaagctggcccgggagaatgctgccatgaggctggagctggatgccctgcggggcaaatgtgaggccctgcagggctttgcccggtctgtggccgccgcccggggccctgccaccctggtggccccagccagcgtcatcaccatcgtgaagagcaccccaggcagcggcagcggccctgcccacggccctgaccctgcccacggccctgccagctgcagctag

SEQ ID NO: 61337 - DNA, 381 bp, Artificial Sequence
  derived and/or modified sequence
atgtctgtggaccccctgagcagcaaggccctgaagatcaagcgggagctgtctgagaacaccccccacctgagtgatgaggccctgatgggcctgtctgtgcgggagctgaacagacacctgcggggcctgtctgctgaggaggtgacccggctgaagcagaggaggaggaccctgaagaacagaggctatgctgccagctgccgggtgaagagggtgtgccagaaggaggagctgcagaagcagaagtctgagctggagcgggaggtggacaagctggcccgggagaatgctgccatgaggctggagctggatgccctgcggggcaaatgtgaggccctgcagggctttgcccggtctgtggccgccgcccggggctag

SEQ ID NO: 61338 - DNA, 495 bp, Artificial Sequence
  derived and/or modified sequence
atgagcgtggaccccctgagcagcaaggccctgaagatcaagcgggaacttagcgaaaatacgccacacctgagcgatgaggccctcatgggactgagtgtacgggaactgaaccgtcacctcaggggtctgtctgcggaggaagtcaccaggctgaagcagcggcgtagaacgcttaaaaataggggttatgcagcaagttgtagggtgaaacgtgtgtgccagaaagaggagttacaaaagcagaagagcgaactggagcgagaggttgataagctggcacgtgagaacgccgccatgcgcctggaactcgacgcacttcgaggcaagtgcgaggccctgcagggatttgcgcgtagtgtggccgccgccagaggtcccgccaccctcgtggccccggccagtgttatcacaattgtcaaatccacccccggatcagggagcgggccagcacacgggcctgatccagcccacggtcctgcctcatgtagctag

SEQ ID NO: 61339 - DNA, 495 bp, Artificial Sequence
  derived and/or modified sequence
atgagcgtggaccccctgagcagcaaggccctgaagatcaagcgggaattatcggagaatacacctcatttaagcgacgaagccctcatgggtctcagtgtgagagaattgaacaggcatttgagaggcctctcagcagaagaggtgacacgtctcaagcagagaaggaggaccttaaagaacagaggttacgccgcatcttgcagggtgaaacgagtgtgccagaaagaagaactgcaaaagcagaaatccgaactggaaagggaggtggataagctggcaagggagaacgcagcaatgcggctcgagctggacgccttgagaggtaagtgcgaggcactccagggttttgctcggtcagtggccgcggcaagggggccagcaacgctcgttgctccagcgtcggtgatcacaatcgttaagagtacccctggtagtggaagtggacccgcgcacggccccgaccccgcacacggacccgcttcatgctcgtag

SEQ ID NO: 61340 - DNA, 381 bp, Artificial Sequence
  derived and/or modified sequence
atgagcgtggaccccctgagcagcaaggccctgaagatcaagcgggaactcagcgaaaatacgccccatctgtccgatgaggctttaatgggcctgtcagtacgggagttaaatagacatctacgcggcctcagcgccgaagaggttaccaggcttaagcagcggcggagaaccctcaagaaccggggatacgccgcaagttgtagagtaaagcgggtgtgccagaaagaggaactccagaaacagaagtccgagctggaaagagaggtcgataaactggcaagagaaaatgccgcaatgcgccttgagctagatgctctcaggggaaagtgtgaagccctgcaaggatttgccaggtccgttgctgcagcacgtgggtag

SEQ ID NO: 61341 - DNA, 495 bp, Artificial Sequence
  derived and/or modified sequence
atgagcgtggaccccctgagcagcaaggccctgaagatcaagcgggagttgagtgaaaatacgccccacctgagcgatgaggccctgatgggcctctcagtgcgggagctgaaccgccacctgcgcgggctatccgcggaggaggtcacaagactgaaacagaggcggcgtaccctcaagaaccgcggatatgcggcatcatgcagggtcaagcgagtctgccagaaggaggaattacagaaacagaagagtgagcttgagcgagaggtcgataaactggctcgcgagaatgccgcgatgcggttggagctggacgctctgcgagggaaatgcgaggcccttcagggattcgcacgtagtgtcgccgcggccaggggccccgcaaccctggtggccccggccagcgtgatcacaatagtgaagagcacgcccggctcaggaagtggccccgcccacggaccagaccctgcccacggaccggcctcttgttcctag

SEQ ID NO: 61342 - DNA, 495 bp, Artificial Sequence
  derived and/or modified sequence
atgagcgtggaccccctgagcagcaaggccctgaagatcaagcgggagctctccgagaatactccacacctctcagatgaagccttgatggggttatccgtcagagagcttaaccggcacttaagggggctgtctgcagaggaggtgactagactgaagcagcgccgacggacgctgaagaaccggggatatgctgccagctgccgggtcaaaagggtgtgccaaaaagaggagctccaaaagcagaaatccgagctcgagcgagaagtggataaactcgcccgagagaacgcagcaatgcggctggaactcgacgctcttcgaggcaaatgcgaggccctgcaaggattcgccagaagtgtggcggctgctaggggccccgccactttagtcgcacctgccagcgtgatcaccattgtcaaaagtacccccggcagcgggagcggcccagcccacggtcctgacccagcccacgggcccgcctcctgttcttag

SEQ ID NO: 61343 - DNA, 495 bp, Artificial Sequence
  derived and/or modified sequence
atgagtgtcgaccctttgagttctaaggccttaaagatcaaacgagagctgagtgagaacaccccacacctttctgatgaagccctaatgggtctctccgtccgcgaactcaaccgtcacctaaggggcctatccgcagaggaggttacccgcttgaaacaacgcaggagaacgctgaagaatagaggctacgctgcttcgtgtcgcgtgaagcgcgtctgccagaaggaagaactacaaaagcagaaatctgaactcgagcgcgaggtggacaagctcgcgcgtgaaaatgcggctatgaggctcgagctcgatgcactgcgtgggaaatgtgaagctttgcagggtttcgctcggtcagtcgctgcagccagaggtccggctaccctcgtggcgcctgctagcgtgattaccatcgtgaagtctacgcccggaagtgggtctggaccagcgcatggcccagacccagctcacggccctgctagctgcagttag

SEQ ID NO: 61344 - DNA, 495 bp, Artificial Sequence
  derived and/or modified sequence
atgtctgtggatcctctctcttcaaaagctctgaaaattaaacgcgagcttagtgaaaacacgccccacttgagcgacgaagccctcatgggcctgtccgtacgagagctcaatcggcacctaagaggcctgagcgcagaggaagtcaccagactcaaacagcggcgaagaacactgaagaatcggggatatgccgctagttgcagagtgaagcgggtttgtcagaaggaggaactccaaaaacagaaaagcgagctggaacgggaagtcgataagctggcacgggaaaacgcggcaatgagactggaactcgacgctcttcggggaaaatgtgaggctcttcaaggctttgcccgaagcgtagcagccgctcgcggtcctgctactctggtggcacctgcatccgttatcactatcgtgaagtcaactccaggaagtgggagcgggcctgcgcatggcccagatccagcccacggccctgcctcctgctcctag

SEQ ID NO: 61345 - DNA, 381 bp, Artificial Sequence
  derived and/or modified sequence
atgtctgtggaccccctgtcatcaaaggccctgaagattaagcgagaattatccgagaataccccccacttaagtgacgaagctctgatgggactcagcgtacgtgagctgaatagacatttgcgtgggctttcagcagaggaggttacgcgcctgaaacagcggagacggaccctgaagaatagaggctatgccgcttcatgccgggtcaaacgtgtatgccagaaggaagagctgcaaaagcagaaatcggagttggaacgcgaagttgacaaactggctcgagagaacgccgctatgaggttggaactcgacgctctgcggggaaaatgcgaagctctccaggggtttgccaggagcgttgcggcagcacggggttag

SEQ ID NO: 61346 - DNA, 495 bp, Artificial Sequence
  derived and/or modified sequence
atgtctgtagatcccctttcctcaaaagccttgaagattaaacgcgaattgagcgagaatacacctcacttgtctgacgaggccctgatggggctgtctgtacgggagcttaatcgacacctgcggggactctctgctgaggaggtgacccgactgaagcagcggagacggactctgaagaaccggggatatgccgcatcctgtcgggtaaaaagagtgtgtcaaaaggaagaattacagaagcagaagagcgaacttgaacgggaagtggacaaacttgcacgagaaaacgcggctatgagactggaattggacgctctgaggggtaagtgtgaagctttgcagggctttgcgagatccgtcgctgccgctcggggacccgctactctagtggcaccggcttccgtgatcacaattgtcaagtcaacgccaggatctggctcgggcccagcgcatggcccagaccccgcacacggccctgcttcctgttcttag

SEQ ID NO: 61347 - DNA, 495 bp, Artificial Sequence
  derived and/or modified sequence
atgtcagtcgaccccttatcgagtaaagcattaaagattaagcgggagctgagtgagaacactccgcacttatcggatgaggccctaatggggctgtctgtccgagaactcaatcggcacctccgcggactgagcgcagaagaagtgacaaggcttaaacaaagaagaagaacccttaagaaccgcggatacgcggcatcttgccgcgtgaaacgtgtgtgccaaaaggaggagctacagaaacagaaatctgaacttgagcgcgaagtggataagcttgccagggagaacgcagccatgcgtttggaattagacgcactgcggggtaagtgtgaagcgctgcaggggtttgccaggagcgtagccgcagcgagggggccagctaccctcgtggcccctgccagtgtgatcactattgttaagtctacgcctggctctggctctggccctgcccatggccctgaccccgcacacggccctgccagttgctcatag

SEQ ID NO: 61348 - DNA, 2490 bp, Artificial Sequence
  derived and/or modified sequence
acgggggcggggccgagggaccaagcggccgctcctggccggagggcggccgggtcggtgacgtcaccgcatgactgggtttttatgaatgaaaggaatcctgtgagtgagtaattccgggaagctcgccttacaactccgcgcggcctcggccccctgcgccgcccgccccacaacaaaactcagcgcagcgctcccgggcgcccggttcagagcgacctgcggctcagagcggaggggagactgaccggagcgcggatcgggacagcggccgggacagcggcgagacgcgcgtgtgtgagcgcgccggaccaagcgggcccagaagcgggtctgcagcccagagggcaccttctgcaaacatgtctgtggatcccctatccagcaaagctctaaagatcaagcgagagctgagcgagaacacgccgcacctgtcggacgaggcgctgatggggctgtcggtgcgcgagctgaaccggcatctgcgcgggctctccgccgaggaggtgacacggctcaagcagcggcgccgcacactcaaaaaccgtggctacgccgccagctgccgcgtgaagcgcgtgtgccagaaggaggagctgcagaagcagaagtcggagctggagcgcgaggtggacaagctggcgcgcgagaacgccgccatgcgcctggagctcgacgcgctgcgcggcaagtgcgaggcgctgcagggcttcgcgcgctccgtggccgccgcccgcgggcccgccacgctcgtggcgccggccagcgtcatcaccatcgtcaagtccaccccgggctcggggtctggccccgcccacggcccggaccccgcccacggcccggcctcctgctcctagtgcccgcccccgccatgcctcagccacgcccctccggcctcagctccctccccaaagtgcctgagcgccgcctctgtgcccaggtcccatttctctgcagcactggccccttggtgcacacacattcccttcgtgggccctgtcttcctcttgcagccccccaaactgggaccgaatgaccctgggaaggggaacttgggtaggttggggatggggcagaggtctggatctgggatcgcccttggctgaaagtttagcctttttagattgagagatacagagccggcttagagaacagctgttgggggagaagagggcacccctcatcttggaaactgctcttattgtgccaatatgccctccaaaccctcccaggattcaaagctaggtttggctgtctgtgacttacgggaccgtcctgctgagaaattgcactgaagagatgcccccacctctggttgggcctgggggtgcctggccttccgaaactaaaagagtgggtgggaagactagtgaaacccagttcacggatggggaaacaggcctgaggtcacatttcacttagtggttgtgttgggaccaaaacctgggtgtcctcactgctgccctgagtccagccatggttttcagggggacagtggacagggactcagaaatgtggtgggagggcctccctggcttgggagaccgctctctgcaagggagggggagagaagcagagggagagagaaggtgacacggatggaagagtgggaaggagctggcctggctcagccctaggctgtccctgcagccagggtgtccgggggctggccagtcagagaaagggggccatggactgctgtggcaaatagggagacaaggagacagaccctgcagtcctactacagtctggagtggggtcctaagaagaagggtcccacctcaacccctgtcagtgtccactgtggggtgggggctgacccctgcctttgattgtcattctcctgggaagcccagtctcagtccctcccccaacactgtccacactgcccctccccactgtttatttattgcacggatctaagttattctccccagccagagcccgagctcctgctccctgggaaaagtggcgtatggccctgagctgggctttatattttatatctgcaaataaatcacattttatcttatatttagggaaagccggagagcaacaacaaaaaatgtttaagccgggcgcggtggctcacatctgtaatcccagcactttgggagtccaaggagggggatcgcttgagtccaggagtttgagaccagcctggacaacatggtgaaaccccatctctacaaaaaatacaaaaattagccatgcatggtggctcatgcctgtagtcccagctacttgggaggctgaggcaggaggatcacttaagcccagaaggcagaggttgtagtgagctgagatcgcaccactgcactccagcctgggcaacatagcaaaatcctgtctcaaaaaaaaagttaaaaaatattgcccggctcctagaatttatttatttcctgacttacagcaagcgagttatcgtcttctgtattttgtagactttctaaataaagtcaaattctttctttttccacagagaataaa

SEQ ID NO: 61349 - DNA, 2325 bp, Artificial Sequence
  derived and/or modified sequence
cagaatggtcaaagaggacctcctgaggaggtgacattgggcaaagacctaaatgatgaggagtcaccatggggctagaacagtaaagagcacagcctgtgcacagctcccgcggctggaaggagccattcaaggaggcctgtggaccaatgtggagagaggaaggtggcaggtctgcagcccagagggcaccttctgcaaacatgtctgtggatcccctatccagcaaagctctaaagatcaagcgagagctgagcgagaacacgccgcacctgtcggacgaggcgctgatggggctgtcggtgcgcgagctgaaccggcatctgcgcgggctctccgccgaggaggtgacacggctcaagcagcggcgccgcacactcaaaaaccgtggctacgccgccagctgccgcgtgaagcgcgtgtgccagaaggaggagctgcagaagcagaagtcggagctggagcgcgaggtggacaagctggcgcgcgagaacgccgccatgcgcctggagctcgacgcgctgcgcggcaagtgcgaggcgctgcagggcttcgcgcgctccgtggccgccgcccgcgggcccgccacgctcgtggcgccggccagcgtcatcaccatcgtcaagtccaccccgggctcggggtctggccccgcccacggcccggaccccgcccacggcccggcctcctgctcctagtgcccgcccccgccatgcctcagccacgcccctccggcctcagctccctccccaaagtgcctgagcgccgcctctgtgcccaggtcccatttctctgcagcactggccccttggtgcacacacattcccttcgtgggccctgtcttcctcttgcagccccccaaactgggaccgaatgaccctgggaaggggaacttgggtaggttggggatggggcagaggtctggatctgggatcgcccttggctgaaagtttagcctttttagattgagagatacagagccggcttagagaacagctgttgggggagaagagggcacccctcatcttggaaactgctcttattgtgccaatatgccctccaaaccctcccaggattcaaagctaggtttggctgtctgtgacttacgggaccgtcctgctgagaaattgcactgaagagatgcccccacctctggttgggcctgggggtgcctggccttccgaaactaaaagagtgggtgggaagactagtgaaacccagttcacggatggggaaacaggcctgaggtcacatttcacttagtggttgtgttgggaccaaaacctgggtgtcctcactgctgccctgagtccagccatggttttcagggggacagtggacagggactcagaaatgtggtgggagggcctccctggcttgggagaccgctctctgcaagggagggggagagaagcagagggagagagaaggtgacacggatggaagagtgggaaggagctggcctggctcagccctaggctgtccctgcagccagggtgtccgggggctggccagtcagagaaagggggccatggactgctgtggcaaatagggagacaaggagacagaccctgcagtcctactacagtctggagtggggtcctaagaagaagggtcccacctcaacccctgtcagtgtccactgtggggtgggggctgacccctgcctttgattgtcattctcctgggaagcccagtctcagtccctcccccaacactgtccacactgcccctccccactgtttatttattgcacggatctaagttattctccccagccagagcccgagctcctgctccctgggaaaagtggcgtatggccctgagctgggctttatattttatatctgcaaataaatcacattttatcttatatttagggaaagccggagagcaacaacaaaaaatgtttaagccgggcgcggtggctcacatctgtaatcccagcactttgggagtccaaggagggggatcgcttgagtccaggagtttgagaccagcctggacaacatggtgaaaccccatctctacaaaaaatacaaaaattagccatgcatggtggctcatgcctgtagtcccagctacttgggaggctgaggcaggaggatcacttaagcccagaaggcagaggttgtagtgagctgagatcgcaccactgcactccagcctgggcaacatagcaaaatcctgtctcaaaaaaaaagttaaaaaatattgcccggctcctagaatttatttatttcctgacttacagcaagcgagttatcgtcttctgtattttgtagactttctaaataaagtcaaattctttctttttccacagag

SEQ ID NO: 61350 - DNA, 697 bp, Artificial Sequence
  derived and/or modified sequence
aaacgcggaacaaggacccgagcgaaggaagcggacccgtgcgtcttcgcacggggtctgggaattctggcccgggccgccccagtcctactacccggggctgtccgtccccggctctccccggagtttcccagggcctccgccacgtgaccccagtgtttgtctcccgcccagagcccgcgcccgcagccacagggtggggcaaggtatcaaagaccccacccagctgagctaggagtgagggatgtgagccacccccgcttggcaccccggtggatctggtaacaaagtctgcagcccagagggcaccttctgcaaacatgtctgtggatcccctatccagcaaagctctaaagatcaagcgagagctgagcgagaacacgccgcacctgtcggacgaggcgctgatggggctgtcggtgcgcgagctgaaccggcatctgcgcgggctctccgccgaggaggtgacacggctcaagcagcggcgccgcacactcaaaaaccgtggctacgccgccagctgccgcgtgaagcgcgtgtgccagaaggaggagctgcagaagcagaagtcggagctggagcgcgaggtggacaagctggcgcgcgagaacgccgccatgcgcctggagctcgacgcgctgcgcggcaagtgcgaggcgctgcagggcttcgcgcgctccgtggccgccgcccgcgg

SEQ ID NO: 61351 - DNA, 2216 bp, Artificial Sequence
  derived and/or modified sequence
agctgagctaggagtgagggatgtgagccacccccgcttggcaccccggtggatctggtaacaaagtctgcagcccagagggcaccttctgcaaacatgtctgtggatcccctatccagcaaagctctaaagatcaagcgagagctgagcgagaacacgccgcacctgtcggacgaggcgctgatggggctgtcggtgcgcgagctgaaccggcatctgcgcgggctctccgccgaggaggtgacacggctcaagcagcggcgccgcacactcaaaaaccgtggctacgccgccagctgccgcgtgaagcgcgtgtgccagaaggaggagctgcagaagcagaagtcggagctggagcgcgaggtggacaagctggcgcgcgagaacgccgccatgcgcctggagctcgacgcgctgcgcggcaagtgcgaggcgctgcagggcttcgcgcgctccgtggccgccgcccgcgggcccgccacgctcgtggcgccggccagcgtcatcaccatcgtcaagtccaccccgggctcggggtctggccccgcccacggcccggaccccgcccacggcccggcctcctgctcctagtgcccgcccccgccatgcctcagccacgcccctccggcctcagctccctccccaaagtgcctgagcgccgcctctgtgcccaggtcccatttctctgcagcactggccccttggtgcacacacattcccttcgtgggccctgtcttcctcttgcagccccccaaactgggaccgaatgaccctgggaaggggaacttgggtaggttggggatggggcagaggtctggatctgggatcgcccttggctgaaagtttagcctttttagattgagagatacagagccggcttagagaacagctgttgggggagaagagggcacccctcatcttggaaactgctcttattgtgccaatatgccctccaaaccctcccaggattcaaagctaggtttggctgtctgtgacttacgggaccgtcctgctgagaaattgcactgaagagatgcccccacctctggttgggcctgggggtgcctggccttccgaaactaaaagagtgggtgggaagactagtgaaacccagttcacggatggggaaacaggcctgaggtcacatttcacttagtggttgtgttgggaccaaaacctgggtgtcctcactgctgccctgagtccagccatggttttcagggggacagtggacagggactcagaaatgtggtgggagggcctccctggcttgggagaccgctctctgcaagggagggggagagaagcagagggagagagaaggtgacacggatggaagagtgggaaggagctggcctggctcagccctaggctgtccctgcagccagggtgtccgggggctggccagtcagagaaagggggccatggactgctgtggcaaatagggagacaaggagacagaccctgcagtcctactacagtctggagtggggtcctaagaagaagggtcccacctcaacccctgtcagtgtccactgtggggtgggggctgacccctgcctttgattgtcattctcctgggaagcccagtctcagtccctcccccaacactgtccacactgcccctccccactgtttatttattgcacggatctaagttattctccccagccagagcccgagctcctgctccctgggaaaagtggcgtatggccctgagctgggctttatattttatatctgcaaataaatcacattttatcttatatttagggaaagccggagagcaacaacaaaaaatgtttaagccgggcgcggtggctcacatctgtaatcccagcactttgggagtccaaggagggggatcgcttgagtccaggagtttgagaccagcctggacaacatggtgaaaccccatctctacaaaaaatacaaaaattagccatgcatggtggctcatgcctgtagtcccagctacttgggaggctgaggcaggaggatcacttaagcccagaaggcagaggttgtagtgagctgagatcgcaccactgcactccagcctgggcaacatagcaaaatcctgtctcaaaaaaaaagttaaaaaatattgcccggctcctagaatttatttatttcctgacttacagcaagcgagttatcgtcttctgtattttgtagactttctaaataaagtcaaattctttctttttccacag

SEQ ID NO: 61352 - DNA, 548 bp, Artificial Sequence
  derived and/or modified sequence
ttccgggaagctcgccttacaactccgcgcggcctcggccccctgcgccgcccgccccacaacaaaactcagcgcagcgctcccgggcgcccggttcagagcgacctgcggctcagagcggaggggagactgaccggagcgcggatcgggacagcggccgggacagcggcgagacgcgcgtgtgtgagcgcgccggaccaagcgggcccagaagcggatcaagcgagagctgagcgagaacacgccgcacctgtcggacgaggcgctgatggggctgtcggtgcgcgagctgaaccggcatctgcgcgggctctccgccgaggaggtgacacggctcaagcagcggcgccgcacactcaaaaaccgtggctacgccgccagctgccgcgtgaagcgcgtgtgccagaaggaggagctgcagaagcagaagtcggagctggagcgcgaggtggacaagctggcgcgcgagaacgccgccatgcgcctggagctcgacgcgctgcgcggcaagtgcgaggcgctgcagggcttcgcgcgctccgtggccg

SEQ ID NO: 61353 - DNA, 2458 bp, Artificial Sequence
  derived and/or modified sequence
cgggtcggtgacgtcaccgcatgactgggtttttatgaatgaaaggaatcctgtgagtgagtaattccgggaagctcgccttacaactccgcgcggcctcggccccctgcgccgcccgccccacaacaaaactcagcgcagcgctcccgggcgcccggttcagagcgacctgcggctcagagcggaggggagactgaccggagcgcggatcgggacagcggccgggacagcggcgagacgcgcgtgtgtgagcgcgccggaccaagcgggcccagaagcgggtgaggaacgcgggaccaggaggacggtctgcagcccagagggcaccttctgcaaacatgtctgtggatcccctatccagcaaagctctaaagatcaagcgagagctgagcgagaacacgccgcacctgtcggacgaggcgctgatggggctgtcggtgcgcgagctgaaccggcatctgcgcgggctctccgccgaggaggtgacacggctcaagcagcggcgccgcacactcaaaaaccgtggctacgccgccagctgccgcgtgaagcgcgtgtgccagaaggaggagctgcagaagcagaagtcggagctggagcgcgaggtggacaagctggcgcgcgagaacgccgccatgcgcctggagctcgacgcgctgcgcggcaagtgcgaggcgctgcagggcttcgcgcgctccgtggccgccgcccgcgggcccgccacgctcgtggcgccggccagcgtcatcaccatcgtcaagtccaccccgggctcggggtctggccccgcccacggcccggaccccgcccacggcccggcctcctgctcctagtgcccgcccccgccatgcctcagccacgcccctccggcctcagctccctccccaaagtgcctgagcgccgcctctgtgcccaggtcccatttctctgcagcactggccccttggtgcacacacattcccttcgtgggccctgtcttcctcttgcagccccccaaactgggaccgaatgaccctgggaaggggaacttgggtaggttggggatggggcagaggtctggatctgggatcgcccttggctgaaagtttagcctttttagattgagagatacagagccggcttagagaacagctgttgggggagaagagggcacccctcatcttggaaactgctcttattgtgccaatatgccctccaaaccctcccaggattcaaagctaggtttggctgtctgtgacttacgggaccgtcctgctgagaaattgcactgaagagatgcccccacctctggttgggcctgggggtgcctggccttccgaaactaaaagagtgggtgggaagactagtgaaacccagttcacggatggggaaacaggcctgaggtcacatttcacttagtggttgtgttgggaccaaaacctgggtgtcctcactgctgccctgagtccagccatggttttcagggggacagtggacagggactcagaaatgtggtgggagggcctccctggcttgggagaccgctctctgcaagggagggggagagaagcagagggagagagaaggtgacacggatggaagagtgggaaggagctggcctggctcagccctaggctgtccctgcagccagggtgtccgggggctggccagtcagagaaagggggccatggactgctgtggcaaatagggagacaaggagacagaccctgcagtcctactacagtctggagtggggtcctaagaagaagggtcccacctcaacccctgtcagtgtccactgtggggtgggggctgacccctgcctttgattgtcattctcctgggaagcccagtctcagtccctcccccaacactgtccacactgcccctccccactgtttatttattgcacggatctaagttattctccccagccagagcccgagctcctgctccctgggaaaagtggcgtatggccctgagctgggctttatattttatatctgcaaataaatcacattttatcttatatttagggaaagccggagagcaacaacaaaaaatgtttaagccgggcgcggtggctcacatctgtaatcccagcactttgggagtccaaggagggggatcgcttgagtccaggagtttgagaccagcctggacaacatggtgaaaccccatctctacaaaaaatacaaaaattagccatgcatggtggctcatgcctgtagtcccagctacttgggaggctgaggcaggaggatcacttaagcccagaaggcagaggttgtagtgagctgagatcgcaccactgcactccagcctgggcaacatagcaaaatcctgtctcaaaaaaaaagttaaaaaatattgcccggctcctagaatttatttatttcctgacttacagcaagcgagttatcgtcttctgtattttgtagactttctaaataaagtcaaattctttctttttccacag

SEQ ID NO: 61354 - DNA, 2365 bp, Artificial Sequence
  derived and/or modified sequence
cgggtcggtgacgtcaccgcatgactgggtttttatgaatgaaaggaatcctgtgagtgagtaattccgggaagctcgccttacaactccgcgcggcctcggccccctgcgccgcccgccccacaacaaaactcagcgcagcgctcccgggcgcccggttcagagcgacctgcggctcagagcggaggggagactgaccggagcgcggatcgggacagcggccgggacagcggcgagacgcgcgtgtgtgagcgcgccggaccaagcgggcccagaagcggatcaagcgagagctgagcgagaacacgccgcacctgtcggacgaggcgctgatggggctgtcggtgcgcgagctgaaccggcatctgcgcgggctctccgccgaggaggtgacacggctcaagcagcggcgccgcacactcaaaaaccgtggctacgccgccagctgccgcgtgaagcgcgtgtgccagaaggaggagctgcagaagcagaagtcggagctggagcgcgaggtggacaagctggcgcgcgagaacgccgccatgcgcctggagctcgacgcgctgcgcggcaagtgcgaggcgctgcagggcttcgcgcgctccgtggccgccgcccgcgggcccgccacgctcgtggcgccggccagcgtcatcaccatcgtcaagtccaccccgggctcggggtctggccccgcccacggcccggaccccgcccacggcccggcctcctgctcctagtgcccgcccccgccatgcctcagccacgcccctccggcctcagctccctccccaaagtgcctgagcgccgcctctgtgcccaggtcccatttctctgcagcactggccccttggtgcacacacattcccttcgtgggccctgtcttcctcttgcagccccccaaactgggaccgaatgaccctgggaaggggaacttgggtaggttggggatggggcagaggtctggatctgggatcgcccttggctgaaagtttagcctttttagattgagagatacagagccggcttagagaacagctgttgggggagaagagggcacccctcatcttggaaactgctcttattgtgccaatatgccctccaaaccctcccaggattcaaagctaggtttggctgtctgtgacttacgggaccgtcctgctgagaaattgcactgaagagatgcccccacctctggttgggcctgggggtgcctggccttccgaaactaaaagagtgggtgggaagactagtgaaacccagttcacggatggggaaacaggcctgaggtcacatttcacttagtggttgtgttgggaccaaaacctgggtgtcctcactgctgccctgagtccagccatggttttcagggggacagtggacagggactcagaaatgtggtgggagggcctccctggcttgggagaccgctctctgcaagggagggggagagaagcagagggagagagaaggtgacacggatggaagagtgggaaggagctggcctggctcagccctaggctgtccctgcagccagggtgtccgggggctggccagtcagagaaagggggccatggactgctgtggcaaatagggagacaaggagacagaccctgcagtcctactacagtctggagtggggtcctaagaagaagggtcccacctcaacccctgtcagtgtccactgtggggtgggggctgacccctgcctttgattgtcattctcctgggaagcccagtctcagtccctcccccaacactgtccacactgcccctccccactgtttatttattgcacggatctaagttattctccccagccagagcccgagctcctgctccctgggaaaagtggcgtatggccctgagctgggctttatattttatatctgcaaataaatcacattttatcttatatttagggaaagccggagagcaacaacaaaaaatgtttaagccgggcgcggtggctcacatctgtaatcccagcactttgggagtccaaggagggggatcgcttgagtccaggagtttgagaccagcctggacaacatggtgaaaccccatctctacaaaaaatacaaaaattagccatgcatggtggctcatgcctgtagtcccagctacttgggaggctgaggcaggaggatcacttaagcccagaaggcagaggttgtagtgagctgagatcgcaccactgcactccagcctgggcaacatagcaaaatcctgtctcaaaaaaaaagttaaaaaatattgcccggctcctagaatttatttatttcctgacttacagcaagcgagttatcgtcttctgtattttgtagactttctaaataaagtcaaattctttctttttccacag

SEQ ID NO: 61355 - DNA, 282 bp, Artificial Sequence
  derived and/or modified sequence
atgggcctgagcgtgagagagctgaacagacacctgagaggcctgagcgccgaggaggtgaccagactgaagcagagaagaagaaccctgaagaacagaggctacgccgccagctgcagagtgaagagagtgtgccagaaggaggagctgcagaagcagaagagcgagctggagagagaggtggacaagctggccagagagaacgccgccatgagactggagctggacgccctgagaggcaagtgcgaggccctgcagggcttcgccagaagcgtggcctag

SEQ ID NO: 61356 - DNA, 408 bp, Artificial Sequence
  derived and/or modified sequence
atgggcctgagcgtgagagagctgaacagacacctgagaggcctgagcgccgaggaggtgaccagactgaagcagagaagaagaaccctgaagaacagaggctacgccgccagctgcagagtgaagagagtgtgccagaaggaggagctgcagaagcagaagagcgagctggagagagaggtggacaagctggccagagagaacgccgccatgagactggagctggacgccctgagaggcaagtgcgaggccctgcagggcttcgccagaagcgtggccgccgccagaggccccgccaccctggtggcccccgccagcgtgatcaccatcgtgaagagcacccccggcagcggcagcggccccgcccacggccccgaccccgcccacggccccgccagctgcagctag

SEQ ID NO: 61357 - DNA, 282 bp, Artificial Sequence
  derived and/or modified sequence
atgggtctaagcgtccgggaactgaacaggcacttgcgcggcctatctgcggaggaagtcactaggctgaagcagaggcgtagaactctcaaaaaccgggggtatgccgcaagttgtcgcgtgaaacgagtgtgccaaaaagaagagctgcaaaaacaaaagtccgagctcgaacgtgaagtcgacaagttagccagggagaacgctgccatgcgactcgagctggacgcactacgcgggaagtgcgaagcacttcagggcttcgccagatcagttgcatag

SEQ ID NO: 61358 - DNA, 408 bp, Artificial Sequence
  derived and/or modified sequence
atgggcctctctgtgagagaactaaatcgacacttgaggggcctctcggcagaggaggtgacgcgcctgaaacagagacgccggacccttaaaaatcgtgggtacgccgcgtcatgtagggtcaaaagggtttgccagaaagaggagcttcagaaacagaaatctgaactggagcgtgaagtcgacaaactcgcgcgggaaaacgcggcaatgagactggaattggatgctctccggggaaagtgcgaagcgctgcaggggtttgcaagatccgtggccgccgcacggggacccgccactctcgtcgctcccgcttctgtgatcacaatcgtcaagagcacccctggaagcggctccggccctgctcacggtcccgatcctgctcatggccctgcctcatgctcatag

SEQ ID NO: 61359 - DNA, 282 bp, Artificial Sequence
  derived and/or modified sequence
atgggcctgtctgtgcgggagctgaacagacacctgcggggcctgtctgctgaggaggtgacccggctgaagcagaggaggaggaccctgaagaacagaggctacgccgccagctgccgggtgaagagggtgtgccagaaggaggagctgcagaagcagaagtctgagctggagcgggaggtggacaagctggccagagaaaatgctgccatgaggctggagctggatgccctgcggggcaaatgtgaggccctgcagggctttgcccggtctgtggcctag

SEQ ID NO: 61360 - DNA, 408 bp, Artificial Sequence
  derived and/or modified sequence
atgggcctgtctgtgcgggagctgaacagacacctgcggggcctgtctgctgaggaggtgacccggctgaagcagaggaggaggaccctgaagaacagaggctacgccgccagctgccgggtgaagagggtgtgccagaaggaggagctgcagaagcagaagtctgagctggagcgggaggtggacaagctggccagagaaaatgctgccatgaggctggagctggatgccctgcggggcaaatgtgaggccctgcagggctttgcccggtctgtggccgccgcccggggccctgccaccctggtggccccagccagcgtcatcaccatcgtgaagagcaccccaggcagcggcagcggccctgcccacggccctgaccctgcccacggccctgccagctgcagctag

SEQ ID NO: 61361 - DNA, 282 bp, Artificial Sequence
  derived and/or modified sequence
atgggcctgagcgtgcgggagctgaaccggcacctgcggggcctgtccgcagaggaagtcacaaggctgaaacagaggaggcgcacacttaagaatagggggtacgccgcctcttgtcgcgtcaagagggtctgtcagaaggaggaactgcaaaagcagaaaagtgaactggagagagaggtggataaactggcccgcgaaaatgcggccatgagactggagctcgatgcactgaggggaaaatgtgaggcgctgcagggcttcgctcgatctgtcgcttag

SEQ ID NO: 61362 - DNA, 408 bp, Artificial Sequence
  derived and/or modified sequence
atgggcctgagcgtgcgggagctgaaccggcacctgcggggcctgagcgccgaagaggtgactcgcctaaaacagaggaggaggacccttaagaaccgggggtacgctgccagctgtcgagtcaagagagtgtgtcaaaaggaggaacttcagaaacaaaaaagcgaactggagagggaggttgacaagcttgctagagaaaatgctgcaatgcgtttggagctggacgctctacggggtaagtgtgaggcccttcagggcttcgctcgatctgtggcagcagctagggggcctgcgactctggtggccccggcctcggtgatcacgattgtgaagtccacacctggaagcggcagcggacccgcgcatggcccagaccctgcacacggtccggcatcttgttcctag

SEQ ID NO: 61363 - DNA, 282 bp, Artificial Sequence
  derived and/or modified sequence
atgggcctgtccgtgcgcgagttgaaccgacacctaagaggtctgtctgccgaagaggtcacccgacttaagcagcgcaggagaactctcaagaatcggggatacgccgcttcgtgtcgcgtgaaacgggtgtgccagaaggaagagttgcagaagcagaagtctgaactcgagcgcgaggtcgataagctcgccagagagaacgctgcaatgcgcttagagttggacgcactcaggggcaagtgcgaagcactgcagggcttcgccagatccgtggcctag

SEQ ID NO: 61364 - DNA, 408 bp, Artificial Sequence
  derived and/or modified sequence
atggggctctccgttagagagctcaacaggcatcttcgcggactcagtgcggaggaagttacacgtttgaagcagcgtcgccgaaccctgaagaaccgtggttacgccgcatcctgccgagtgaagagggtgtgtcagaaggaagagctccaaaagcaaaaaagtgagttagagcgggaagtggacaagctcgcaagagagaatgccgcaatgagactagaactggatgcccttagagggaagtgcgaggctttgcagggcttcgctcggagcgtggcagcagcacgtgggcctgcaacccttgtcgcccctgccagcgtgattaccatagtaaagagcacgcctggttcagggagcggcccagcgcatggacccgaccccgcacacggcccagcctcttgctcatag

SEQ ID NO: 61365 - protein, 629 aa, Artificial Sequence
  derived and/or modified sequence
MFRDQVGVLAGWFKGWNECEQTVALLSLLKRVSQTQARFLQLCLEHSLADCAELHVLEREANSPGIINQWQQESKDKVISLLLTHLPLLKPGNLDAKVEYMKLLPKILAHSIEHNQHIEESRQLLSYALIHPATSLEDRSALAMWLNHLEDRTSTSFGGQNRGRSDSVDYGQTHYYHQRQNSDDKLNGWQNSRDSGICINASNWQDKSMGCENGHVPLYSSSSVPTTINTIGTSTSTNVPAWLKSLRLHKYAALFSQMTYEEMMALTECQLEAQNVTKGARHKIVISIQKLKERQNLLKSLERDIIEGGSLRIPLQELHQMILTPIKAYSSPSTTPEARRREPQAPRQPSLMGPESQSPDCKDGAAATGATATPSAGASGGLQPHQLSSCDGELAVAPLPEGDLPGQFTRVMGKVCTQLLVSRPDEENISSYLQLIDKCLIHEAFTETQKKRLLSWKQQVQKLFRSFPRKTLLDISGYRQQRNRGFGQSNSLPTAGSVGGGMGRRNPRQYQIPSRNVPSARLGLLGTSGFVSSNQRNTTATPTIMKQGRQNLWFANPGGSNSMPSRTHSSVQRTRSLPVHTSPQNMLMFQQPEFQLPVTEPDINNRLESLCLSMTEHALGDGVDRTSTI

SEQ ID NO: 61366 - protein, 630 aa, Artificial Sequence
  derived and/or modified sequence
MMFRDQVGVLAGWFKGWNECEQTVALLSLLKRVSQTQARFLQLCLEHSLADCAELHVLEREANSPGIINQWQQESKDKVISLLLTHLPLLKPGNLDAKVEYMKLLPKILAHSIEHNQHIEESRQLLSYALIHPATSLEDRSALAMWLNHLEDRTSTSFGGQNRGRSDSVDYGQTHYYHQRQNSDDKLNGWQNSRDSGICINASNWQDKSMGCENGHVPLYSSSSVPTTINTIGTSTSTNVPAWLKSLRLHKYAALFSQMTYEEMMALTECQLEAQNVTKGARHKIVISIQKLKERQNLLKSLERDIIEGGSLRIPLQELHQMILTPIKAYSSPSTTPEARRREPQAPRQPSLMGPESQSPDCKDGAAATGATATPSAGASGGLQPHQLSSCDGELAVAPLPEGDLPGQFTRVMGKVCTQLLVSRPDEENISSYLQLIDKCLIHEAFTETQKKRLLSWKQQVQKLFRSFPRKTLLDISGYRQQRNRGFGQSNSLPTAGSVGGGMGRRNPRQYQIPSRNVPSARLGLLGTSGFVSSNQRNTTATPTIMKQGRQNLWFANPGGSNSMPSRTHSSVQRTRSLPVHTSPQNMLMFQQPEFQLPVTEPDINNRLESLCLSMTEHALGDGVDRTSTI

SEQ ID NO: 61367 - DNA, 1890 bp, Artificial Sequence
  derived and/or modified sequence
atgttcagagaccaggtgggcgtgctggccggctggttcaagggctggaacgagtgcgagcagaccgtggccctgctgagcctgctgaagagagtgagccagacccaggccagattcctgcagctgtgcctggagcacagcctggccgactgcgccgagctgcacgtgctggagagagaggccaacagccccggcatcatcaaccagtggcagcaggagagcaaggacaaggtgatcagcctgctgctgacccacctgcccctgctgaagcccggcaacctggacgccaaggtggagtacatgaagctgctgcccaagatcctggcccacagcatcgagcacaaccagcacatcgaggagagcagacagctgctgagctacgccctgatccaccccgccaccagcctggaggacagaagcgccctggccatgtggctgaaccacctggaggacagaaccagcaccagcttcggcggccagaacagaggcagaagcgacagcgtggactacggccagacccactactaccaccagagacagaacagcgacgacaagctgaacggctggcagaacagcagagacagcggcatctgcatcaacgccagcaactggcaggacaagagcatgggctgcgagaacggccacgtgcccctgtacagcagcagcagcgtgcccaccaccatcaacaccatcggcaccagcaccagcaccaacgtgcccgcctggctgaagagcctgagactgcacaagtacgccgccctgttcagccagatgacctacgaggagatgatggccctgaccgagtgccagctggaggcccagaacgtgaccaagggcgccagacacaagatcgtgatcagcatccagaagctgaaggagagacagaacctgctgaagagcctggagagagacatcatcgagggcggcagcctgagaatccccctgcaggagctgcaccagatgatcctgacccccatcaaggcctacagcagccccagcaccacccccgaggccagaagaagagagccccaggcccccagacagcccagcctgatgggccccgagagccagagccccgactgcaaggacggcgccgccgccaccggcgccaccgccacccccagcgccggcgccagcggcggcctgcagccccaccagctgagcagctgcgacggcgagctggccgtggcccccctgcccgagggcgacctgcccggccagttcaccagagtgatgggcaaggtgtgcacccagctgctggtgagcagacccgacgaggagaacatcagcagctacctgcagctgatcgacaagtgcctgatccacgaggccttcaccgagacccagaagaagagactgctgagctggaagcagcaggtgcagaagctgttcagaagcttccccagaaagaccctgctggacatcagcggctacagacagcagagaaacagaggcttcggccagagcaacagcctgcccaccgccggcagcgtgggcggcggcatgggcagaagaaaccccagacagtaccagatccccagcagaaacgtgcccagcgccagactgggcctgctgggcaccagcggcttcgtgagcagcaaccagagaaacaccaccgccacccccaccatcatgaagcagggcagacagaacctgtggttcgccaaccccggcggcagcaacagcatgcccagcagaacccacagcagcgtgcagagaaccagaagcctgcccgtgcacaccagcccccagaacatgctgatgttccagcagcccgagttccagctgcccgtgaccgagcccgacatcaacaacagactggagagcctgtgcctgagcatgaccgagcacgccctgggcgacggcgtggacagaaccagcaccatctag

SEQ ID NO: 61368 - DNA, 1893 bp, Artificial Sequence
  derived and/or modified sequence
atgatgttcagagaccaggtgggcgtgctggccggctggttcaagggctggaacgagtgcgagcagaccgtggccctgctgagcctgctgaagagagtgagccagacccaggccagattcctgcagctgtgcctggagcacagcctggccgactgcgccgagctgcacgtgctggagagagaggccaacagccccggcatcatcaaccagtggcagcaggagagcaaggacaaggtgatcagcctgctgctgacccacctgcccctgctgaagcccggcaacctggacgccaaggtggagtacatgaagctgctgcccaagatcctggcccacagcatcgagcacaaccagcacatcgaggagagcagacagctgctgagctacgccctgatccaccccgccaccagcctggaggacagaagcgccctggccatgtggctgaaccacctggaggacagaaccagcaccagcttcggcggccagaacagaggcagaagcgacagcgtggactacggccagacccactactaccaccagagacagaacagcgacgacaagctgaacggctggcagaacagcagagacagcggcatctgcatcaacgccagcaactggcaggacaagagcatgggctgcgagaacggccacgtgcccctgtacagcagcagcagcgtgcccaccaccatcaacaccatcggcaccagcaccagcaccaacgtgcccgcctggctgaagagcctgagactgcacaagtacgccgccctgttcagccagatgacctacgaggagatgatggccctgaccgagtgccagctggaggcccagaacgtgaccaagggcgccagacacaagatcgtgatcagcatccagaagctgaaggagagacagaacctgctgaagagcctggagagagacatcatcgagggcggcagcctgagaatccccctgcaggagctgcaccagatgatcctgacccccatcaaggcctacagcagccccagcaccacccccgaggccagaagaagagagccccaggcccccagacagcccagcctgatgggccccgagagccagagccccgactgcaaggacggcgccgccgccaccggcgccaccgccacccccagcgccggcgccagcggcggcctgcagccccaccagctgagcagctgcgacggcgagctggccgtggcccccctgcccgagggcgacctgcccggccagttcaccagagtgatgggcaaggtgtgcacccagctgctggtgagcagacccgacgaggagaacatcagcagctacctgcagctgatcgacaagtgcctgatccacgaggccttcaccgagacccagaagaagagactgctgagctggaagcagcaggtgcagaagctgttcagaagcttccccagaaagaccctgctggacatcagcggctacagacagcagagaaacagaggcttcggccagagcaacagcctgcccaccgccggcagcgtgggcggcggcatgggcagaagaaaccccagacagtaccagatccccagcagaaacgtgcccagcgccagactgggcctgctgggcaccagcggcttcgtgagcagcaaccagagaaacaccaccgccacccccaccatcatgaagcagggcagacagaacctgtggttcgccaaccccggcggcagcaacagcatgcccagcagaacccacagcagcgtgcagagaaccagaagcctgcccgtgcacaccagcccccagaacatgctgatgttccagcagcccgagttccagctgcccgtgaccgagcccgacatcaacaacagactggagagcctgtgcctgagcatgaccgagcacgccctgggcgacggcgtggacagaaccagcaccatctag

SEQ ID NO: 61369 - DNA, 1890 bp, Artificial Sequence
  derived and/or modified sequence
atgttcagagatcaagtcggcgtgttggcagggtggtttaaggggtggaacgagtgtgagcagactgtcgcgctcctttcactcttgaagcgcgtgagccagacccaggctcgctttcttcagctctgcctggaacattccttagcagattgtgctgagctccacgtgctggaacgcgaggctaattccccaggtataatcaaccagtggcaacaggagtcaaaggataaggtcatctcactgttgctgacacacttgcctttgctgaagcctggaaacctggatgcaaaggtcgaatatatgaaattgttgccaaagatattggctcacagtatcgagcataaccaacacatagaagagtctaggcaactcctttcttacgcgctgatccatccagccacctctttagaggacagatctgctctggctatgtggttaaatcatttagaggatcgaacgtcaactagttttggagggcagaaccgcggacggtccgacagcgtggattatggccagacacattattatcatcagcgacaaaactccgatgacaaattgaacggctggcagaatagccgagattctgggatttgcatcaacgcctcaaattggcaagacaaaagcatgggatgtgaaaatgggcatgtgccgctgtacagcagctcgtcggtccccacaactattaataccatagggacttctacttctacgaacgtgcccgcatggcttaagtcactccgcctccataagtatgccgcccttttctcacagatgacctatgaggagatgatggccttaacagaatgtcaattggaagctcagaacgtgactaaaggggctcgccacaagattgtgattagtatccaaaaactcaaagaaaggcaaaatttgcttaagagcctggagagggacatcatcgagggtggcagcctaagaattcccctgcaggaattgcaccagatgatcctgaccccgattaaagcatactcatctccgtctactacccctgaagctcggaggagggaacctcaagctccacgacagccttcccttatgggacctgaaagccaaagcccagattgtaaagatggggccgccgccaccggagctaccgccacacccagcgcaggggccagtgggggcttgcagccgcaccaactgtcatcctgcgatggcgaattagctgtggcgcccctgcccgagggggacctgcctggacaatttacccgcgtgatgggcaaggtgtgtacccaactactggtttccagaccagatgaagaaaacatcagctcgtacctgcagctcatagacaaatgcttgatccacgaagctttcaccgaaacccagaagaagcggctcctgagctggaagcagcaagttcaaaagctgtttcggagtttcccccgcaagacactgttggacattagcggatacagacagcaaaggaatcggggctttggccaaagtaattccctccctactgccgggagtgtgggcggaggaatgggcaggagaaacccaagacagtaccagataccctctaggaatgttccatcagccaggctgggactgctcggcacctccggtttcgtctcatccaaccaaaggaatacaacggccactccaaccatcatgaaacagggccggcagaacctgtggttcgccaatcccggaggtagcaactccatgcctagcaggactcattcctctgtgcagaggacccggagcctccctgtccacactagcccccaaaatatgctgatgtttcagcaacccgaatttcagctgcccgttaccgagccagacatcaataatcgattggagtcactgtgtctctcaatgactgaacacgccttgggtgacggcgtggatcgcaccagcaccatttag

SEQ ID NO: 61370 - DNA, 1893 bp, Artificial Sequence
  derived and/or modified sequence
atgatgtttcgggaccaggttggggttcttgcggggtggtttaagggatggaacgagtgtgagcagacagttgcactgctctcactacttaagagagttagccagacccaggcccggtttctccagctttgtttagaacactccttagcagactgtgcagagctgcacgtgctcgaaagagaagcaaattctccaggcattatcaatcaatggcaacaggaatccaaagacaaggtgatttcactccttctcactcatttgcctctacttaaacccggcaacctcgatgccaaagtggagtacatgaaattactgccaaagatcttagcccattccattgagcacaaccagcacatagaggagtccagacagctactgtcttacgccctgatccaccccgcaacgtcacttgaggatcggagtgcattggccatgtggctgaatcatctcgaagacaggacctctacttcgttcggtggacagaatcgggggcgctcagactcagtggattacggccagactcattactaccatcagcgtcagaattcagacgataaactcaatggctggcagaactccagagattcagggatttgcatcaatgcctccaattggcaagacaaaagtatggggtgtgaaaatggccatgtgcctttatatagttcatcttcggtgccaaccactattaatacaattgggacctcaacctccacaaacgtgccagcctggctcaagagcttaagacttcacaaatatgccgccctcttttctcagatgacgtatgaggaaatgatggccctcaccgaatgtcaactggaggcacagaatgtaactaagggagccagacataagatagtgatctccattcagaagctcaaggaaaggcagaatctcttgaaaagtctagagcgtgatataatcgaaggggggagcctgcgcatccccttgcaggagctgcatcaaatgattctgactccgattaaagcctattctagcccgagtaccactccagaggcccggcgccgcgagccgcaggcccccagacaacctagccttatggggccagagagccagtctcccgactgcaaagatggtgcagctgccactggtgctactgccaccccatccgctggggcatcaggagggctgcaaccccatcagctgagtagttgcgacggggagctcgcggtggcaccgttaccggaaggggacttgcccgggcagtttactagggtcatgggtaaggtctgcactcagctcctggtgtcccgacctgacgaagagaacattagttcatatctccaactgattgacaagtgtctcatacacgaggcgtttaccgaaacccagaagaaaagactcttgtcctggaaacagcaggtgcagaaactgtttcgctccttcccccgtaaaactctgctggacatctcaggatatcgacagcagaggaaccgcggtttcggacagtctaacagtcttcccaccgccggttcggtaggaggcggtatgggcagacggaaccctcgacagtatcagatcccatctaggaacgtgccttccgccagactgggcttgctggggacttcaggcttcgtgtccagtaatcagcggaatactacagcaacaccaactataatgaaacaaggtcgccagaacctctggtttgctaacccaggaggcagtaatagcatgccctcccgcacacacagtagtgtgcagcggacaaggtctctacctgtacacacctcccctcagaatatgcttatgtttcagcagccggagttccagctccccgtgacagagccagacatcaataatcgactggagtctctctgcctgtctatgactgagcatgctctcggcgacggtgtagaccgcacctctactatctag

SEQ ID NO: 61371 - DNA, 1890 bp, Artificial Sequence
  derived and/or modified sequence
atgttccgggaccaggtgggcgtgctggccggctggttcaagggctggaatgaatgtgagcagacagtggccctgctgagcctgctgaagagggtgtcccagacccaggcccgcttcctgcagctgtgcctggagcacagcctggccgactgtgccgagctgcacgtgctggagcgggaggccaacagccctggcatcatcaaccagtggcagcaggagagcaaggacaaggtgatcagcctgctgctgacccacctgcccctgctgaagccaggcaacctggatgccaaggtggagtacatgaagctgctgcccaagatcctggcccacagcattgagcacaaccagcacatcgaggagagccggcagctgctgtcctatgccctgatccacccagccaccagcctggaggacagaagtgccctggccatgtggctgaaccacctggaggacaggaccagcaccagctttggaggccagaacagaggccgcagtgacagcgtggactatggccagacccactactaccaccagaggcagaacagtgatgacaagctgaatggctggcagaacagccgggacagcggcatctgcatcaatgccagcaactggcaggacaagtccatgggctgtgaaaatggacatgtgcccctgtacagcagcagctctgtgcccaccaccatcaacaccatcggcaccagcaccagcaccaacgtgcctgcctggctgaagagcctgcggctgcacaagtatgctgccctcttcagccagatgacctatgaggagatgatggccctgacagagtgccagctggaggcccagaatgtgaccaagggggcccggcacaagatcgtcatcagcatccagaagctgaaggagcggcagaacctgctgaagagcctggagcgggacatcatcgagggcggcagcctgcgcatccccctgcaggagctgcaccagatgatcctgacccccatcaaggcctacagcagccccagcaccaccccagaggcccggcggcgggagccccaggccccccggcagcccagcctgatgggccctgagagccagagcccagactgcaaggatggagctgctgccaccggggccacagccaccccatctgctggggccagcggcggcctgcagccccaccagctgagcagctgtgatggagagctggccgtggcccccctgcctgagggggacctgcccggccagttcaccagggtgatgggcaaggtgtgcacccagctgctggtgtccaggccagatgaggagaacatcagcagctacctgcagctgattgacaagtgcctgatccacgaggccttcacagagacccagaagaagaggctgctgtcctggaagcagcaggtgcagaagctgttccgctccttccccaggaagaccctgctggacatcagcggctaccggcagcagaggaacagaggcttcggccagagcaacagcctgcccacagctggctctgtgggcggcggcatgggcagaagaaacccccggcagtaccagatccccagcagaaatgtgcccagcgcccggctgggcctgctgggcaccagcggctttgtgagcagcaaccagaggaacaccacagccacccccaccatcatgaagcagggccggcagaacctgtggtttgccaaccctgggggcagcaacagcatgcccagcaggacccacagctctgtgcagaggaccaggagcctgcctgtgcacaccagcccccagaacatgctgatgttccagcagcctgagttccagctgcctgtgacagagccagacatcaacaaccggctggagagcctgtgcctgtccatgacagaacatgccctgggagatggagtggacaggaccagcaccatctag

SEQ ID NO: 61372 - DNA, 1893 bp, Artificial Sequence
  derived and/or modified sequence
atgatgttccgggaccaggtgggcgtgctggccggctggttcaagggctggaatgaatgtgagcagacagtggccctgctgagcctgctgaagagggtgtcccagacccaggcccgcttcctgcagctgtgcctggagcacagcctggccgactgtgccgagctgcacgtgctggagcgggaggccaacagccctggcatcatcaaccagtggcagcaggagagcaaggacaaggtgatcagcctgctgctgacccacctgcccctgctgaagccaggcaacctggatgccaaggtggagtacatgaagctgctgcccaagatcctggcccacagcattgagcacaaccagcacatcgaggagagccggcagctgctgtcctatgccctgatccacccagccaccagcctggaggacagaagtgccctggccatgtggctgaaccacctggaggacaggaccagcaccagctttggaggccagaacagaggccgcagtgacagcgtggactatggccagacccactactaccaccagaggcagaacagtgatgacaagctgaatggctggcagaacagccgggacagcggcatctgcatcaatgccagcaactggcaggacaagtccatgggctgtgaaaatggccacgtgcccctgtacagcagcagctctgtgcccaccaccatcaacaccatcggcaccagcaccagcaccaacgtgcctgcctggctgaagagcctgcggctgcacaagtatgctgccctcttcagccagatgacctatgaggagatgatggccctgacagagtgccagctggaggcccagaatgtgaccaagggggcccggcacaagatcgtcatcagcatccagaagctgaaggagcggcagaacctgctgaagagcctggagcgggacatcattgaaggaggcagcctgcgcatccccctgcaggagctgcaccagatgatcctgacccccatcaaggcctacagcagccccagcaccaccccagaggccaggagaagagagccccaggccccccggcagcccagcctgatgggccctgagagccagagcccagactgcaaggatggagctgctgccactggagccacagccacccccagcgctggggccagcggcggcctgcagccccaccagctgagcagctgtgatggagagctggccgtggcccccctgcctgagggggacctgcccggccagttcaccagggtgatgggcaaggtgtgcacccagctgctggtgtccaggccagatgaggagaacatcagcagctacctgcagctgattgacaagtgcctgattcatgaggccttcacagagacccagaagaagaggctgctgtcctggaagcagcaggtgcagaagctgttccgctccttccccaggaagaccctgctggacatcagcggctaccggcagcagaggaacagaggatttggccagagcaacagcctgcccacagctggctctgtgggcggcggcatgggcagaagaaacccccggcagtaccagatccccagcagaaatgtgcccagcgcccggctgggcctgctgggcaccagcggctttgtgagcagcaaccagaggaacaccacagccacccccaccatcatgaagcagggccggcagaacctgtggtttgccaaccctgggggcagcaacagcatgcccagcaggacccacagctctgtgcagaggaccaggagcctgcctgtgcacaccagcccccagaacatgctgatgttccagcagcctgagttccagctgcctgtgacagagccagacatcaacaaccggctggagagcctgtgcctgtccatgacagagcacgccctgggagatggagtggacaggaccagcaccatctag

SEQ ID NO: 61373 - DNA, 1890 bp, Artificial Sequence
  derived and/or modified sequence
atgttccgggaccaggtgggcgtgctggccggctggttcaagggctggaacgagtgcgaacagacagtcgctcttctctccttgctcaaacgcgtgtctcaaacacaagcacgctttttgcagctctgtttggagcactcgctggccgattgtgctgagcttcatgtgctcgagagagaggccaattcccccggcattatcaaccaatggcaacaggagtcgaaagacaaggtgatatccctgctcctaacccaccttccattgctgaagccaggaaacctcgacgctaaagtggagtacatgaagttattacccaaaatcttggcccattccattgaacataatcagcatatagaggagtcaagacagctgcttagttatgcattgatccatcccgccacttccctggaagacaggtccgccctggctatgtggttaaaccatttagaggataggacatcgacgagctttggaggtcaaaaccgggggagaagcgacagcgtagactacggacagacacattattatcaccagagacagaattcagacgataagctgaatgggtggcagaactcacgggattcaggtatttgtatcaatgccagcaattggcaggacaaatctatgggatgtgaaaatggtcacgtgcctctgtactcgtcctcttcggtccccaccactatcaacactattggaacttcaacgtccacgaatgtgcccgcctggctcaaatcactcagactccacaaatatgccgctctttttagtcaaatgacctacgaagaaatgatggctcttacagaatgccagttagaggcccaaaatgtgacaaagggcgctcgtcataagatcgtcatctctatccagaaactaaaggaacggcagaatcttctcaagtcactggagcgcgatataatcgagggtggctccttacgtatccctctccaggaactgcatcagatgattctgacgccgattaaagcctatagcagtccatccaccaccccagaggccaggcggcgagagccgcaggctccccgccaaccctccctgatgggcccagaatctcagagccctgactgcaaagatggagccgctgcaaccggggccacggcaactcctagcgcaggagcaagtggcgggctgcagcctcaccaattatcatcatgcgacggcgagcttgcagttgcacctcttcccgagggagatctccccggccagttcacacgggttatgggcaaggtgtgtacccagcttcttgtgtcccgaccagacgaggagaatattagctcctatctacagctgatcgacaaatgtcttattcacgaagccttcacggagactcagaaaaagcgtctgctttcgtggaagcagcaggtccagaaattattccgatcatttcctaggaagacactgcttgacatctccggctacagacaacagagaaaccgaggcttcggccagtcaaattccctacctacggcaggttcagtgggaggcgggatggggcgacgaaaccccagacaataccagataccaagtcgtaatgtcccctcagcacggctggggctgctcggaacatctggattcgtaagctcaaaccaaagaaacactactgccacgcctacaataatgaaacagggacgtcagaatctgtggtttgctaatcccggcgggtctaactccatgccatcaagaacgcacagctcagtgcaacgtacaaggagtctgccagtgcacacatccccccaaaatatgctaatgtttcagcagccagagtttcagctgccggtgactgagcccgatatcaataatcgattggaatcactttgtttgtcgatgactgaacacgccttaggcgacggagtcgatcgtacctccactatttag

SEQ ID NO: 61374 - DNA, 1893 bp, Artificial Sequence
  derived and/or modified sequence
atgatgttccgggaccaggtgggcgtgctggccggctggttcaagggttggaacgaatgtgagcagactgtagcattactgtccctgttgaagagggtatcccaaacccaggcccgatttctgcaactttgtctggaacactccctggccgattgtgctgaactgcatgttctggaacgagaggctaatagtccagggattatcaaccagtggcaacaggaaagtaaagacaaggttattagtctgttgctgacccacctgcctctgctgaagccaggtaatctggatgccaaggtcgaatatatgaagcttctgcctaaaattctcgcccatagcatagaacacaatcaacacatcgaggaaagccgacagcttttatcctatgctctgattcaccccgccaccagcctagaggaccgctctgctctggcaatgtggctgaatcacttggaggatcgtacttctacctcttttggaggacagaaccgcggcaggagtgacagtgtcgactatggtcagactcactactaccaccagaggcaaaactccgatgacaaactcaacggctggcagaatagccgtgactctggcatatgcataaatgcatccaattggcaggataagtccatgggctgcgaaaacggacacgtgcctctgtactcctcttcatctgtcccaaccaccattaacaccataggaacctcaacttccactaacgtccccgcgtggctgaagtctttacggcttcataaatacgcagccctgttttcgcagatgacctacgaggagatgatggctctaacagaatgccaactggaggcccagaatgtgacaaaaggtgccagacataaaatcgtaatttcaattcagaagctcaaggagaggcaaaacctgctcaagagtttagagagggacataattgaaggtggtagcttgcggattcctctgcaggagctgcaccagatgatccttactccaataaaggcttactcctcaccatccacaacgccggaggccaggagacgggagcctcaggcacctaggcaacctagcctgatgggaccagagtctcaatcccctgattgcaaggatggagcggcggccacaggcgcaactgctacaccaagtgccggtgcctccggtggccttcaacctcatcagctcagttcctgtgatggggaattagcagtggcccccttgccggagggggacttgccgggtcagttcaccagagtgatgggaaaggtgtgcacacaactcctcgtgagcaggccggatgaggagaacatatcatcatacctgcaactgatagataagtgtctcattcacgaagcctttaccgaaactcagaaaaaacggctgctgtcctggaagcaacaggtacagaagctgtttcggagttttccacggaaaaccttgctggatattagcgggtataggcaacagcgcaataggggattcggtcagtctaattctctacccacagcaggatcagtcgggggaggcatgggccgacgaaatcctcgacagtaccaaattccctctcgaaatgtccctagcgctaggctcggactgctcgggacatccggatttgtctcaagcaaccagcgaaacaccaccgccacgccaactatcatgaaacaggggagacagaatctttggtttgcaaacccagggggcagtaactccatgccgagccgcacacacagttccgtacagagaactcgatctcttcctgtacataccagcccacaaaacatgcttatgtttcaacaaccggagtttcagctgcctgtaacagagcccgacatcaataaccgcctcgagagcctgtgtttgagtatgaccgagcacgccctgggtgacggtgtcgatagaacttctaccatttag

SEQ ID NO: 61375 - DNA, 1890 bp, Artificial Sequence
  derived and/or modified sequence
atgtttcgggaccaggtgggtgtcctcgccggatggttcaagggttggaatgagtgcgagcagacagtggccctcctatccctcctgaaacgcgtctcccagactcaggcacgattcctccagctctgcctcgaacactctctggctgactgcgccgagctccatgtgctcgagagagaggcaaatagtccgggaatcatcaatcagtggcaacaggaaagcaaggataaggttatctcactgctactgacacacctgccattactgaagccaggcaacctcgatgcaaaagtggagtacatgaaactgctgccaaaaatccttgcgcatagcatcgagcacaatcagcatattgaagagtcacgccagttgctgagctatgctctaatacacccagccacctctctggaagataggtccgcattagctatgtggctcaaccacctggaagatagaacttctacaagcttcgggggacagaataggggaagatccgattccgtggattacggtcagacccattattatcaccaacggcagaactcagatgacaagctgaatggctggcagaactctcgagactctgggatttgcatcaatgcatccaattggcaggacaagagcatggggtgcgaaaatggccacgtgcccttatactcttcgtcatctgtgcccactacaatcaacacaatcggcacaagcacctcaacaaacgttcccgcttggctgaaatctctcaggctgcacaaatacgctgcccttttttcccagatgacatacgaggagatgatggcactgacggagtgtcagctggaggctcagaatgtgacaaagggagcgcgtcataagatcgtgataagtattcaaaagctgaaggaacgccagaatcttctgaagtctctggagcgggacattatagagggcggtagtctgcgcatccctctacaggagcttcaccaaatgatcctgactcccatcaaggcatactcatccccgagcacaacgcccgaagcacgcagacgtgagccccaggcaccgaggcaaccttctttgatgggtcccgagtctcaatcgcccgactgtaaagacggcgctgccgcaacaggcgctaccgccaccccttcggcgggagccagcggaggcttgcaacctcaccagctgagttcctgcgacggagaattagccgtcgctcctctccccgagggagatttgccgggacagtttactagagtgatgggaaaggtatgtacccagcttctggtgagcagaccagacgaagagaacatatcaagttatctccagctgattgacaagtgtctgatccacgaagccttcaccgaaacccagaagaagaggctgctctcctggaaacagcaagttcagaaactgttcagaagtttcccacggaaaacactgctcgacatttccggttaccggcagcagcgcaaccgagggtttggccagtctaacagcctgcctaccgctggctcggtgggaggtgggatggggcgtcgaaaccccaggcaatatcagatacccagcaggaacgtcccttctgcacggttgggcctcctgggcacgagcggtttcgtaagttccaaccagagaaatacgacagcaactcctactataatgaagcagggcagacaaaatctgtggtttgcgaatcccggtggcagtaatagtatgcctagtcggactcactcatccgtgcagcgtacccgcagcctgcctgtccatacttcaccacaaaatatgctaatgtttcagcagcccgaattccaactccctgtcaccgaaccagacataaacaataggctggagagcctgtgcctgagtatgaccgagcatgccctcggtgatggcgtggacaggacgagtacaatctag

SEQ ID NO: 61376 - DNA, 1893 bp, Artificial Sequence
  derived and/or modified sequence
atgatgtttagagaccaggtgggcgtgctggccggatggtttaaggggtggaacgagtgcgaacagactgtcgctctgctttcattgttgaagagagttagtcagacccaggctcggttcctgcagttgtgcctcgagcacagcctggccgattgtgcagaactgcatgtgttggagcgcgaggcaaactctcccggtatcattaaccagtggcagcaggaaagtaaggataaagttattagcctcctcctgactcacctccctttgcttaagccgggaaatctcgatgccaaagtagagtacatgaagctcctcccaaagattctagcgcacagtatcgaacacaaccagcacatagaggagtcaagacagctattgtcatatgcgctgatacatcccgctacctcgctcgaagatagatctgccctggcgatgtggcttaaccacctggaggacagaacctctacgtcgttcggcggacagaaccggggtcgaagcgactcagtcgactatggccagacccactattatcatcagcggcagaacagcgatgataagcttaatggatggcagaattcccgagactccgggatctgtataaatgcatccaattggcaggacaaatctatgggttgcgaaaatgggcatgttcccctgtacagctcttcgtccgtcccaaccaccatcaacaccattggcacttcaacaagcacaaacgtgcctgcttggctgaagtcactgaggcttcataaatatgccgctttgttctctcaaatgacatatgaggagatgatggctctcaccgaatgtcagctcgaggcccagaatgtaaccaaaggggctagacacaagattgtgatttctatccagaaactcaaagaaagacaaaacctgctgaagtccttagaacgagatattattgaaggcggatctcttcggataccattacaggaactgcaccagatgattctgacccccattaaggcttattcatctccctccactacacccgaggctaggagaagagaaccccaagctccaagacagcctagtcttatgggtcccgagtctcaatcgcccgattgtaaagatggcgctgcagccaccggcgctaccgccaccccatccgctggtgcgtctggaggattgcagccccaccaattatccagctgtgacggtgagctggcagtagcgcctctgcccgagggcgacctgcccggtcaatttacccgtgtgatgggaaaggtttgtactcaactcctcgtttcacgcccagacgaggaaaacatatcgtcatacctacagctcatcgacaaatgcttgattcatgaggcttttaccgagacacagaaaaaaagactcctctcttggaaacagcaggtccagaagttgtttcggagtttcccccgaaagacattgctcgatattagcggataccggcagcaaagaaatcgtggatttgggcagagtaatagcctgccaaccgctggctcagtcgggggagggatggggcgtcggaaccccagacagtaccaaatacccagtcgtaatgtgccttcggcacgcctcggtttgctggggaccagcggattcgtgtcaagcaaccagaggaacaccacggcgacccccacgattatgaaacagggacggcagaatctgtggttcgcgaatccagggggaagtaactccatgcctagcaggacacacagcagcgtccagagaacacgctcactgcctgtacatacctccccacaaaacatgctgatgtttcagcagccggagttccaattacctgtcaccgagccagacatcaacaaccggttggagtccctctgcctgtctatgaccgagcatgccctaggtgacggtgtggatcgcacaagtacgatttag

SEQ ID NO: 61377 - DNA, 6258 bp, Artificial Sequence
  derived and/or modified sequence
gatgtttcgcgaccaggtcggggtgctggcgggctggtttaagggctggaacgagtgcgagcagactgttgcgctgctgtcgctgctcaagcgcgtgagccagacccaggcccgcttcctccagctctgcctggagcactcgctggccgactgcgccgagctgcacgtcctcgaacgcgaggccaacagccccggaatcattaaccaatggcaacaggaatccaaggataaagtgatttccctcctgttaactcatctgcctttgctgaagccaggaaacctcgacgcgaaagtagaatatatgaaactgctgcccaaaatcctggctcactctattgaacacaaccagcacattgaggagagcaggcagctgctgtcctatgctttgatacatccagccacttcgttagaagaccgtagtgctttagccatgtggctgaatcacttggaggaccgcacgtcgaccagctttggtggccagaaccgaggccgctcagactctgtggattatggacagacacactactatcaccaaagacagaactctgatgacaagctcaatgggtggcagaactctcgggattctgggatttgcatcaatgcctccaactggcaggacaaaagcatggggtgtgagaatggccatgtgcccctctactcctcctcatctgtccccaccacaatcaatacgattggaaccagcacaagtacaaatgttccagcctggctgaaaagcctccgcctgcacaaatatgccgcgcttttctcccagatgacctatgaggagatgatggccctcaccgagtgccagctggaggcgcagaatgttaccaaaggtgcaagacacaaaattgtcatcagtattcagaagctcaaagaaagacaaaatctcctgaagtctttggaaagggacatcatcgaggggggcagcctgcgcatcccgctccaggaactgcaccagatgatcctgactccgatcaaggcctacagctccccgagcaccacccccgaggctcgccgccgggagccccaggccccgcgtcagccctcactgatgggccccgagagccagagccccgactgcaaagatggggccgcagccactggcgccacggccaccccctcggccggggccagcggggggctccagccgcaccagctgagcagctgcgatggggagctggccgtcgcccccctgccagagggggacctccccgggcagttcacacgcgtcatggggaaagtgtgcacacagctcttggtctccagacctgatgaggaaaatataagttcctatttacagctcatagacaagtgtctaattcatgaggcatttacagagacacagaaaaaaagattgttgtcatggaaacagcaggtgcagaagctctttcggtctttccctcggaaaacccttctagacatatcaggatatcgacagcaaagaaatcgaggctttgggcaatccaactccctcccgacggctggctctgtgggcggtggcatgggcagacggaacccgcgccagtaccagatcccctctcggaacgtcccttccgcccgcctgggcctcttgggcaccagtggattcgtcagctccaaccagcgcaacaccacagctacccccaccatcatgaaacaaggaagacagaacctgtggtttgccaaccccgggggcagcaatagcatgccaagccgcacccacagctcagtccagaggacccgctcgctgcccgtgcacacttccccacagaacatgctgatgttccagcagccagaattccagcttcccgtgaccgaacctgacatcaacaacaggctggagtcgttgtgcctcagtatgaccgaacacgccctgggagacggggttgaccggacctccaccatctagaagctgaagacgagagtgaccgcgctggccgtgaaatcgactgctgcgggtccagtgtccgccatcttcagggttgcacagaatcctccaagatactttgcagccttttttccccctggtccctctcccgttttgattttgtgagagcgtaggtcatcctcgtaaacatatcagtagacctggggttggttattttgtcatttgtttctgtcatgggatggtttggtgtgtggggtggggaggggtctctagggaattatgagactgggaggggggtggagggaatgcaggtagctctctggatggaacggggacaggggaaagagtactgccatgaaagagataggagacacataagaggacagcagaagccctggccctggggaggcttctcggaaggcctggcttcacaggcaggccacagaaggatatcgcgggcacgtgcacccaaagcaagatagtggcttcccttttatatccaatctaatcctgattggatgtccctgaggcccctgctggaaacagccataggagagggcccatggcagtaggggaaagaaggaagaaattccctgcaacaaaacttcagctaaactttgatttgtgtattgtttacataataattttaaagggtacataatgtgtaaagagtttggatagaacctctcttcatactatggttttcgtaaaggatctgttgttgttacggattcattttttccctctatttttataagagcagcagagttgtcttctcaaaacggctgccaagctctgcttcttgggaagatggatgcagtcatgtaggcctgagctgtccgtctttcaccgttaggtgggaggagcgtatgggtggacttgaaggacatggacgtggctggaatgagcacagcattgggtgagcgcacaaggatgaggacatcatgtgatcagttatgggtttgctcgcagggcacccagagattctcaaagaatcctgcagcctctttctgtgctggatttgcttgtcacggagaggcctccctccctttccaccccacccatggggcattatcctgtcactcccagccttgctccacacacacacaggtgggtacaagttccactggaggagaaaaggcaaggatggactttttccccttgtgagaggtttgatacccagaaaatgagctcaaaacctttacattagggttgcttgtaggaactggagcctggaggctgcatctacttcacctgtcactgctgagggagaggaggggagaaaggcccagcaacagcgtacagaggggtcagtcagcaagtccagagagcacatgcagggagatgtttggcccacaccgcacagccccgccatctccagtgggcgatgaaagatgtaggaaaggttgatttcaagatggaaatgacagcgctatccgcacagtatgaattagggatttgctgtgttagttgatttatccatccacacagaggggaggaaaaagacactcgttacttggtgggagattgagaaactgtggtacctaccacaaagtaatagctctgtttatgaagggcaagaaaggctacatttcagaatttgacacagtggagggtattagaggaaatcaaagaggagttgtgtggaaaatcaggttgtgtaaatgaaggtatgaatgctcagccagaggcaagatcagggagatggtacaaggcctgtttgttacatggatgagtcgggtgcctggttgtgtgtgtgtgtgtgtgtgtgtgtgtgtgtgtgtgaagtcagagttgaaattcagaagatcagactatggaaatcactgcccttttttttttaaaagctaatgaactacatacagacctaaaaggccttaatgaaatccgaacaattttcttttactttcaagatcaaaaacatgcacccaacccagccttggatgccaccaccaggtttttgaagcccttttgagtctaagaaggtgagaacaatgtaaccatagaaagcctttcgtgagcagagaaggcttgaatccacaatttcattcgctgaattaaaaaaaaaaggttcagacctctccttgggtgactaagttctaaagatgcaaatccatgtgcagaaagagatggcattttttagttgattatttttaaccaagtgccattaacattcatcccccacatcccttttctaaacaagcttagtgttacttggggaatgtgttgggatggacgatcacatgtaaggcaggaagaataggtcaaaggttgaaggccaaaggtaagaccagagggtttgcgaatgtgggtttgtaggatactgagaaagtgaataaagaggagaaaaaaccatggtattacacatcttgctgagaaaggaaagcattcggatctgctgcaaaaacacatatatccataaagactcatgttattcagaaaacagattgtgaacacaatcacattcgcatgaatcctttaaaaggaagaagaccttaaagtatctgcaaatctgaatttctatttattccttcactgaatatagaaacaatggttatctgattattagagatattattttggatatgttacttattaacttgctatggctggtaaccatgataaagtctgttattaataacaacataattctttttttaaagaagaaaagcttatttttcattgacagtgtatagatttatctacttagttgtgttttgctattagtgttttaattttttttttaagttgagtgtttgataaattttaagaccctgtccccaccttgttttgagtcctgtgttgactacaggtatatagctcaatttaaaaatcctaaagcaaaagaattttatttataaaagaatcaaacagttgcatgcatgaggctgtgaagtcagatatttagtaataaaagcagcagtgcctttttttgtatttacccattgacccccaccaaatgcaactgttttatattaagaaaatagtaacaattttaaaatctcagagtaaaatctatttcactacatgcttttccccccttgttctgatttaagcagtgtgtacttggcatctctacattgtcctagggacagtggtgttctacaatattatcatgtatgatgttttattggtgctttttattcatagtggcttcttaccagaaacagtaggaagaaacacatgaactgtgtacaagacatgaaacattgctgctgatatgttgttttttcacatgcttttgagttttcactttttaaacgagagccagcaagcaaaatagatgtggctgggtctgcctgtccgggcggctctttgcaccgagctctcaaatcctgtgtattgagggttcctttttggtactcaggattggagctacagctgggcccccctctctcccattcgtttgaagagacactgagggaaacaagggtttcttttgaggtgtccttggctgccttttacgggatgggagccttctccggatcttttgttcttctgcacctcttgtagctactgccggtgcaaggttgtagatgttattccccaggagcctgggcttgggggctgagctgggctgaatgcaaaagcatgcaaccagaaggcgggcaaggggaggaaaagcaggcctggcctcattggtcccctggagatgtctgtagcagtcagctccagcttgggcctggggaagcagcctgaccaaggcgctcaggtgtgcctgttacaagaagaacctgcagaaggataatttgcacatggagctgtgataacactaatgttgattttttttttttttacaagtcatcagagatgtttgcaaagtgagttttatttttttgtaattcctttatctttacttaaaggtgaatgtgtattcctctgggaggaataggaagaaaacaggaatgttaataatgtcgaacagaaaacttcctcccttattaatatataatcctcatgtatttatgcctaatgtaagctgacttttaaaaagctttcttttgttgcatgccctgtgcaggcatctgtattgtacatgcatgcctttcgtcctgttttcctgtataaagttagtgaacaaagaaatatttttgcctagttcatgttgccaagcaatgcatattttttaaatttgtcatatatggaaagagcatgtttgttacatgtaaaagctttactgatatacagatatactaatgtttgaagatgctgttctttgcaagtgtacagttttcaaatgttgttaccagtgaaacacccttgtggtttaaacttgctacaatgtatttattattcatttcctcccatgtaactaagaatcatggctatatttcatatcaacgttatattgaaagtgaagggaaatgattaatacaaggttttgtaac

SEQ ID NO: 61378 - DNA, 6264 bp, Artificial Sequence
  derived and/or modified sequence
atgatgtttcgcgaccaggtcggggtgctggcgggctggtttaagggctggaacgagtgcgagcagactgttgcgctgctgtcgctgctcaagcgcgtgagccagacccaggcccgcttcctccagctctgcctggagcactcgctggccgactgcgccgagctgcacgtcctcgaacgcgaggccaacagccccggaatcattaaccaatggcaacaggaatccaaggataaagtgatttccctcctgttaactcatctgcctttgctgaagccaggaaacctcgacgcgaaagtagaatatatgaaactgctgcccaaaatcctggctcactctattgaacacaaccagcacattgaggagagcaggcagctgctgtcctatgctttgatacatccagccacttcgttagaagaccgtagtgctttagccatgtggctgaatcacttggaggaccgcacgtcgaccagctttggtggccagaaccgaggccgctcagactctgtggattatggacagacacactactatcaccaaagacagaactctgatgacaagctcaatgggtggcagaactctcgggattctgggatttgcatcaatgcctccaactggcaggacaaaagcatggggtgtgagaatggccatgtgcccctctactcctcctcatctgtccccaccacaatcaatacgattggaaccagcacaagtacaaatgttccagcctggctgaaaagcctccgcctgcacaaatatgccgcgcttttctcccagatgacctatgaggagatgatggccctcaccgagtgccagctggaggcgcagaatgttaccaaaggtgcaagacacaaaattgtcatcagtattcagaagctcaaagaaagacaaaatctcctgaagtctttggaaagggacatcatcgaggggggcagcctgcgcatcccgctccaggaactgcaccagatgatcctgactccgatcaaggcctacagctccccgagcaccacccccgaggctcgccgccgggagccccaggccccgcgtcagccctcactgatgggccccgagagccagagccccgactgcaaagatggggccgcagccactggcgccacggccaccccctcggccggggccagcggggggctccagccgcaccagctgagcagctgcgatggggagctggccgtcgcccccctgccagagggggacctccccgggcagttcacacgcgtcatggggaaagtgtgcacacagctcttggtctccagacctgatgaggaaaatataagttcctatttacagctcatagacaagtgtctaattcatgaggcatttacagagacacagaaaaaaagattgttgtcatggaaacagcaggtgcagaagctctttcggtctttccctcggaaaacccttctagacatatcaggatatcgacagcaaagaaatcgaggctttgggcaatccaactccctcccgacggctggctctgtgggcggtggcatgggcagacggaacccgcgccagtaccagatcccctctcggaacgtcccttccgcccgcctgggcctcttgggcaccagtggattcgtcagctccaaccagcgcaacaccacagctacccccaccatcatgaaacaaggaagacagaacctgtggtttgccaaccccgggggcagcaatagcatgccaagccgcacccacagctcagtccagaggacccgctcgctgcccgtgcacacttccccacagaacatgctgatgttccagcagccagaattccagcttcccgtgaccgaacctgacatcaacaacaggctggagtcgttgtgcctcagtatgaccgaacacgccctgggagacggggttgaccggacctccaccatctagaagctgaagacgagagtgaccgcgctggccgtgaaatcgactgctgcgggtccagtgtccgccatcttcagggttgcacagaatcctccaagatactttgcagccttttttccccctggtccctctcccgttttgattttgtgagagcgtaggtcatcctcgtaaacatatcagtagacctggggttggttattttgtcatttgtttctgtcatgggatggtttggtgtgtggggtggggaggggtctctagggaattatgagactgggaggggggtggagggaatgcaggtagctctctggatggaacggggacaggggaaagagtactgccatgaaagagataggagacacataagaggacagcagaagccctggccctggggaggcttctcggaaggcctggcttcacaggcaggccacagaaggatatcgcgggcacgtgcacccaaagcaagatagtggcttcccttttatatccaatctaatcctgattggatgtccctgaggcccctgctggaaacagccataggagagggcccatggcagtaggggaaagaaggaagaaattccctgcaacaaaacttcagctaaactttgatttgtgtattgtttacataataattttaaagggtacataatgtgtaaagagtttggatagaacctctcttcatactatggttttcgtaaaggatctgttgttgttacggattcattttttccctctatttttataagagcagcagagttgtcttctcaaaacggctgccaagctctgcttcttgggaagatggatgcagtcatgtaggcctgagctgtccgtctttcaccgttaggtgggaggagcgtatgggtggacttgaaggacatggacgtggctggaatgagcacagcattgggtgagcgcacaaggatgaggacatcatgtgatcagttatgggtttgctcgcagggcacccagagattctcaaagaatcctgcagcctctttctgtgctggatttgcttgtcacggagaggcctccctccctttccaccccacccatggggcattatcctgtcactcccagccttgctccacacacacacaggtgggtacaagttccactggaggagaaaaggcaaggatggactttttccccttgtgagaggtttgatacccagaaaatgagctcaaaacctttacattagggttgcttgtaggaactggagcctggaggctgcatctacttcacctgtcactgctgagggagaggaggggagaaaggcccagcaacagcgtacagaggggtcagtcagcaagtccagagagcacatgcagggagatgtttggcccacaccgcacagccccgccatctccagtgggcgatgaaagatgtaggaaaggttgatttcaagatggaaatgacagcgctatccgcacagtatgaattagggatttgctgtgttagttgatttatccatccacacagaggggaggaaaaagacactcgttacttggtgggagattgagaaactgtggtacctaccacaaagtaatagctctgtttatgaagggcaagaaaggctacatttcagaatttgacacagtggagggtattagaggaaatcaaagaggagttgtgtggaaaatcaggttgtgtaaatgaaggtatgaatgctcagccagaggcaagatcagggagatggtacaaggcctgtttgttacatggatgagtcgggtgcctggttgtgtgtgtgtgtgtgtgtgtgtgtgtgtgtgtgtgaagtcagagttgaaattcagaagatcagactatggaaatcactgcccttttttttttaaaagctaatgaactacatacagacctaaaaggccttaatgaaatccgaacaattttcttttactttcaagatcaaaaacatgcacccaacccagccttggatgccaccaccaggtttttgaagcccttttgagtctaagaaggtgagaacaatgtaaccatagaaagcctttcgtgagcagagaaggcttgaatccacaatttcattcgctgaattaaaaaaaaaaggttcagacctctccttgggtgactaagttctaaagatgcaaatccatgtgcagaaagagatggcattttttagttgattatttttaaccaagtgccattaacattcatcccccacatcccttttctaaacaagcttagtgttacttggggaatgtgttgggatggacgatcacatgtaaggcaggaagaataggtcaaaggttgaaggccaaaggtaagaccagagggtttgcgaatgtgggtttgtaggatactgagaaagtgaataaagaggagaaaaaaccatggtattacacatcttgctgagaaaggaaagcattcggatctgctgcaaaaacacatatatccataaagactcatgttattcagaaaacagattgtgaacacaatcacattcgcatgaatcctttaaaaggaagaagaccttaaagtatctgcaaatctgaatttctatttattccttcactgaatatagaaacaatggttatctgattattagagatattattttggatatgttacttattaacttgctatggctggtaaccatgataaagtctgttattaataacaacataattctttttttaaagaagaaaagcttatttttcattgacagtgtatagatttatctacttagttgtgttttgctattagtgttttaattttttttttaagttgagtgtttgataaattttaagaccctgtccccaccttgttttgagtcctgtgttgactacaggtatatagctcaatttaaaaatcctaaagcaaaagaattttatttataaaagaatcaaacagttgcatgcatgaggctgtgaagtcagatatttagtaataaaagcagcagtgcctttttttgtatttacccattgacccccaccaaatgcaactgttttatattaagaaaatagtaacaattttaaaatctcagagtaaaatctatttcactacatgcttttccccccttgttctgatttaagcagtgtgtacttggcatctctacattgtcctagggacagtggtgttctacaatattatcatgtatgatgttttattggtgctttttattcatagtggcttcttaccagaaacagtaggaagaaacacatgaactgtgtacaagacatgaaacattgctgctgatatgttgttttttcacatgcttttgagttttcactttttaaacgagagccagcaagcaaaatagatgtggctgggtctgcctgtccgggcggctctttgcaccgagctctcaaatcctgtgtattgagggttcctttttggtactcaggattggagctacagctgggcccccctctctcccattcgtttgaagagacactgagggaaacaagggtttcttttgaggtgtccttggctgccttttacgggatgggagccttctccggatcttttgttcttctgcacctcttgtagctactgccggtgcaaggttgtagatgttattccccaggagcctgggcttgggggctgagctgggctgaatgcaaaagcatgcaaccagaaggcgggcaaggggaggaaaagcaggcctggcctcattggtcccctggagatgtctgtagcagtcagctccagcttgggcctggggaagcagcctgaccaaggcgctcaggtgtgcctgttacaagaagaacctgcagaaggataatttgcacatggagctgtgataacactaatgttgattttttttttttttacaagtcatcagagatgtttgcaaagtgagttttatttttttgtaattcctttatctttacttaaaggtgaatgtgtattcctctgggaggaataggaagaaaacaggaatgttaataatgtcgaacagaaaacttcctcccttattaatatataatcctcatgtatttatgcctaatgtaagctgacttttaaaaagctttcttttgttgcatgccctgtgcaggcatctgtattgtacatgcatgcctttcgtcctgttttcctgtataaagttagtgaacaaagaaatatttttgcctagttcatgttgccaagcaatgcatattttttaaatttgtcatatatggaaagagcatgtttgttacatgtaaaagctttactgatatacagatatactaatgtttgaagatgctgttctttgcaagtgtacagttttcaaatgttgttaccagtgaaacacccttgtggtttaaacttgctacaatgtatttattattcatttcctcccatgtaactaagaatcatggctatatttcatatcaacgttatattgaaagtgaagggaaatgattaatacaaggttttgtaacactg

SEQ ID NO: 61379 - protein, 345 aa, Artificial Sequence
  derived and/or modified sequence
MILTPIKAYSSPSTTPEARRREPQAPRQPSLMGPESQSPDCKDGAAATGATATPSAGASGGLQPHQLSSCDGELAVAPLPEGDLPGQFTRVMGKVCTQLLVSRPDEENISSYLQLIDKCLIHEAFTETQKKRLLSWKQQVQKLFRSFPRKTLLDISGYRQQRNRGFGQSNSLPTAGSVGGGMGRRNPRQYQIPSRNVPSARLGLLGTSGFVSSNQRNTTATPTIMKQGRQNLWFANPGGSNSMPSRTHSSVQRTRSLPVHTSPQNMLMFQQPGSQVHSGLCLTDLRGWLSLSGAPSMPALTVPKSSQGEFQLPVTEPDINNRLESLCLSMTEHALGDGVDRTSTI

SEQ ID NO: 61380 - DNA, 1038 bp, Artificial Sequence
  derived and/or modified sequence
atgatcctgacccccatcaaggcctacagcagccccagcaccacccccgaggccagaagaagagagccccaggcccccagacagcccagcctgatgggccccgagagccagagccccgactgcaaggacggcgccgccgccaccggcgccaccgccacccccagcgccggcgccagcggcggcctgcagccccaccagctgagcagctgcgacggcgagctggccgtggcccccctgcccgagggcgacctgcccggccagttcaccagagtgatgggcaaggtgtgcacccagctgctggtgagcagacccgacgaggagaacatcagcagctacctgcagctgatcgacaagtgcctgatccacgaggccttcaccgagacccagaagaagagactgctgagctggaagcagcaggtgcagaagctgttcagaagcttccccagaaagaccctgctggacatcagcggctacagacagcagagaaacagaggcttcggccagagcaacagcctgcccaccgccggcagcgtgggcggcggcatgggcagaagaaaccccagacagtaccagatccccagcagaaacgtgcccagcgccagactgggcctgctgggcaccagcggcttcgtgagcagcaaccagagaaacaccaccgccacccccaccatcatgaagcagggcagacagaacctgtggttcgccaaccccggcggcagcaacagcatgcccagcagaacccacagcagcgtgcagagaaccagaagcctgcccgtgcacaccagcccccagaacatgctgatgttccagcagcccggcagccaggtgcacagcggcctgtgcctgaccgacctgagaggctggctgagcctgagcggcgcccccagcatgcccgccctgaccgtgcccaagagcagccagggcgagttccagctgcccgtgaccgagcccgacatcaacaacagactggagagcctgtgcctgagcatgaccgagcacgccctgggcgacggcgtggacagaaccagcaccatctag

SEQ ID NO: 61381 - DNA, 1038 bp, Artificial Sequence
  derived and/or modified sequence
atgattctgacccctattaaagcctattcatctcctagtaccactccggaggcccgccggcgtgagcctcaagcacctcgccagccctctctgatgggccctgagagtcagagccccgactgcaaagatggagctgcggctaccggcgctacagcgactccgagtgctggagcttccggaggtctgcagccacatcaactctcctcttgtgacggggagctcgccgtagcacctcttcctgaaggcgatctgcccggacagttcactagagtgatggggaaagtctgtactcagctgctcgtatcccggccagatgaagagaatatctccagctatctgcaactgattgataaatgcctgatacatgaggccttcactgaaacacagaaaaagcgccttctgtcatggaagcagcaggtacagaaattgttccgatcttttccaagaaaaactctcttagatattagcggatacaggcagcagcgtaacagaggattcggacagtctaactcgctgccgacagcaggatctgtgggggggggcatgggccggcgcaatcctaggcagtaccagattccatcccggaacgtcccctctgctcgactggggctgcttgggacatctggctttgttagttccaaccagcggaatacaacggccactccgactatcatgaagcagggtcggcagaatctctggtttgcgaatcctggggggagcaatagtatgccgagccgaacccactcctcagtgcagaggactcgctcactaccagttcacacatccccacagaatatgctcatgttccagcagccaggcagccaggtgcactcaggtctgtgtcttacggatttaagggggtggctttcattgagcggagctccatctatgcccgctctaactgtccccaaatcgtctcagggcgaattccaactgcctgtaactgaacctgatatcaacaatagactggagtcgctgtgtctgtctatgaccgaacacgccttgggcgacggggtggatcgcacctcgaccatttag

SEQ ID NO: 61382 - DNA, 1038 bp, Artificial Sequence
  derived and/or modified sequence
atgatcctgacccccatcaaggcctacagcagccccagcaccaccccagaggcccggcggcgggagccccaggccccccggcagcccagcctgatgggccctgagagccagagcccagactgcaaggatggagctgctgccaccggggccacagccaccccatctgctggggccagcggcggcctgcagccccaccagctgagcagctgtgatggagagctggccgtggcccccctgcctgagggggacctgcccggccagttcaccagggtgatgggcaaggtgtgcacccagctgctggtgtccaggccagatgaggagaacatcagcagctacctgcagctgattgacaagtgcctgatccacgaggccttcacagagacccagaagaagaggctgctgtcctggaagcagcaggtgcagaagctgttccgctccttccccaggaagaccctgctggacatcagcggctaccggcagcagaggaacagaggcttcggccagagcaacagcctgcccacagctggctctgtgggcggcggcatgggcagaagaaacccccggcagtaccagatccccagcagaaatgtgcccagcgcccggctgggcctgctgggcaccagcggctttgtgagcagcaaccagaggaacaccacagccacccccaccatcatgaagcagggccggcagaacctgtggtttgccaaccctgggggcagcaacagcatgcccagcaggacccacagctctgtgcagaggaccaggagcctgcctgtgcacaccagcccccagaacatgctgatgttccagcagcccggcagccaggtgcacagcggcctgtgcctgacagacctgcggggctggctgagcctgagcggggcccccagcatgcctgccctgactgtgcccaagagcagccagggcgagttccagctgcctgtgacagagccagacatcaacaaccggctggagagcctgtgcctgtccatgacagaacatgccctgggagatggagtggacaggaccagcaccatctag

SEQ ID NO: 61383 - DNA, 1038 bp, Artificial Sequence
  derived and/or modified sequence
atgatcctgacccccatcaaggcctacagcagccccagcaccacccccgaggccagacggcgggagcctcaagccccccgccagccatcactgatgggccccgagtcccagagtcctgattgcaaggatggtgcggcagccacaggcgcgaccgcaaccccgtcagctggagcttctggtggtctgcagccccaccagctgtccagctgtgatggggagttagcagtggcccctctgccagaaggcgatctgcctggtcaatttaccagagtgatgggaaaagtgtgtacccagctgcttgttagtagacctgacgaggagaacatctcaagctatctccagctcatagataaatgcctcatccatgaagctttcaccgaaactcagaagaaacggctgctgagttggaaacagcaagtacaaaagctcttcagatctttcccacggaagacactcctggatatcagcggatatcgtcagcagcgcaatcggggattcgggcagtctaactctctgcccaccgccggctctgtagggggcggtatgggcagaagaaacccccgtcagtatcagattccgtctcgcaatgtcccaagtgcacgtctggggttgttgggcacctccgggtttgtctcgagcaaccagcggaacaccaccgctacccctacaatcatgaagcagggccggcagaatctgtggttcgctaaccccggcggttctaactcaatgccctcaaggacccactctagcgtgcaacgcactcggtctctgcctgtccatacaagcccccagaacatgctgatgttccagcaacccggatcacaggtgcactctggactgtgtctgaccgatctccgcggctggctcagcctgtcaggtgcccccagcatgcctgccttgacagtgccgaagagttcacaaggggagtttcaactgccagtaaccgaacccgatattaataaccgcttagagagcctgtgcttaagtatgacagaacatgctctgggagacggggtggataggactagtaccatatag

SEQ ID NO: 61384 - DNA, 1038 bp, Artificial Sequence
  derived and/or modified sequence
atgatcttgacccctatcaaggcctattcaagccccagcacaacacctgaggccagacgtcgtgagcctcaggccccacggcaaccgagcttaatggggccagaatcccagtcccctgactgcaaagacggcgctgcagccacaggagcaactgcaactccttcagccggtgcatctggaggactgcagccgcaccagctaagctcttgtgatggcgagttggccgttgcccctttgccggagggggacctccccggacaatttacacgcgtgatgggaaaagtgtgtacccagctcctggtgagccgcccagacgaggagaatatcagctcctatctgcagctgatcgacaaatgtctgatccatgaggcctttacagagacacagaagaaaagactcctgagttggaagcagcaggttcaaaagctttttagaagttttcctaggaagaccctgctggatatctccggttatcgccagcaacgcaaccggggattcggccaatctaatagcttgccaacagccggtagcgtcggtggtgggatgggacgcagaaacccccgtcagtatcagattccttcccgtaatgtaccttccgcccgactaggactcctggggacctctggctttgtgagttcaaatcaaagaaacactactgcaactccgactattatgaaacaagggcgtcagaacctgtggttcgcaaaccctggagggtctaatagtatgccttctcgcacacactcctccgtgcagaggaccaggtccctgcctgtgcacactagcccccaaaatatgttaatgttccagcaaccaggcagtcaggtgcattccggcttgtgcttgaccgatctgaggggttggctcagcttgtctggagcaccttcgatgccggctctgacagttcctaaatccagtcagggagaatttcaactccctgtaactgagcccgacattaacaatcgcctcgaaagtttgtgcttaagcatgactgaacacgcactaggggatggcgtggatcgaactagtaccatttag

SEQ ID NO: 61385 - DNA, 1337 bp, Artificial Sequence
  derived and/or modified sequence
agttactgaacccttatcaagcagctgcctgggactcaatttgccccatccattggagattaaccgacatcatcgaggggggcagcctgcgcatcccgctccaggaactgcaccagatgatcctgactccgatcaaggcctacagctccccgagcaccacccccgaggctcgccgccgggagccccaggccccgcgtcagccctcactgatgggccccgagagccagagccccgactgcaaagatggggccgcagccactggcgccacggccaccccctcggccggggccagcggggggctccagccgcaccagctgagcagctgcgatggggagctggccgtcgcccccctgccagagggggacctccccgggcagttcacacgcgtcatggggaaagtgtgcacacagctcttggtctccagacctgatgaggaaaatataagttcctatttacagctcatagacaagtgtctaattcatgaggcatttacagagacacagaaaaaaagattgttgtcatggaaacagcaggtgcagaagctctttcggtctttccctcggaaaacccttctagacatatcaggatatcgacagcaaagaaatcgaggctttgggcaatccaactccctcccgacggctggctctgtgggcggtggcatgggcagacggaacccgcgccagtaccagatcccctctcggaacgtcccttccgcccgcctgggcctcttgggcaccagtggattcgtcagctccaaccagcgcaacaccacagctacccccaccatcatgaaacaaggaagacagaacctgtggtttgccaaccccgggggcagcaatagcatgccaagccgcacccacagctcagtccagaggacccgctcgctgcccgtgcacacttccccacagaacatgctgatgttccagcagccaggttcccaagttcacagtggactgtgtttaacagaccttagaggttggttgagcctgagtggagccccttccatgccagcgctgacagtccccaagtcctcccagggagaattccagcttcccgtgaccgaacctgacatcaacaacaggctggagtcgttgtgcctcagtatgaccgaacacgccctgggagacggggttgaccggacctccaccatctagaagctgaagacgagagtgaccgcgctggccgtgaaatcgactgctgcgggtccagtgtccgccatcttcagggttgcacagaatcctccaagatactttgcagccttttttccccctggtccctctcccgttttgattttgtgagagcgtaggtcatcctcgtaaacatatcagtagacctgg

SEQ ID NO: 61386 - protein, 359 aa, Artificial Sequence
  derived and/or modified sequence
MAAPCAEDPSLERHFKGHRDAVTCVDFSINTKQLASGSMDSCLMVWHMKPQSRAYRFTGHKDAVTCVNFSPSGHLLASGSRDKTVRIWVPNVKGESTVFRAHTATVRSVHFCSDGQSFVTASDDKTVKVWATHRQKFLFSLSQHINWVRCAKFSPDGRLIVSASDDKTVKLWDKSSRECVHSYCEHGGFVTYVDFHPSGTCIAAAGMDNTVKVWDVRTHRLLQHYQLHSAAVNGLSFHPSGNYLITASSDSTLKILDLMEGRLLYTLHGHQGPATTVAFSRTGEYFASGGSDEQVMVWKSNFDIVDHGEVTKVPRPPATLASSMGNLTVSILEQRLTLTEDKLKQCLENQQLIMQRATP

SEQ ID NO: 61387 - DNA, 1080 bp, Artificial Sequence
  derived and/or modified sequence
atggccgccccctgcgccgaggaccccagcctggagagacacttcaagggccacagagacgccgtgacctgcgtggacttcagcatcaacaccaagcagctggccagcggcagcatggacagctgcctgatggtgtggcacatgaagccccagagcagagcctacagattcaccggccacaaggacgccgtgacctgcgtgaacttcagccccagcggccacctgctggccagcggcagcagagacaagaccgtgagaatctgggtgcccaacgtgaagggcgagagcaccgtgttcagagcccacaccgccaccgtgagaagcgtgcacttctgcagcgacggccagagcttcgtgaccgccagcgacgacaagaccgtgaaggtgtgggccacccacagacagaagttcctgttcagcctgagccagcacatcaactgggtgagatgcgccaagttcagccccgacggcagactgatcgtgagcgccagcgacgacaagaccgtgaagctgtgggacaagagcagcagagagtgcgtgcacagctactgcgagcacggcggcttcgtgacctacgtggacttccaccccagcggcacctgcatcgccgccgccggcatggacaacaccgtgaaggtgtgggacgtgagaacccacagactgctgcagcactaccagctgcacagcgccgccgtgaacggcctgagcttccaccccagcggcaactacctgatcaccgccagcagcgacagcaccctgaagatcctggacctgatggagggcagactgctgtacaccctgcacggccaccagggccccgccaccaccgtggccttcagcagaaccggcgagtacttcgccagcggcggcagcgacgagcaggtgatggtgtggaagagcaacttcgacatcgtggaccacggcgaggtgaccaaggtgcccagaccccccgccaccctggccagcagcatgggcaacctgaccgtgagcatcctggagcagagactgaccctgaccgaggacaagctgaagcagtgcctggagaaccagcagctgatcatgcagagagccaccccctag

SEQ ID NO: 61388 - DNA, 1080 bp, Artificial Sequence
  derived and/or modified sequence
atggccgcgccatgcgccgaagatccgtctctggaaagacactttaaaggtcacagagacgcggtgacctgcgttgatttcagtattaacactaaacagctcgcctctggttccatggacagttgtctgatggtgtggcacatgaagccgcagtcacgcgcttaccgttttacgggacataaggatgcagtgacttgcgtcaactttagcccaagcggtcatctgctagcatccgggagtcgcgacaaaaccgtgcgcatctgggtgcccaacgtgaaaggagagagcacagttttcagagcccatacagctacagtacggagtgttcacttctgcagtgatggacagagctttgtgaccgctagcgacgacaagaccgttaaagtttgggcaacccataggcagaagttcttgttctccctttcccagcacatcaactgggtgaggtgtgcaaagttcagtccggacggaagactcatcgtatccgcatccgacgataagaccgtaaagctgtgggacaagtctagtcgagaatgtgtgcacagttattgcgagcacggggggttcgtcacttacgtggacttccacccgagcggaacctgtattgcagccgccggtatggataacactgtgaaagtgtgggatgtccgcacacataggctattacagcactatcagctgcacagcgcggccgtcaatggactgtcctttcaccccagcggtaattatctgatcacggcctcctccgacagcaccttgaagatcttggacctcatggagggccgactgctgtatactctgcacgggcatcagggccccgcgaccacggtggcctttagtagaacaggcgaatactttgcgtccggcggcagtgatgagcaagtgatggtctggaaatcaaactttgacatcgtcgaccacggggaagttacaaaggtcccaaggcctcccgcaaccttagcttcctcaatggggaatctgactgtgtcaatactggaacagcggttaacgttgactgaggataagctgaagcaatgtctggagaaccagcagttgataatgcagagagctaccccctag

SEQ ID NO: 61389 - DNA, 1080 bp, Artificial Sequence
  derived and/or modified sequence
atggccgccccctgtgccgaggaccccagcctggagcggcacttcaagggccacagagatgctgtgacctgtgtggacttcagcatcaacaccaagcagctggccagcggctccatggacagctgcctgatggtgtggcacatgaagccccagagccgggcctaccgcttcaccggccacaaggatgctgtgacctgtgtgaacttcagccccagcggccacctgctggccagcggcagccgggacaagacagtgcgcatctgggtgcccaacgtgaagggggagagcacagtgttccgggcccacacagccaccgtgcgctctgtgcacttctgcagtgatggccagagctttgtgacagccagtgatgacaagacagtgaaggtgtgggccacccaccggcagaagttcctgttcagcctgagccagcacatcaactgggtgcgctgtgccaagttctccccagatggccgcctcatcgtgtctgccagtgatgacaagacagtgaagctgtgggacaagagcagccgggagtgtgtgcacagctactgtgagcacggcggctttgtgacctacgtggacttccaccccagcggcacctgcatcgctgctgctggcatggacaacacagtgaaggtgtgggatgtgaggacccaccggctgctgcagcactaccagctgcacagcgctgctgtgaatggcctgtccttccaccccagcggcaactacctgatcacagccagcagtgacagcaccctgaagatcctggacctgatggagggccgcctgctgtacaccctgcacggccaccagggccctgccaccaccgtggccttcagcaggactggagagtactttgccagcggcggcagtgatgagcaggtgatggtgtggaagagcaactttgacatcgtggaccatggagaggtgaccaaggtgccccggcccccagccaccctggccagctccatgggcaacctgactgtgtccatcctggagcagaggctgaccctgacagaggacaagctgaagcagtgcctggagaaccagcagctgatcatgcagagggccaccccctag

SEQ ID NO: 61390 - DNA, 1999 bp, Artificial Sequence
  derived and/or modified sequence
gggctggtggggtgaacccttcatcctgggtcttttaatttctcaggcggaacgagtggcggcggacagaggcttttggctgcgctgtctgtgggttgtctgggcttggggaactgggcacggagaccgtggcgccggccgccggtcatacagctctgcttccagtcgtcgggcaaaaagctgaggcgcttctcctttaattgcggtgggcggggcgtgccgacgcggcccgcgttgctattggtggccgttgggggcgcggaaactgaacgggccgcaacggccaccgcagctgccttcggcgccgccagccccgccatggctgcgccctgcgcggaggacccctcgctggaaaggcattttaagggccaccgagatgcagttacctgtgtggacttcagtatcaacacaaagcagctggccagtggctccatggactcatgcctcatggtctggcacatgaagccgcagtcacgcgcctaccgcttcactggccacaaggatgccgtcacctgtgtgaacttctctccttcgggacacctgcttgcttccggctcccgagacaagactgtccgcatctgggtacccaatgtcaaaggtgagtccactgtgtttcgtgcacacacagccacagtgaggagtgtccacttctgcagtgatggccagtccttcgtgacagcctctgacgacaagacagtcaaagtgtgggcaactcatcgccagaaattcctgttctccctgagccagcatatcaactgggtccgctgtgccaagttctcccccgacgggcggctcatcgtgtctgccagtgatgacaagactgttaagctgtgggacaagagcagccgggaatgtgtccactcgtattgtgagcatggcggctttgtcacctatgtggacttccaccccagtgggacgtgcattgccgctgccggcatggacaacacagtgaaggtgtgggacgtgcggactcaccggctgctgcagcattatcagttgcacagtgcagcagtgaacgggctctctttccacccgtcgggaaactacctgatcacagcctccagtgactcaaccctgaagatcctggacctgatggagggccggctgctctacacactccacgggcatcagggaccagccaccactgttgccttttcaagaacgggggagtattttgcttctggaggctctgatgaacaagtgatggtttggaagagtaactttgatattgttgatcatggagaagtcacgaaagtgccgaggcccccagccacactggccagctccatggggaatctgacagtctccattctggagcagcggttgacactgacagaagacaagctgaagcagtgtctggagaaccagcagctaatcatgcagagagcaacaccatgatcaggggagcaggaatcaggagctcggtggatttgcaggtggcaggccagggatttgtaccatgggacttgggtaaataaaggggactgaactctgtgggaatcacatccatactggagccctggatttttgcagttctgccctccaccttgctatctgcaccaggaggctctccacctggcagccagaggtccccagtgggccgggctcacacacaaatgatgcttcagacccgaatgagaggaccacattttgcttaatgtaaaggagccacttgaaaatgtctgctccttcggggtcctgagattgtggctccccctctggaggaggtggctccacgatgccttgattttcactcatcatttggacatgtgactggcttttcctacctctgccatggtgtagaaattgattgcacattgattggatgagccgggggttttctctaaatctgactaaaggcccaaagtgggcccatctgagtcaggtttgttgagaacaagccctctcaagtgggtggtggcttttcagtggccctgatttctgttccacacgtgttcactggagccaggtgacttcctccttgcgtgagtgagggcac

SEQ ID NO: 61391 - DNA, 1080 bp, Artificial Sequence
  derived and/or modified sequence
atggccgccccctgcgccgaggaccccagcctggagcggcacttcaagggccaccgggatgcagtaacttgtgtagacttctctatcaatactaagcagctcgcttctggttccatggacagctgtttgatggtgtggcatatgaagcctcagagcagggcctaccggttcactggtcacaaagacgcggttacctgtgtgaacttctccccctcaggtcacctattggcgtctggcagccgggacaagaccgtacgaatctgggtccctaatgttaagggcgagagtacagttttccgtgcacatacggctactgtaagatccgtgcacttttgcagcgatggacagtctttcgttaccgcatcagacgataaaaccgtaaaagtttgggccacgcaccgccagaaattcctcttttccctttcacagcatatcaattgggtgcgatgcgcaaaattcagccctgacggaaggttgatcgtgtctgccagtgatgacaaaacagtgaaactatgggataaaagctcccgggagtgtgttcactcatactgcgaacatgggggattcgttacatacgtggattttcatccatctggcacctgcatagcagccgcaggcatggacaacaccgtcaaggtgtgggacgtccgaacacatcgcttgcttcagcactaccagctgcacagcgccgccgtgaacgggctgtctttccacccgtctgggaattatttaataacagcgtctagcgattctactctcaagatcctggacttgatggagggcaggcttctctataccctgcatggtcaccaaggtccagccactactgtcgccttttcccgcaccggggaatactttgcgagcggaggcagcgacgagcaagtgatggtttggaaatccaattttgatattgtcgatcacggcgaagtcaccaaggtccctcgcccccccgctaccctggccagctctatgggaaatttgacagtaagtatcttggagcagcggcttaccctgaccgaggacaagcttaagcagtgcctcgagaaccagcagctgattatgcagagagctacaccttag

SEQ ID NO: 61392 - DNA, 1080 bp, Artificial Sequence
  derived and/or modified sequence
atggccgcaccctgcgcagaggacccctcgcttgaaaggcatttcaaggggcaccgggacgccgtcacctgcgtggacttttccataaacaccaagcagctggcaagcggtagtatggacagctgcttaatggtttggcacatgaagccccaaagccgtgcgtatcggttcaccggccacaaagacgcagtgacctgtgtgaactttagtccgagcggccatttacttgcctccgggtccagggataagacagtccggatctgggtgcccaacgtcaaaggggaatccactgtgttccgcgcacacacagctacagtcagatcagtgcacttttgctccgacggccagtcctttgttacagccagcgacgataaaaccgttaaggtgtgggccacacaccgacagaaattcctattctctttatcacagcatattaactgggtccgctgcgccaagttctctcctgatggacggctcatcgtttccgccagcgatgataagactgtaaagctctgggataaatcttcacgcgagtgtgtgcatagctattgcgaacatggcggattcgtaacatatgtggactttcatcctagtggcacatgcattgctgcagctgggatggacaatacggtgaaggtctgggatgtgcggacccaccgcctgctgcaacattaccagctgcacagcgctgccgtgaacgggctttcttttcacccttcaggcaattatctgatcaccgcaagcagcgatagcaccctgaaaatcctagacctgatggagggcaggttactatacacgctccacggacaccaaggcccagccactaccgtcgctttcagccgtactggtgagtactttgcctcaggaggatccgatgaacaagttatggtgtggaagagcaacttcgatattgtcgaccacggcgaagtgactaaagttccgagaccacccgctaccctagccagcagcatggggaatttaactgttagcatcctcgaacaacgcctgacactgacggaggacaaattaaaacaatgtctggagaatcagcaactgattatgcagagagctactccctag

SEQ ID NO: 61393 - DNA, 1110 bp, Artificial Sequence
  derived and/or modified sequence
atggacagctgcctgatggtgtggcacatgaagccccagagcagagcctacagattcaccggccacaaggacgccgtgacctgcgtgaacttcagccccagcggccacctgctggccagcggcagcagagacaagaccgtgagaatctgggtgcccaacgtgaagggcgagagcaccgtgttcagagcccacaccgccaccgtgagaagcgtgcacttctgcagcgacggccagagcttcgtgaccgccagcgacgacaagaccgtgaaggtgtgggccacccacagacagaagttcctgttcagcctgagccagcacatcaactgggtgagatgcgccaagttcagccccgacggcagactgatcgtgagcgccagcgacgacaagaccgtgaagctgtgggacaagagcagcagagagtgcgtgcacagctactgcgagcacggcggcttcgtgacctacgtggacttccaccccagcggcacctgcatcgccgccgccggcatggacaacaccgtgaaggtgtgggacgtgagaacccacagactgctgcagcactaccagctgcacagcgccgccgtgaacggcctgagcttccaccccagcggcaactacctgatcaccgccagcagcgacagcaccctgaagatcctggacctgatggagggcagactgctgtacaccctgcacggccaccagggccccgccaccaccgtggccttcagcagaaccggcgagtacttcgccagcggcggcagcgacgagcaggtgatggtgtggaagagcaacttcgacatcgtggaccacggcgaggtgaccaaggtgcccagaccccccgccaccctggccagcagcatgggcaacctgcccgaggtggacttccccgtgccccccggcagaggcagaagcgtggagagcgtgcagagccagccccaggagcccgtgagcgtgccccagaccctgaccagcaccctggagcacatcgtgggccagctggacgtgctgacccagaccgtgagcatcctggagcagagactgaccctgaccgaggacaagctgaagcagtgcctggagaaccagcagctgatcatgcagagagccaccccctag

SEQ ID NO: 61394 - DNA, 1110 bp, Artificial Sequence
  derived and/or modified sequence
atggattcatgtctcatggtttggcacatgaagccccagtcaagggcctaccgttttactggacacaaggatgcggtcacttgcgttaactttagcccctccgggcacctcctggcttccggatccagggataagaccgtccgcatctgggtccctaacgttaagggagaatccactgtgtttcgcgcacataccgctaccgtccggagtgttcatttttgctcggacggccagtccttcgtgaccgcttccgatgacaagactgtgaaagtatgggccactcataggcagaaattcctgttttcactgtctcaacatatcaactgggtaaggtgtgccaagttctcccccgacggccggctcatcgtgtctgcttctgatgataagacagtaaagctgtgggacaagtcttctagagagtgtgtgcactcctattgcgagcacggaggcttcgtcacctatgtggacttccaccctagtgggacatgcattgcagccgccggaatggataacacggtgaaggtctgggacgtaagaacacatcggttgctccagcattaccagctccatagtgccgcagttaatggcctcagcttccacccttctggcaactacttgattaccgccagctccgactccacgctgaagattctggacctcatggaaggcagactcctatacacactccacggacatcagggaccagccacaactgtcgcattctccaggaccggcgagtacttcgcctctggaggatcagacgagcaggtgatggtctggaagtccaacttcgatatcgtggaccacggtgaagtgacaaaagttccaaggccacccgccactctggccagcagcatgggaaacctgccagaggtggacttcccggttccgcctggccgaggtcgctctgtggagagcgtgcaatcccagcctcaggagcctgttagcgtgccccagactttgacctccacactggagcatatcgttggacagctggatgttttgacccaaactgttagtatcctggagcagcggctgaccttaacagaggacaaactaaaacagtgtcttgagaatcagcaactaattatgcaacgggccaccccatag

SEQ ID NO: 61395 - DNA, 1110 bp, Artificial Sequence
  derived and/or modified sequence
atggacagctgcctgatggtgtggcacatgaagccccagagccgggcctaccgcttcaccggccacaaggatgctgtgacctgtgtgaacttcagccccagcggccacctgctggccagcggcagccgggacaagacagtgcgcatctgggtgcccaacgtgaagggggagagcacagtgttccgggcccacacagccaccgtgcgctctgtgcacttctgcagtgatggccagagctttgtgacagccagtgatgacaagacagtgaaggtgtgggccacccaccggcagaagttcctgttcagcctgagccagcacatcaactgggtgcgctgtgccaagttctccccagatggccgcctcatcgtgtctgccagtgatgacaagacagtgaagctgtgggacaagagcagccgggagtgtgtgcacagctactgtgagcacggcggctttgtgacctacgtggacttccaccccagcggcacctgcatcgctgctgctggcatggacaacacagtgaaggtgtgggatgtgaggacccaccggctgctgcagcactaccagctgcacagcgctgctgtgaatggcctgtccttccaccccagcggcaactacctgatcacagccagcagtgacagcaccctgaagatcctggacctgatggagggccgcctgctgtacaccctgcacggccaccagggccctgccaccaccgtggccttcagcaggactggagagtactttgccagcggcggcagtgatgagcaggtgatggtgtggaagagcaactttgacatcgtggaccatggagaggtgaccaaggtgccccggcccccagccaccctggccagctccatgggcaacctgcctgaggtggacttccctgtgcccccaggccggggccgctctgtggagagcgtgcagagccagccccaggagcctgtgtctgtgccccagaccctgaccagcaccctggagcacatcgtgggccagctggatgtgctgacccagacagtgtccatcctggagcagaggctgaccctgacagaggacaagctgaagcagtgcctggagaaccagcagctgatcatgcagagggccaccccctag

SEQ ID NO: 61396 - DNA, 1110 bp, Artificial Sequence
  derived and/or modified sequence
atggacagctgcctgatggtgtggcacatgaagccccagagccgggcctaccggtttactgggcacaaggatgctgtgacttgcgtgaatttttctccaagcggtcacttgctggcatcaggatcacgagataaaacggttagaatctgggtgcccaacgtgaaaggtgagtctaccgtgtttcgggctcacacagccacggtgcgttcagtgcacttttgttccgacggccagagctttgtcacggcctcagacgataagacggttaaggtgtgggcaacgcaccggcagaagtttctcttttccctcagccagcatatcaactgggtaaggtgcgctaaatttagcccagatgggaggctgattgtcagcgctagcgatgataagacagtcaagctgtgggacaaatcttcgcgggagtgtgtgcacagttactgcgaacacggtggctttgtcacctatgtcgactttcacccgtccgggacatgtatcgcagctgctggaatggacaatactgtgaaagtttgggacgttagaacgcacaggctgctgcagcattatcagctgcactctgcggcggtgaatggcctcagtttccatccatccggcaactatcttatcaccgcgtcctcagatagcactctcaaaatccttgatttgatggaaggccggctcctctacactctgcacggccatcagggacccgccaccactgtggccttctcaaggaccggcgagtacttcgctagcggcggaagtgacgaacaagtcatggtatggaaatcaaactttgatatcgtggaccatggagaggttaccaaggtgcccaggccaccagctacacttgcaagcagtatggggaacctccccgaagtggattttcccgtaccacctggcagaggcagatccgtggaaagcgtgcagtcccaaccgcaagaaccggtgagcgtcccccaaaccctcacgagcacattggagcacatagtgggtcagcttgatgtccttactcagacggtgtccatcctcgagcagcggctgacactgaccgaggacaagttaaagcagtgtctggagaatcaacaacttatcatgcagcgggcgaccccctag

SEQ ID NO: 61397 - DNA, 1110 bp, Artificial Sequence
  derived and/or modified sequence
atggatagctgtctgatggtgtggcatatgaagcctcagtctagggcataccggtttacagggcacaaggatgctgtaacatgcgtgaatttctctcctagtggccatctgctggccagtggcagcagagacaaaaccgtgagaatttgggtgcccaacgtaaagggtgaatccaccgtgtttcgggcacataccgccaccgtccgctctgtgcacttctgtagtgatggacaaagctttgtgactgccagcgacgacaaaaccgtgaaagtgtgggccacgcatcgacagaaattcctcttcagcctgtctcagcatattaattgggtccggtgcgccaaattctcccccgacggacggctgattgtgtcagcgagcgatgataaaacggtaaagttgtgggataagagttccagagaatgcgttcattcatattgtgagcacggcggattcgtcacctacgtggacttccatccctccggtacctgtatcgcagctgccggtatggacaatactgtgaaagtctgggacgttcgcacgcatcggctgttgcagcactatcagttgcactcggctgccgtcaatggcctgtcatttcatccttctggaaattacctgatcaccgcatcaagtgactcaaccctcaagattctcgatctgatggaaggtagattgctgtataccctgcatgggcaccaaggacccgctaccaccgtcgccttcagtcgtaccggggaatattttgctagcggaggctccgatgagcaggtaatggtttggaaaagcaatttcgatattgttgatcacggcgaggtgaccaaagtcccccgaccacctgcaaccctggcctcttctatgggcaacctccctgaggtcgactttcctgtaccaccagggcgagggagatccgtcgaaagtgtgcagtctcagccacaagaacccgtttccgttccccagacactgacctccacgttagaacacatcgtcggacagctggacgtgttaacacagacagtgtctattctcgagcagcggttgactctgacggaggataagttaaaacagtgtcttgagaatcagcaactcatcatgcaacgcgctaccccttag

SEQ ID NO: 61398 - protein, 604 aa, Artificial Sequence
  derived and/or modified sequence
MGAALGTGTRLAPWPGRACGALPRWTPTAPAQGCHSKPGPARPVPLKKRGYDVTRNPHLNKGMAFTLEERLQLGIHGLIPPCFLSQDVQLLRIMRYYERQQSDLDKYIILMTLQDRNEKLFYRVLTSDVEKFMPIVYTPTVGLACQHYGLTFRRPRGLFITIHDKGHLATMLNSWPEDNIKAVVVTDGERILGLGDLGCYGMGIPVGKLALYTACGGVNPQQCLPVLLDVGTNNEELLRDPLYIGLKHQRVHGKAYDDLLDEFMQAVTDKFGINCLIQFEDFANANAFRLLNKYRNKYCMFNDDIQGTASVAVAGILAALRITKNKLSNHVFVFQGAGEAAMGIAHLLVMALEKEGVPKAEATRKIWMVDSKGLIVKGRSHLNHEKEMFAQDHPEVNSLEEVVRLVKPTAIIGVAAIAGAFTEQILRDMASFHERPIIFALSNPTSKAECTAEKCYRVTEGRGIFASGSPFKSVTLEDGKTFIPGQGNNAYVFPGVALGVIAGGIRHIPDEIFLLTAEQIAQEVSEQHLSQGRLYPPLSTIRDVSLRIAIKVLDYAYKHNLASYYPEPKDKEAFVRSLVYTPDYDSFTLDSYTWPKEAMNVQTV

SEQ ID NO: 61399 - protein, 581 aa, Artificial Sequence
  derived and/or modified sequence
MGAALGTGTRLAPWPGRACGALPRWTPTAPAQGCHSKPGPARPVPLKKRGYDVTRNPHLNKGMAFTLEERLQLGIHGLIPPCFLSQDVQLLRIMRYYERQQSDLDKYIILMTLQDRNEKLFYRVLTSDVEKFMPIVYTPTVGLACQHYGLTFRRPRGLFITIHDKGHLATMLNSWPEDNIKAVVVTDGERILGLGDLGCYGMGIPVGKLALYTACGGVNPQQCLPVLLDVGTNNEELLRDPLYIGLKHQRVHGKAYDDLLDEFMQAVTDKFGINCLIQFEDFANANAFRLLNKYRNKYCMFNDDIQGTASVAVAGILAALRITKNKLSNHVFVFQGAGEAAMGIAHLLVMALEKEGVPKAEATRKIWMVDSKGLIVKGRSHLNHEKEMFAQDHPEVNSLEEVVRLVKPTAIIGVAAIAGAFTEQILRDMASFHERPIIFALSNPTSKAECTAEKCYRVTEGRGIFASGSPFKSVTLEDGKTFIPGQGNNAYVFPGVALGVIAGGIRHIPDEIFLLTAEQIAQEVSEQHLSQGRLYPPLSTIRDVSLRIAIKVLDYAYKHNLASYYPEPKDKEAFVRSLVYT

SEQ ID NO: 61400 - protein, 342 aa, Artificial Sequence
  derived and/or modified sequence
MGAALGTGTRLAPWPGRACGALPRWTPTAPAQGCHSKPGPARPVPLKKRGYDVTRNPHLNKGMAFTLEERLQLGIHGLIPPCFLSQDVQLLRIMRYYERQQSDLDKYIILMTLQDRNEKLFYRVLTSDVEKFMPIVYTPTVGLACQHYGLTFRRPRGLFITIHDKGHLATMLNSWPEDNIKAVVVTDGERILGLGDLGCYGMGIPVGKLALYTACGGVNPQQCLPVLLDVGTNNEELLRDPLYIGLKHQRVHGKAYDDLLDEFMQAVTDKFGINCLIQFEDFANANAFRLLNKYRNKYCMFNDDIQGTTCHTFSCPWHLWAQVMFQHIPGPMGFSEWLPRNS

SEQ ID NO: 61401 - protein, 62 aa, Artificial Sequence
  derived and/or modified sequence
MGAALGTGTRLAPWPGRACGALPRWTPTAPAQGCHSKPGPARPVPLKKRGYDVTRNPHLNKV

SEQ ID NO: 61402 - protein, 61 aa, Artificial Sequence
  derived and/or modified sequence
MGAALGTGTRLAPWPGRACGALPRWTPTAPAQGCHSKPGPARPVPLKKRGYDVTRNPHLNK

SEQ ID NO: 61403 - protein, 151 aa, Artificial Sequence
  derived and/or modified sequence
MGAALGTGTRLAPWPGRACGALPRWTPTAPAQGCHSKPGPARPVPLKKRGYDVTRNPHLNKGMAFTLEERLQLGIHGLIPPCFLSQDVQLLRIMRYYERQQSDLDKYIILMTLQDRNEKLFYRVLTSDVEKFMPIVYTPTVGLACQHYGLT

SEQ ID NO: 61404 - protein, 79 aa, Artificial Sequence
  derived and/or modified sequence
MGAALGTGTRLAPWPGRACGALPRWTPTAPAQGCHSKPGPARPVPLKKRGYDVTRNPHLNKVMGQRAGRPALRSRGCRK

SEQ ID NO: 61405 - protein, 252 aa, Artificial Sequence
  derived and/or modified sequence
MAFTLEERLQLGIHGLIPPCFLSQDVQLLRIMRYYERQQSDLDKYIILMTLQDRNEKLFYRVLTSDVEKFMPIVYTPTVGLACQHYGLTFRRPRGLFITIHDKGHLATMLNSWPEDNIKAVVVTDGERILGLGDLGCYGMGIPVGKLALYTACGGVNPQQCLPVLLDVGTNNEELLRDPLYIGLKHQRVHGKAYDDLLDEFMQAVTDKFGINCLIQFEDFANANAFRLLNKYRNKYCMFNDDIQAPSTAPAT

SEQ ID NO: 61406 - DNA, 1815 bp, Artificial Sequence
  derived and/or modified sequence
atgggggcggctcttggaactgggacaaggcttgctccctggcccggacgcgcttgtggggcactgccgcgctggacaccgaccgcgcctgcccagggttgccactccaaaccaggcccagcgagaccagtccccttgaaaaaacgcgggtatgacgtgacgcggaacccccatctgaacaaaggtatggcctttactctggaagaaaggctgcagttaggcattcacgggttgataccaccttgctttttgtctcaggacgtgcagctactgcggataatgcggtattatgaacgccaacaatcagatcttgataagtacatcattctgatgacactgcaggatcgcaatgaaaaactcttttacagggtgcttacctcagatgtagaaaaatttatgccaattgtctatacgccaactgtgggattggcatgccagcattacgggcttaccttccggcgcccgagaggactattcataacaatccatgacaaaggtcacctggcaaccatgcttaatagctggcctgaagataacatcaaggccgtcgtggtcacagacggtgaacggattcttggactaggagatctcgggtgctacggcatggggatacccgtgggaaagctcgccctgtacactgcttgtggaggcgtgaatccccagcagtgcctgccggttctgttagacgtgggaactaataacgaggagctccttcgagatcccttatacattggcctaaagcatcagagagtccacggtaaagcctatgacgacttgctggatgaattcatgcaggccgtcaccgataagtttggaataaactgcttgattcagttcgaagattttgcgaatgcgaacgcctttcgcttattaaataaataccgcaacaaatattgcatgtttaacgatgacatccaaggaactgcgtccgtcgccgttgctggaattctggcggctctcagaattacaaaaaacaagctcagcaaccacgtgttcgtatttcagggggctggcgaggccgctatgggcattgctcatctgctggtgatggccctggagaaggaaggggtccctaaggccgaagcaacccggaagatatggatggtggatagcaagggcttaatagttaagggacggtcacacctcaaccacgaaaaggagatgttcgcgcaggatcacccggaggtcaactcactggaggaagtggtgcgcctggttaagcctactgccatcatcggggtggccgccatcgctggcgcatttaccgaacagatccttagggacatggcctcgttccatgagcggcccataatatttgccctttctaatccaacgtcgaaagcggagtgtacagccgaaaagtgctacagggtgacagaaggccggggtatctttgcttcaggaagcccgtttaagtccgtgacactcgaagatggcaagacattcatccccggccaggggaataacgcatatgtgtttcccggcgtcgccctgggcgtcatcgctggggggatcaggcacatcccagatgaaattttccttctgaccgctgagcagattgctcaggaggtgagcgaacaacatctcagccaggggcggttataccctccactgtctacaattcgcgatgtctccttaaggatcgccatcaaagtgctcgactatgcctataaacacaacttagcctcttattaccctgaacccaaggataaagaggctttcgttaggtccttggtttataccccagactacgacagctttaccttggactcctatacctggccaaaagaggctatgaatgtgcagaccgtgtag

SEQ ID NO: 61407 - DNA, 1815 bp, Artificial Sequence
  derived and/or modified sequence
atgggcgcagccctgggcacaggcacccgcttggcaccttggcctggccgagcctgtggagcactgccccggtggaccccgactgccccagctcaaggatgtcacagtaagcccggacccgccagacctgtgccactcaagaagcgaggatatgatgtcacacggaaccctcaccttaataaagggatggcgtttacacttgaggaaaggctacaactcggtatccacggcctgatcccgccctgcttccttagccaggacgtccagttgctgcggataatgcgatattacgaacgtcagcagtcagacttggataagtatattatactgatgactctgcaggatcggaacgagaagctattttaccgcgtgcttacaagtgatgtggagaagttcatgcctattgtttacactccaacagtgggcctggcctgtcaacattacgggctgacattccgcaggcctcgcgggttgtttattaccattcatgataaagggcatctggcgactatgctgaattcctggcccgaagataacattaaggctgtggttgttacggatggcgagagaatcctaggattgggggacttgggctgctatgggatgggcattcctgtcggcaagctggccctctacaccgcctgcggcggcgttaatccccaacagtgcctgcccgtactgctggatgtcgggacgaacaatgaggaactactccgagatcctctctacatcggcttaaaacaccaacgggtacacggaaaagcctacgatgacttacttgatgaattcatgcaggcggtgaccgataagtttgggattaattgtctgattcagttcgaagactttgccaacgctaatgccttccggttgctgaataagtatcgaaacaagtattgtatgttcaatgacgatattcagggcacagccagcgtggcggttgcgggcattcttgccgccctccggataacgaaaaataaactatccaaccatgttttcgtctttcagggagcgggagaggccgctatgggaatagcccatctgctggtcatggctcttgagaaagagggcgtcccaaaggccgaggccacacggaagatttggatggtggactcaaaggggctcatagtcaaagggcgtagccatctcaatcacgagaaggagatgtttgctcaggaccatcctgaggtaaactccctggaggaagtcgtgaggttggtgaagcccaccgctattattggagtggcagcaattgcaggcgcgttcaccgagcagatcttgagagacatggcatcctttcatgagaggccaatcatcttcgccctgagtaatccaacctctaaggctgagtgtactgccgagaaatgttatcgggtgaccgagggaaggggaatttttgcgtctggcagccctttcaagtctgttacactggaagacggtaaaaccttcattcccgggcaaggaaataatgcctatgttttcccaggcgtagctcttggagtgattgccggaggaataaggcacattccagatgagatttttctgcttactgccgagcagattgcacaagaagtgtccgagcagcacctgtctcaaggtcgactgtaccctcctctgtccaccattcgcgatgtgagtcttaggattgccatcaaagttctcgactacgcctataaacacaaccttgcatcatattacccggagccaaaggacaaagaagcctttgtgcgtagtctcgtctacacccctgactatgactcattcactttagactcctatacttggccaaaagaggctatgaatgtgcagaccgtctag

SEQ ID NO: 61408 - DNA, 1746 bp, Artificial Sequence
  derived and/or modified sequence
atgggtgccgcactcggaacaggcactagactcgctccatggccagggcgcgcatgtggggcactgccccggtggacgccaaccgctcccgcacaggggtgccactccaagccaggacctgccaggccggtaccacttaaaaagaggggctacgacgtgacgaggaaccctcacttaaacaagggaatggcgtttactctagaggagcgactccagctaggtatccatggcctgattccaccatgcttcctcagccaagacgtccagctactccgcattatgcgatattacgaaagacaacagtccgatcttgacaaatacattatccttatgactctccaggataggaacgaaaaactcttttaccgggtgcttacatccgacgtcgaaaagttcatgcctattgtatatacccctaccgtgggactcgcgtgccagcactacggccttacgtttaggcgacccagaggtctgtttattaccatccacgataaagggcacctggccactatgttgaactcctggccagaagataacattaaggctgttgttgtgaccgatggagagaggattctgggactgggcgacctaggttgttatgggatgggaatccccgtggggaaactggctctctacactgcttgtggaggcgtgaatccccagcaatgtctcccggtactcctggatgtcggtactaataacgaggagctcctccgggaccccctgtatataggcttaaagcatcagagagtccacggtaaggcctatgacgacttactggatgagtttatgcaagccgtgactgacaagttcggaataaattgcttaattcaatttgaggatttcgcaaacgccaatgcgtttcgcctccttaataagtaccggaataagtactgtatgttcaatgacgacatccaagggaccgccagcgttgctgttgcgggcatcctggccgcccttcgcattactaagaacaagttatcgaatcacgtatttgtcttccagggagccggggaggccgcaatgggtattgcacatctgctcgtcatggccctcgagaaggaaggcgtccccaaggctgaggccacccggaagatttggatggtggactccaagggacttatcgtaaaggggagaagccatcttaaccacgaaaaggagatgttcgcccaggaccacccagaggtaaatagtttagaggaggtggtgaggctggtgaaaccaaccgcaatcatcggggtagcagctatagccggtgcattcacagaacagattttgcgcgacatggcctcatttcacgaacgtccgatcatctttgccctcagcaacccaacttctaaagctgagtgtactgccgaaaagtgctacagagtcaccgaggggaggggcatatttgccagcggatcacctttcaagagtgtgacgcttgaggacggtaaaacgttcattccaggccagggcaataatgcctatgtctttccaggagtcgctctcggcgttatagcgggtggcatacggcatatccccgacgagatatttctgctgacggctgagcaaatcgcgcaagaagtgtccgaacagcatttgtctcaaggccgcctgtatccaccccttagcacaattagagacgtctcactgcggattgcaattaaggtgctggactacgcctataagcataatctcgcatcctattacccggagcctaaagataaggaagcctttgtccgctccctggtctacacgtag

SEQ ID NO: 61409 - DNA, 1815 bp, Artificial Sequence
  derived and/or modified sequence
atgggcgctgcacttggaacaggaacccggctggcgccctggccgggccgtgcttgcggagctctaccccggtggaccccaacagcccctgcccagggctgccacagtaagcccggccccgcacggcccgtccctctgaagaagcgcggctacgatgtgacgaggaatccccatctgaataagggcatggctttcactctggaagaaagactgcagctcggtatccacgggctgatcccgccttgctttctgagccaggacgtgcaactgcttcgcattatgcggtattacgaacggcagcaaagcgatctggacaagtacattatcttaatgactctgcaggatcggaacgaaaaactgttttatcgtgtcctcacttctgatgtggagaaatttatgccaattgtatacacaccgacggtcggattggcgtgtcagcactatggtttgacgtttcgtcgccccaggggactctttatcactatacacgacaagggccatttggcgacaatgttaaatagctggcctgaggataacattaaggccgtcgtggtgactgatggcgagcgcattctaggcctgggcgacctgggttgttacggcatgggaatcccagtgggaaaactcgccttgtacacagcgtgcggaggcgttaatccccaacagtgtctcccggtcctgctagacgtggggaccaacaacgaggagctcctgagggaccctctgtatattggattaaaacaccagagagtccacggaaaagcctacgacgatctgttggacgagtttatgcaagctgttaccgacaagtttggtatcaattgcctcatccagtttgaggacttcgccaatgctaatgcgttccgcttgctgaacaagtacaggaataaatactgcatgttcaacgacgatattcagggaaccgctagcgttgcggtggctggaattttggccgcgctcaggatcactaaaaacaagctgtctaaccacgtgttcgtgtttcagggagcaggcgaggctgccatgggtatcgcgcacttacttgtgatggctctggaaaaggaaggggtcccgaaagccgaagcaactcgcaagatatggatggtggattctaaaggtctgatcgtgaagggcagatctcatctgaaccatgaaaaggagatgttcgcccaggaccaccccgaggtgaatagtctcgaagaggttgtgagattggtcaagcccacagctatcatcggcgtggctgctattgcgggagccttcacagaacagattctgagagatatggctagtttccacgagcgacccattatcttcgccttgtctaaccccacctcaaaagctgaatgtaccgcagagaagtgttatcgagtaaccgagggccgcggcatcttcgcgtccgggagcccgtttaagtcagtaaccttagaagatgggaagacgttcatacctggccagggaaataatgcttatgtgtttcccggcgtcgccctaggtgttatcgccggaggtattcgacacatcccagacgaaatctttctgctcacggctgaacaaatcgcccaggaagtctcagagcagcacctctctcagggcagattgtatcctcctttatcaacaatacgggacgtctccttacgtattgcgattaaagtccttgactatgcctacaagcacaatttagcctcctactacccagagccaaaggacaaagaggctttcgtgcggtccctcgtgtacaccccagactacgatagctttacattggactcttatacgtggccaaaggaggccatgaatgtccagaccgtttag

SEQ ID NO: 61410 - DNA, 1815 bp, Artificial Sequence
  derived and/or modified sequence
atgggcgccgccctgggcaccggcacccggctggccccctggccaggccgggcctgtggggccctgccccgctggacccccacagccccagcccagggctgccacagcaagccaggccctgcccggcctgtgcccctgaagaagaggggctatgatgtgaccaggaacccccacctgaacaagggcatggccttcaccctggaggagcggctgcagctgggcatccacggcctcatccccccctgcttcctgagccaggatgtgcagctgctgcgcatcatgagatactatgagcggcagcagagcgacctggacaagtacatcatcctgatgaccctgcaggacagaaatgagaagctgttctacagagtgctgaccagtgatgtggagaagttcatgcccatcgtgtacacccccaccgtgggcctggcctgccagcactacggcctgaccttcagaagaccccggggcctcttcatcaccatccatgacaagggccacctggccaccatgctgaacagctggccagaggacaacatcaaggctgtggtggtgacagatggagagcgcatcctgggcctgggggacctgggctgctacggcatgggcatccctgtgggcaagctggccctgtacacagcctgtggcggcgtgaacccccagcagtgcctgcctgtgctgctggatgtgggcaccaacaatgaggagctgctgcgggaccccctgtacatcggcctgaagcaccagagggtgcacggcaaggcctatgatgacctgctggatgagttcatgcaggccgtgacagacaagtttggcatcaactgcctgatccagtttgaggactttgccaatgccaatgccttccggctgctgaacaagtacagaaacaagtactgcatgtttaatgatgacatccagggcacagcctctgtggccgtggccggcatcctggccgccctgcgcatcaccaagaacaagctgagcaaccacgtgtttgtgttccagggcgctggggaggccgccatgggcatcgcccacctgctggtgatggccctggagaaggagggcgtgcccaaggccgaggccaccaggaagatctggatggtggacagcaagggcctgattgtgaagggccgcagccacctgaaccacgagaaggagatgtttgcccaggaccaccctgaggtgaacagcctggaggaggtggtgcggctggtgaagcccacagccatcatcggcgtggccgccatcgccggggccttcacagagcagatcctgcgggacatggccagcttccacgagcggcccatcatctttgccctgagcaaccccaccagcaaggcagaatgtacagctgagaagtgctacagagtgacagagggccggggcatctttgccagcggcagccccttcaagtctgtgaccctggaggatggcaagaccttcatccctggccagggcaacaatgcctacgtgtttcctggggtggccctgggcgtgattgctgggggcatccgccacatcccagatgagatcttcctgctgacagctgagcagatcgcccaggaggtgtctgagcagcacctgagccagggccgcctgtacccacccctgagcaccatcagagatgtgtccctgcgcatcgccatcaaggtgctggactatgcctacaagcacaacctggccagctactacccagagcccaaggacaaggaggcctttgtgcgcagcctggtgtacaccccagactatgacagcttcaccctggacagctacacctggcccaaggaggccatgaatgtgcagacagtgtag

SEQ ID NO: 61411 - DNA, 1746 bp, Artificial Sequence
  derived and/or modified sequence
atgggcgccgccctgggcaccggcacccggctggccccctggccaggccgggcctgtggggccctgccccgctggacccccacagccccagcccagggctgccacagcaagccaggccctgcccggcctgtgcccctgaagaagaggggctatgatgtgaccaggaacccccacctgaacaagggcatggccttcaccctggaggagcggctgcagctgggcatccacggcctcatccccccctgcttcctgagccaggatgtgcagctgctgcgcatcatgagatactatgagcggcagcagagcgacctggacaagtacatcatcctgatgaccctgcaggacagaaatgagaagctgttctacagagtgctgaccagtgatgtggagaagttcatgcccatcgtgtacacccccaccgtgggcctggcctgccagcactacggcctgaccttcagaagaccccggggcctcttcatcaccatccatgacaagggccacctggccaccatgctgaacagctggccagaggacaacatcaaggctgtggtggtgacagatggagagcgcatcctgggcctgggggacctgggctgctacggcatgggcatccctgtgggcaagctggccctgtacacagcctgtggcggcgtgaacccccagcagtgcctgcctgtgctgctggatgtgggcaccaacaatgaggagctgctgcgggaccccctgtacatcggcctgaagcaccagagggtgcacggcaaggcctatgatgacctgctggatgagttcatgcaggccgtgacagacaagtttggcatcaactgcctgatccagtttgaggactttgccaatgccaatgccttccggctgctgaacaagtacagaaacaagtactgcatgtttaatgatgacatccagggcacagcctctgtggccgtggccggcatcctggccgccctgcgcatcaccaagaacaagctgagcaaccacgtgtttgtgttccagggcgctggggaggccgccatgggcatcgcccacctgctggtgatggccctggagaaggagggcgtgcccaaggccgaggccaccaggaagatctggatggtggacagcaagggcctgattgtgaagggccgcagccacctgaaccacgagaaggagatgtttgcccaggaccaccctgaggtgaacagcctggaggaggtggtgcggctggtgaagcccacagccatcatcggcgtggccgccatcgccggggccttcacagagcagatcctgcgggacatggccagcttccacgagcggcccatcatctttgccctgagcaaccccaccagcaaggcagaatgtacagctgagaagtgctacagagtgacagagggccggggcatctttgccagcggcagccccttcaagtctgtgaccctggaggatggcaagaccttcatccctggccagggcaacaatgcctacgtgtttcctggggtggccctgggcgtgattgctgggggcatccgccacatcccagatgagatcttcctgctgacagctgagcagatcgcccaggaggtgtctgagcagcacctgagccagggccgcctgtacccacccctgagcaccatcagagatgtgtccctgcgcatcgccatcaaggtgctggactatgcctacaagcacaacctggccagctactacccagagcccaaggacaaggaggcctttgtgcgcagcctggtgtacacctag

SEQ ID NO: 61412 - DNA, 2088 bp, Artificial Sequence
  derived and/or modified sequence
gctcctcaccccgcctgctccgcagcgggaccgcgtagacctcagctccccgagcagcgcaggtgggccagggaaggagaggaccgaggtctgccaaggaccatgggtgccgcgctggggacaggcacgcggctggctccctggccgggccgggcctgcggcgccctcccgcgctggacacccaccgcgcccgcccaaggctgccactccaagcctggcccggcgcgccctgtgcccctgaagaagcgcggatacgatgtcaccaggaaccctcatctcaacaaggggatggcctttacccttgaagaaaggctgcagcttggaatccacggcctaatcccgccctgctttctgagccaggacgtccagctcctccgaatcatgagatattacgagcggcagcagagtgacctggacaagtacatcattctcatgacactccaagaccggaacgagaagctcttctaccgagtgctgacttcggacgtggagaagttcatgccaatcgtgtacacgcctaccgtggggctggcctgtcagcactatggcctgactttccgcaggccccgtggactgttcatcaccattcatgacaaaggtcatcttgcaacaatgctgaattcttggccagaagacaatattaaggccgtggtggtgactgatggggagcgcatcctgggcctgggagacctgggctgctacggcatgggcatccctgtgggcaagctggccctgtacacggcatgcggaggggtgaacccgcagcagtgcctccctgtgctgctggacgtcggcaccaacaatgaggagctgctcagagaccctctgtacatcggcctgaaacaccagcgcgtgcacgggaaggcatacgatgacttgctggatgagttcatgcaggctgtgacagacaagtttggaataaattgcctcatccaatttgaagacttcgccaatgccaatgccttccgcctgctcaacaaataccgtaacaagtactgcatgttcaatgatgacatccaaggcacagcctccgttgctgtggcagggatcttggctgctctgcgaatcaccaagaacaagctttccaatcacgtgtttgttttccaaggtgcaggcgaggcagctatgggcattgcccacctccttgtcatggccctagagaaagaaggtgtaccgaaggcagaggccacaagaaagatctggatggtggactctaaagggctcattgtcaaggggaggagccacctgaaccatgaaaaggagatgtttgcccaagaccatcctgaagtcaactccctggaggaggtggtgaggctggtgaagcccacagccatcataggtgttgctgccatcgcaggagccttcacggagcagattctgagggacatggcctccttccacgagcgccctatcatctttgccctgagcaaccccaccagcaaggccgagtgcacggctgagaagtgctaccgggtcaccgagggccgagggatttttgccagtggaagtccttttaagagtgtgactctggaagatggcaagaccttcattcctgggcagggaaacaatgcttacgtgttccccggggtggcactgggagtcatcgccggcgggatccggcacatcccagatgagatcttcctcctgacagcagagcaaattgcccaggaagtctctgagcagcatctgtcccaggggagactctacccaccactcagcaccatccgagacgtgtctttgagaattgccatcaaagttctcgactacgcgtacaaacacaacctggcttcctactacccagagcctaaggacaaggaggcttttgtaagatccctggtctacactccagactatgactcctttacactggacagctacacttggcccaaggaagccatgaatgttcagacggtctgaggcagtctcagaggctagtatggggctagatgaagcccagagtaacacccacaatataaatgggttccaaaatggcccaagtgaatccttgtcgctgtgttttttcttttaaactttctggtgtgagaggagatgccaaggcatacagtgaataaaagccttgtctctgaa

SEQ ID NO: 61413 - DNA, 2154 bp, Artificial Sequence
  derived and/or modified sequence
caccggatctgcttccagggcttggtttcgctttgcctggctcttggctaggcctggcgccccgcgcggagccgagcaggtggcagccgaggagtggcgggggctggaacatttaaccctttgggagcacctgccctctcccagagggcgcgtccccggatcaggcccggtgccccgcagcgcgcgtgggtcctggctggctggaaggaggccctgaccttgctttctctcccgtgccaggtctgccaaggaccatgggtgccgcgctggggacaggcacgcggctggctccctggccgggccgggcctgcggcgccctcccgcgctggacacccaccgcgcccgcccaaggctgccactccaagcctggcccggcgcgccctgtgcccctgaagaagcgcggatacgatgtcaccaggaaccctcatctcaacaaggggatggcctttacccttgaagaaaggctgcagcttggaatccacggcctaatcccgccctgctttctgagccaggacgtccagctcctccgaatcatgagatattacgagcggcagcagagtgacctggacaagtacatcattctcatgacactccaagaccggaacgagaagctcttctaccgagtgctgacttcggacgtggagaagttcatgccaatcgtgtacacgcctaccgtggggctggcctgtcagcactatggcctgactttccgcaggccccgtggactgttcatcaccattcatgacaaaggtcatcttgcaacaatgctgaattcttggccagaagacaatattaaggccgtggtggtgactgatggggagcgcatcctgggcctgggagacctgggctgctacggcatgggcatccctgtgggcaagctggccctgtacacggcatgcggaggggtgaacccgcagcagtgcctccctgtgctgctggacgtcggcaccaacaatgaggagctgctcagagaccctctgtacatcggcctgaaacaccagcgcgtgcacgggaaggcatacgatgacttgctggatgagttcatgcaggctgtgacagacaagtttggaataaattgcctcatccaatttgaagacttcgccaatgccaatgccttccgcctgctcaacaaataccgtaacaagtactgcatgttcaatgatgacatccaaggcacagcctccgttgctgtggcagggatcttggctgctctgcgaatcaccaagaacaagctttccaatcacgtgtttgttttccaaggtgcaggcgaggcagctatgggcattgcccacctccttgtcatggccctagagaaagaaggtgtaccgaaggcagaggccacaagaaagatctggatggtggactctaaagggctcattgtcaaggggaggagccacctgaaccatgaaaaggagatgtttgcccaagaccatcctgaagtcaactccctggaggaggtggtgaggctggtgaagcccacagccatcataggtgttgctgccatcgcaggagccttcacggagcagattctgagggacatggcctccttccacgagcgccctatcatctttgccctgagcaaccccaccagcaaggccgagtgcacggctgagaagtgctaccgggtcaccgagggccgagggatttttgccagtggaagtccttttaagagtgtgactctggaagatggcaagaccttcattcctgggcagggaaacaatgcttacgtgttccccggggtggcactgggagtcatcgccggcgggatccggcacatcccagatgagatcttcctcctgacagcagagcaaattgcccaggaagtctctgagcagcatctgtcccaggggagactctacccaccactcagcaccatccgagacgtgtctttgagaattgccatcaaagttctcgactacgcgtacaaacacaacctggcttcctactacccagagcctaaggacaaggaggcttttgtaagatccctggtctacactccagactatgactcctttacactggacagctacacttggcccaaggaagccatgaatgttcagacggtctgaggcagtctcagaggctagtatggggctagatgaagcccagagtaacacccacaatataaatgggttccaaaatggcccaagtgaa

SEQ ID NO: 61414 - DNA, 2069 bp, Artificial Sequence
  derived and/or modified sequence
aaacgcaaatccccctctgtgcatttagtcttgccaagatggagagtctcaggcgggcattctgagctgcttcttgtcactggggaaaaccacgtgcacgcagtgctgaggcgccccacgcgcgtcctcaggggaagccaggcactgagaacaaaggttgtgggaccgctctttgaggaactcaccagctccgcgagctcgcggccgccagcgcggtccacccattggcgggagaggactcacagaccgcagctcctcaccccgcctgctccgcagcgggaccgcgtagacctcagctccccgagcagcgcaggtctgccaaggaccatgggtgccgcgctggggacaggcacgcggctggctccctggccgggccgggcctgcggcgccctcccgcgctggacacccaccgcgcccgcccaaggctgccactccaagcctggcccggcgcgccctgtgcccctgaagaagcgcggatacgatgtcaccaggaaccctcatctcaacaaggggatggcctttacccttgaagaaaggctgcagcttggaatccacggcctaatcccgccctgctttctgagccaggacgtccagctcctccgaatcatgagatattacgagcggcagcagagtgacctggacaagtacatcattctcatgacactccaagaccggaacgagaagctcttctaccgagtgctgacttcggacgtggagaagttcatgccaatcgtgtacacgcctaccgtggggctggcctgtcagcactatggcctgactttccgcaggccccgtggactgttcatcaccattcatgacaaaggtcatcttgcaacaatgctgaattcttggccagaagacaatattaaggccgtggtggtgactgatggggagcgcatcctgggcctgggagacctgggctgctacggcatgggcatccctgtgggcaagctggccctgtacacggcatgcggaggggtgaacccgcagcagtgcctccctgtgctgctggacgtcggcaccaacaatgaggagctgctcagagaccctctgtacatcggcctgaaacaccagcgcgtgcacgggaaggcatacgatgacttgctggatgagttcatgcaggctgtgacagacaagtttggaataaattgcctcatccaatttgaagacttcgccaatgccaatgccttccgcctgctcaacaaataccgtaacaagtactgcatgttcaatgatgacatccaaggcacagcctccgttgctgtggcagggatcttggctgctctgcgaatcaccaagaacaagctttccaatcacgtgtttgttttccaaggtgcaggcgaggcagctatgggcattgcccacctccttgtcatggccctagagaaagaaggtgtaccgaaggcagaggccacaagaaagatctggatggtggactctaaagggctcattgtcaaggggaggagccacctgaaccatgaaaaggagatgtttgcccaagaccatcctgaagtcaactccctggaggaggtggtgaggctggtgaagcccacagccatcataggtgttgctgccatcgcaggagccttcacggagcagattctgagggacatggcctccttccacgagcgccctatcatctttgccctgagcaaccccaccagcaaggccgagtgcacggctgagaagtgctaccgggtcaccgagggccgagggatttttgccagtggaagtccttttaagagtgtgactctggaagatggcaagaccttcattcctgggcagggaaacaatgcttacgtgttccccggggtggcactgggagtcatcgccggcgggatccggcacatcccagatgagatcttcctcctgacagcagagcaaattgcccaggaagtctctgagcagcatctgtcccaggggagactctacccaccactcagcaccatccgagacgtgtctttgagaattgccatcaaagttctcgactacgcgtacaaacacaacctggcttcctactacccagagcctaaggacaaggaggcttttgtaagatccctggtctacac

SEQ ID NO: 61415 - DNA, 2311 bp, Artificial Sequence
  derived and/or modified sequence
aaacgcaaatccccctctgtgcatttagtcttgccaagatggagagtctcaggcgggcattctgagctgcttcttgtcactggggaaaaccacgtgcacgcagtgctgaggcgccccacgcgcgtcctcaggggaagccaggcactgagaacaaaggttgtgggaccgctctttgaggaactcaccagctccgcgagctcgcggccgccagcgcggtccacccattggcgggagaggactcacagaccgcagctcctcaccccgcctgctccgcagcgggaccgcgtagacctcagctccccgagcagcgcaggtctgccaaggaccatgggtgccgcgctggggacaggcacgcggctggctccctggccgggccgggcctgcggcgccctcccgcgctggacacccaccgcgcccgcccaaggctgccactccaagcctggcccggcgcgccctgtgcccctgaagaagcgcggatacgatgtcaccaggaaccctcatctcaacaaggggatggcctttacccttgaagaaaggctgcagcttggaatccacggcctaatcccgccctgctttctgagccaggacgtccagctcctccgaatcatgagatattacgagcggcagcagagtgacctggacaagtacatcattctcatgacactccaagaccggaacgagaagctcttctaccgagtgctgacttcggacgtggagaagttcatgccaatcgtgtacacgcctaccgtggggctggcctgtcagcactatggcctgactttccgcaggccccgtggactgttcatcaccattcatgacaaaggtcatcttgcaacaatgctgaattcttggccagaagacaatattaaggccgtggtggtgactgatggggagcgcatcctgggcctgggagacctgggctgctacggcatgggcatccctgtgggcaagctggccctgtacacggcatgcggaggggtgaacccgcagcagtgcctccctgtgctgctggacgtcggcaccaacaatgaggagctgctcagagaccctctgtacatcggcctgaaacaccagcgcgtgcacgggaaggcatacgatgacttgctggatgagttcatgcaggctgtgacagacaagtttggaataaattgcctcatccaatttgaagacttcgccaatgccaatgccttccgcctgctcaacaaataccgtaacaagtactgcatgttcaatgatgacatccaaggcacagcctccgttgctgtggcagggatcttggctgctctgcgaatcaccaagaacaagctttccaatcacgtgtttgttttccaaggtgcaggcgaggcagctatgggcattgcccacctccttgtcatggccctagagaaagaaggtgtaccgaaggcagaggccacaagaaagatctggatggtggactctaaagggctcattgtcaaggggaggagccacctgaaccatgaaaaggagatgtttgcccaagaccatcctgaagtcaactccctggaggaggtggtgaggctggtgaagcccacagccatcataggtgttgctgccatcgcaggagccttcacggagcagattctgagggacatggcctccttccacgagcgccctatcatctttgccctgagcaaccccaccagcaaggccgagtgcacggctgagaagtgctaccgggtcaccgagggccgagggatttttgccagtggaagtccttttaagagtgtgactctggaagatggcaagaccttcattcctgggcagggaaacaatgcttacgtgttccccggggtggcactgggagtcatcgccggcgggatccggcacatcccagatgagatcttcctcctgacagcagagcaaattgcccaggaagtctctgagcagcatctgtcccaggggagactctacccaccactcagcaccatccgagacgtgtctttgagaattgccatcaaagttctcgactacgcgtacaaacacaacctggcttcctactacccagagcctaaggacaaggaggcttttgtaagatccctggtctacactccagactatgactcctttacactggacagctacacttggcccaaggaagccatgaatgttcagacggtctgaggcagtctcagaggctagtatggggctagatgaagcccagagtaacacccacaatataaatgggttccaaaatggcccaagtgaatccttgtcgctgtgttttttcttttaaactttctggtgtgagaggagatgccaaggcatacagtgaataaaagccttgtctctg

SEQ ID NO: 61416 - DNA, 1815 bp, Artificial Sequence
  derived and/or modified sequence
atgggcgccgccctgggcaccggcacccggctggccccctggcccggacgtgcttgtggggccctccccaggtggacccccactgccccagcacaaggttgccatagcaagcccgggcctgctcgtccggttccactgaaaaaacgtggctacgacgtgacacgcaacccccaccttaacaaagggatggcgttcacactggaagaaagactgcagctggggattcatgggctcatacccccctgctttttgtctcaagacgttcagctcttgaggattatgaggtattacgaacggcagcagagcgacctggataagtacattattctaatgacgctgcaggacagaaacgaaaaattattctatcgggtcctgactagcgacgtcgaaaaattcatgccaatcgtgtataccccaacagtgggcttagcttgtcagcactacggactgacattccgacgcccacgaggcttatttattaccattcacgataaggggcacctcgcgacaatgctgaattcttggcctgaggacaatattaaagcggtggtggtcacagatggagagagaatccttggtctgggcgaccttggctgttacggaatgggaatcccagtgggaaagttggccttgtatactgcttgtggcggagttaacccgcaacagtgcttaccagtgctgctggatgtgggcaccaacaacgaggagcttctcagagatcctctgtacatcggcctgaagcatcagagagtgcatggcaaagcctacgatgatttacttgacgagttcatgcaggccgtgaccgacaagttcggcatcaattgtctgatccagttcgaagactttgccaatgccaacgccttccggcttctgaacaagtaccggaataagtactgtatgtttaatgatgatatccaaggtaccgccagcgtggccgtcgccggcattctggccgccctgcgcatcacaaaaaacaagctatctaatcacgtctttgtcttccagggagcaggcgaagctgccatgggcattgcccacctactcgtgatggcacttgaaaaggagggagttcctaaggctgaggctactcgaaagatctggatggtcgatagcaaaggcttaattgttaaggggcggagccaccttaaccatgagaaggaaatgttcgcccaggaccaccccgaagtgaattcactagaagaagtggtccggttggtcaagcctactgctattattggcgtcgccgccatagctggtgcgttcacagaacagatcttgagggatatggcctccttccacgagcgcccaattatctttgcattgtccaatcctacgtctaaggcagagtgcacagctgagaagtgttaccgtgtaaccgaggggaggggaatttttgcgtccggcagcccttttaaatcggtaaccctggaggatggaaaaacctttatccctgggcagggcaacaatgcttacgtgttccccggagttgccctgggtgtgatcgccggcggtatccgccacatccctgacgagattttcctgctaacagccgagcagatagcccaagaggtcagtgaacagcatcttagccaaggaagactttatcctcccctgagcactatcagagacgtgagtctcaggatcgcaataaaagttctggactatgcctataagcacaacctggccagttattaccccgaacccaaagataaggaggccttcgtaagatcgcttgtatacactcccgattatgactcctttactcttgattcctacacctggccaaaggaagcaatgaatgttcaaaccgtgtag

SEQ ID NO: 61417 - DNA, 1815 bp, Artificial Sequence
  derived and/or modified sequence
atgggcgccgccctgggcaccggcacccggctggccccctggcccgggcgcgcatgtggtgcccttccccgctggaccccaaccgcgcccgcccaagggtgtcacagcaagccaggccctgcccgaccagtgcctttgaaaaaaaggggctatgacgtgactcgcaaccctcaccttaataagggaatggccttcacattggaggaacggctccagcttggcatccatggcttaatccccccctgttttttgagccaggacgtgcagttgctgaggatcatgcgctactacgaacgccaacaaagcgaccttgataaatacatcatccttatgaccttacaggaccggaatgaaaagctattttatcgcgttctaacgtccgacgtggaaaagttcatgcccatcgtctacacacccactgttgggctagcctgtcagcactacggactgacatttcggagacctagaggcctgttcattacaatacacgataagggtcacctagccactatgctcaatagctggccggaggacaacattaaggctgtggtggttacagacggggagcgaatcttgggtctgggcgacttggggtgctatggcatgggcatccccgtaggtaagttggccttatacactgcttgtgggggagtaaatcctcaacagtgtctgcctgttctgttagacgtgggaactaacaatgaagagcttttgcgagacccattgtatattgggctcaagcatcaaagggtccatggcaaagcgtacgatgacttacttgacgagttcatgcaggccgtgacagacaagttcggcatcaactgcctgatacagttcgaagatttcgctaacgctaatgcatttcgcctgctgaacaaatataggaacaaatactgtatgttcaacgatgacatacaggggaccgccagcgtggccgtggctggcatcctggccgcgctccgcatcaccaaaaataagctttctaaccacgtgttcgtgttccaaggggccggggaagcggctatgggaattgcacacctgttagttatggccctggaaaaagagggcgtgcctaaggccgaagccaccagaaagatctggatggtggattccaaggggctgattgtaaagggacgatctcacctgaaccatgaaaaagaaatgttcgcacaagatcatcccgaggtaaattcactcgaagaggtggtgcgcctggttaagccgacagcaatcattggagtggcagcaattgctggtgccttcacagaacagatcttaagagatatggccagctttcacgaaaggccaattattttcgcactgagtaatcctacctcgaaggcagaatgtacggccgagaagtgttatagagtcacagaagggagagggatcttcgcctccggatcgcccttcaagagtgtgactttggaagacggcaagaccttcataccaggccaaggtaacaacgcatacgtatttcccggggtggccctgggggtaatcgctggcgggattagacacattcctgatgaaatctttctgctgaccgccgaacagatcgctcaggaagtgagtgaacagcacttgtcacagggtcgcttgtacccacctctgagtaccatacgggatgtgtccctgcggatcgctattaaagtgctcgactacgcttataagcataacctggccagctactatcctgaacctaaagacaaggaggcctttgtgcggagcctggtttataccccagactacgattcattcacattggatagttatacttggcctaaggaagctatgaatgtgcagacagtttag

SEQ ID NO: 61418 - DNA, 1746 bp, Artificial Sequence
  derived and/or modified sequence
atgggcgccgccctgggcaccggcacccggctggccccctggcccggccgcgcgtgtggggcattgcctagatggacacctaccgcccccgctcagggctgccactctaagccgggacctgcccggccagtccctctgaaaaagaggggctacgatgtcactcggaacccccacctcaacaagggcatggcctttacactggaagaacggctacagcttggcatccacgggctgatacccccttgttttctgagtcaggacgtgcaactgctcagaattatgagatattatgaaagacagcaaagtgaccttgataaatacattattctgatgaccctacaagacaggaatgaaaaactgttctatcgagtgctaacctccgacgtggagaaattcatgccaatcgtgtacacaccaactgtaggcttggcttgtcagcactacgggcttacgtttagacgtccgcgaggtcttttcataaccatacatgataaagggcacctggccactatgttgaacagttggccagaggataacataaaagcagtggttgtgaccgatggcgaacgaatacttggacttggagatctgggatgctacggcatggggatacccgtgggcaagttggccttatatacggcctgtggtggtgttaaccctcagcagtgtcttcccgtactgttagacgttggtactaacaatgaagagctgcttcgcgacccactgtacattggtctgaagcaccagagggtgcatggcaaagcatacgacgatctgcttgacgagttcatgcaggctgttacagataaatttggcatcaactgtctgatacaatttgaagatttcgccaatgctaacgcatttagactcctgaacaaataccggaacaaatactgcatgtttaacgacgacatacagggcaccgcatctgttgctgtagcgggcattttggccgccctgaggatcacaaaaaacaagttaagtaatcatgtcttcgtgttccagggcgccggagaggcagctatgggcatcgcccatttattggtgatggccctggaaaaggagggagtcccaaaagctgaagctacacgcaagatttggatggtcgactcaaaaggactgattgtcaagggtagatcccacttgaaccacgagaaagaaatgttcgcccaagatcacccagaagtcaactccttagaggaagttgtacgtctcgtgaagcctactgcgataattggggtcgctgccatcgccggagcattcaccgaacagatcctacgggatatggcctccttccacgagagaccaatcattttcgcattgtcaaaccccaccagtaaagcagagtgcaccgctgaaaagtgctaccgggtcactgaaggtaggggcatatttgccagtggaagtcccttcaaatctgtcactctcgaagatggcaagacatttattccaggacagggtaataatgcatacgtgttccccggcgtggccctgggggttatcgccggaggtattcgacacatccctgacgagatcttcctccttaccgcggagcagatcgcacaggaggtgagtgaacagcacctctcacagggccgtctttatcctccactgagcacaatccgcgacgtgagtttgcggatcgctataaaggtgctggactacgcctacaaacataacctcgcttcatattatcccgaaccaaaggataaagaggccttcgttcgtagcctggtgtacacatag

SEQ ID NO: 61419 - DNA, 1815 bp, Artificial Sequence
  derived and/or modified sequence
atgggcgccgccctgggcaccggcacccggctggccccctggcccggccgggcctgtggggcactccctaggtggacgccaaccgcccctgctcagggttgtcattctaaacccggacccgcccggcctgtccccctgaagaaacgggggtacgatgtcactagaaacccccatctgaacaaaggaatggctttcaccctggaagaacgcctgcagctaggcatccacgggctgattcctccttgcttcctctcgcaggatgtgcagctcctgagaattatgcgatactatgaacgccagcagtcggatctcgataagtacattatcttgatgaccctgcaggaccggaacgaaaagttgttctatagggtgttgacatctgacgtagagaaattcatgcccatagtctacacccctactgtgggactggcctgtcagcactacgggctgacattcaggcggccgcgcggtctcttcattacgattcatgacaagggacacctggcgaccatgctcaatagttggcctgaggacaacataaaggccgtagttgttactgatggagaacgaatactcggcctgggcgacctgggatgctatggcatgggcatcccagtaggtaaactggcattgtacaccgcgtgcggcggggtgaacccccagcaatgtttgcccgtgcttcttgacgtcggtacaaacaacgaagaactgctgcgtgacccactttatatagggctgaagcaccagcgagtccatggcaaggcatacgacgatttgctagacgagtttatgcaagccgtaactgacaaattcggcataaattgtctgatacagtttgaggacttcgcaaatgctaatgcctttcggcttctgaacaagtaccgtaacaagtactgtatgtttaacgacgatattcagggcaccgcctcagtggcagttgccggaattcttgccgcactgcgaatcaccaagaataaactgagcaatcacgtgttcgtttttcagggggccggggaagccgctatgggaattgcgcacctccttgtgatggccctggaaaaggaaggggtgcctaaggccgaggcgacaaggaagatctggatggttgattccaagggcctcatcgtaaagggcagatcacacctcaatcatgagaaggagatgtttgcccaggaccatcctgaagtaaacagcttggaggaggtcgttcgcctggtcaagcccacagccatcatcggagtcgccgcaatagccggtgctttcacggagcagatccttagagatatggccagctttcacgagagacccatcattttcgcactgagtaacccgacatctaaggccgaatgtaccgccgagaaatgctaccgcgtgacagagggccgagggatttttgcatcaggaagtccattcaagtcagtgacactcgaagacgggaaaacatttatccccggccagggcaacaacgcctatgtgtttcccggcgtcgccctgggtgtgattgccggagggatacgacacattcctgacgagatcttcctcctcaccgctgaacaaatcgcccaggaggtttctgagcagcatctgtcgcagggcagactctaccccccactcagcaccattagagacgtgtcacttaggatcgccatcaaagtcttggattatgcttataaacacaacctggctagctattacccggagcctaaggacaaagaagcttttgttagatcactggtgtacaccccagactatgatagctttacactcgacagctatacttggcctaaagaggctatgaatgtgcagacggtttag

SEQ ID NO: 61420 - DNA, 1815 bp, Artificial Sequence
  derived and/or modified sequence
atgggcgcagcccttggcactggcacaaggctagcaccctggcctggaagggcctgtggcgctttgcccaggtggaccccaacggctccagctcaaggctgccacagtaagcctggtccagcaagacctgtgccattaaagaagcgaggctatgacgtcacccgaaatccacatctgaacaaggggatggcattcacactggaagagcggctgcaacttggaattcacggactcatccccccatgtttcctgtcccaagacgtgcaactgctgcgcatcatgagatattacgaaaggcagcagagtgatcttgacaagtacataatcctgatgacactgcaggatcgcaacgaaaagttgttctaccgggtgctcacttctgacgttgaaaaatttatgcccattgtttacacaccgaccgttggtctggcctgtcagcattacggactcacgttcagacggccacgcggactgttcattactattcacgacaaagggcacctggcgactatgttgaatagctggcccgaagacaacattaaggctgtagtggtaaccgatggcgagagaatcctaggattgggcgatctggggtgctatgggatgggcatacctgtcggcaagctcgccctatacaccgcgtgcgggggtgtgaacccccagcaatgcttaccagtgctcctcgatgtcgggactaataacgaagaattgcttagagacccattatatataggactgaagcaccaaagggtgcacggtaaggcctacgatgatttattagacgaatttatgcaggccgtcacagataaatttggtattaactgcctcatccagttcgaggattttgccaacgccaacgccttcaggctgctcaataagtatcgcaacaaatactgcatgttcaatgatgacatccagggcaccgctagcgtggcagttgccggaattctcgctgctctcagaatcacgaaaaacaagctatccaaccatgtctttgtttttcaaggcgctggggaggccgcaatggggattgctcatcttttggttatggccctggagaaagagggggtgcccaaggccgaagccactcgaaaaatttggatggtcgattcaaagggtcttatagttaaggggaggagccatcttaatcatgagaaggagatgttcgcacaagatcaccccgaggtaaactcattggaagaggtcgtcaggttggtcaaacctacagctatcattggtgtggccgctattgccggagcattcacagagcagatcctgagggacatggcgtcatttcatgagagacctattatttttgctctttctaaccccacctccaaagctgagtgtacagccgagaagtgctatagagtgaccgaggggaggggcatatttgcgtccgggtccccgttcaagtctgttacgttggaggatggcaaaacctttatccccggacaaggtaacaatgcctatgtcttccccggtgtcgccctcggagtgatcgccggtggaatcagacatattcctgatgaaatatttttgctgacggcggagcaaatcgctcaggaggtgtcagagcagcacctgagccagggacgattgtacccccctctttctactatccgggacgttagcctaaggatcgctattaaggttcttgattacgcttataaacataatctcgcttcttactatcccgaacctaaggataaggaagccttcgtgagatccctagtgtacacccccgactacgattcttttactctggactcttacacatggccaaaagaggcaatgaatgtgcagaccgtgtag

SEQ ID NO: 61421 - DNA, 1815 bp, Artificial Sequence
  derived and/or modified sequence
atgggggcagccctgggtactggtacccgcttagcaccatggccaggtcgtgcctgtggtgcacttccaaggtggactccaacagctccagcccaggggtgtcacagcaaacccggaccagccaggcctgtgcccttaaaaaaaagaggttacgatgtaacaagaaatcctcacctgaataagggaatggccttcacgctggaggagcgccttcagctgggaatccatggcctgattccaccttgcttcctgtctcaggatgtccagctgttacgcattatgagatactacgaacgccagcagtccgacctcgacaagtatataatattgatgaccctccaggacaggaacgaaaaactgttctacagggtgctgacttcagacgtcgagaaattcatgcccattgtgtataccccaacagtgggattggcttgtcagcactatggcctgacctttcgacggcctaggggactgttcattacaattcatgacaaaggtcatctcgctaccatgttgaattcatggcctgaagataatatcaaagccgtggtcgtaacagatggtgagagaattctgggacttggtgatctgggatgttacgggatgggaattcctgtgggaaagctcgcactgtacaccgcctgcggcggagtgaacccacaacagtgcttgccggttctccttgatgttggaacaaacaatgaagagctactgagagacccgctctacatcggcttgaagcatcagagggtgcacggaaaagcttacgacgacctgctggatgagtttatgcaggcagtcaccgacaagtttggcatcaattgccttatacagtttgaggatttcgccaacgctaatgcttttaggctactcaacaagtaccggaacaagtactgtatgtttaatgatgatatacaggggacagccagtgtggcagtggctggaatcctcgccgcacttagaattaccaaaaataagctctccaatcacgtgtttgtctttcagggcgcaggagaggctgccatgggcatcgcgcacctcctggtgatggccttagagaaagagggagtaccaaaagccgaggctactcgaaagatctggatggtggatagtaagggtctcattgtgaaggggaggagccacttgaatcatgagaaggaaatgttcgcccaggatcatcctgaggtgaattctttggaggaggtggtccgtcttgtcaagcccaccgccatcatcggggtggcggcaattgccggagctttcaccgaacagattctccgcgacatggccagttttcatgagcggccaattatcttcgcactgtcaaacccaacgagcaaggctgaatgtactgccgaaaagtgttaccgtgtcacggagggaaggggtatctttgctagcgggagcccttttaagagtgtgaccctggaagacggcaagactttcattcccggacaaggcaacaacgcttacgtctttcccggagtggccctgggcgtcatcgcaggaggtatccgtcatatccccgatgagatctttctgctgactgctgaacagatcgcccaagaggtgtccgaacaacacctttcccaagggagactgtaccctcccttgtcgactattagggacgtctccctgcgcatcgccataaaagtcctagactacgcatataagcacaacttggcctcttactatcctgagcctaaggacaaagaggccttcgtcaggagtcttgtgtacaccccggactacgactccttcaccttagactcatacacttggccgaaggaagccatgaacgtgcagacagtgtag

SEQ ID NO: 61422 - DNA, 1746 bp, Artificial Sequence
  derived and/or modified sequence
atgggagccgcactcggcacaggtactaggctcgcaccatggcccggaagggcctgcggagccctgccacggtggacgcccacagcgccagcccaggggtgccacagcaaaccaggcccagcaaggcctgtgcctctcaagaagaggggttatgatgtgacccgaaacccccacctgaataaaggaatggcattcaccttagaggagcgcttacaattggggattcacggtctaattcctccctgtttcctgagccaggacgtgcaattgctccggatcatgagatactatgagcggcagcagtcagatttagacaaatatattattctcatgactctccaggatcgcaacgaaaaactgttttaccgcgttctcacatctgatgttgaaaagtttatgcccatcgtgtatacccctacggtaggcctcgcatgccagcactacggcctcacattcaggcggcctcgaggcctttttattaccatccacgacaaaggccatctggcaacaatgctgaactcatggcccgaggataacattaaggcggttgtggtcactgatggcgaacgcatcctagggctcggcgacctgggttgctacggaatgggtatccctgttgggaaactggctctgtatacagcttgtggcggagtgaacccgcagcagtgcctgcccgtgcttctggacgttggaacaaataatgaggagcttctgagggatcctctctatatcggtctaaaacaccaacgggtgcatggcaaagcctatgacgacctcctggacgaatttatgcaggcagtcaccgataaattcggaatcaattgcctcatccagttcgaagattttgctaacgcgaatgcttttcgactccttaacaaatatcgtaataagtactgcatgtttaatgacgacatccaggggactgcaagcgtggctgttgccggaattctggctgccctcagaatcacgaagaataaactgtctaaccatgtcttcgtcttccaaggcgctggcgaggcagccatgggcatcgcacacctactcgtcatggcactggagaaggagggggtccctaaggccgaagcaactcggaaaatttggatggtagacagtaaaggcctcattgtaaaaggacggtcacatctcaaccatgaaaaggagatgtttgcccaggaccatcccgaagtgaactctctggaggaagttgtgcgattagtcaagccgaccgctatcatcggggtggcagctatcgccggtgcgtttactgagcagatcctgagggacatggcttcttttcacgaacgccctattatcttcgcactttcaaacccgacctctaaggccgagtgtaccgctgaaaaatgctaccgcgttaccgagggccgtggtatttttgcgtccggcagtccctttaaatctgttaccctagaggatgggaagacatttatacccggacagggaaacaatgcgtacgttttcccaggagtggccctgggagttatagccggaggaatcaggcatattcccgatgaaatctttctacttaccgcggaacagattgctcaagaagtgtctgagcaacatcttagccagggacgactttaccccccactatctactattcgcgacgtctctcttagaatcgcaatcaaagtgctggattacgcgtacaaacacaacctagccagctattatccggagcctaaagacaaagaggctttcgtgcgctcactggtttacacctag

SEQ ID NO: 61423 - DNA, 1815 bp, Artificial Sequence
  derived and/or modified sequence
atgggagccgcactcgggaccgggactcgactcgctccttggccgggacgagcgtgcggagctctccctcgctggacaccgaccgctccagctcagggctgtcatagcaagcccggaccggctcgcccagtgcctctaaaaaagcggggatatgacgtcactcggaatcctcatttgaacaaaggcatggcattcacacttgaagaacggttgcagctgggtattcacggccttattccaccctgcttcctgtcccaagacgtgcagttgctgaggataatgcgctactatgagcgtcagcaatccgatctcgacaagtatattattctgatgacactacaggacaggaacgaaaaactgttctaccgagtgctaactagcgatgtggagaagttcatgcccatcgtgtacacgcctactgttggcctggcctgtcaacactatggcctcaccttccgtcggccacgagggttatttatcactatacatgataaagggcatctcgccaccatgctcaattcctggcctgaggacaatatcaaagccgtggtcgtcacagatggtgagagaatcttgggattaggggatctagggtgttatggaatgggcattcccgttgggaagctggccctgtataccgcatgcggtggagtcaatccccagcaatgcctgcccgtactgctggacgtgggcactaataatgaagaactgttaagggatcccctgtatattggtttgaagcaccagagagtacatggtaaagcttacgatgacctgctcgacgaatttatgcaagctgtcacagataaatttggcattaattgccttatacagtttgaggatttcgcaaacgctaacgcctttcggctcttgaataaatatcgaaataagtattgcatgttcaatgacgacatccaaggcacggcatctgtcgcggtcgctggtatcttggccgcactgagaattactaagaacaagctgagtaaccacgtattcgtctttcagggagcaggagaagccgcaatgggcattgcccatttgctagtcatggccttagagaaagagggcgtgcccaaggccgaggcaaccaggaaaatatggatggtggattctaagggcctcatcgtaaagggtaggtcacacttaaatcacgaaaaggagatgtttgctcaggaccatccagaagtgaatagcctggaagaggttgtccgccttgtgaagcccactgctattatcggcgtggccgcaatcgctggagccttcacagaacaaattcttcgagatatggcaagctttcatgagcggccaataatctttgcgttgagtaacccgacgtccaaggcagagtgcactgccgaaaagtgctatcgagtgacagaagggagaggaatatttgcatctggctcgcccttcaaaagtgtcacactggaggatggaaaaacatttattccagggcagggcaataacgcctatgtgtttccgggagtcgctctgggcgtgatcgccggaggaatcagacatatacctgacgagattttcctcttaaccgcagaacagatagcccaggaggtgtcagaacagcacctctcccaaggtcggctgtatccacccctttccaccattagagatgtcagtcttagaatagcaataaaggtgctggactacgcctataagcacaatttagcttcctattatccagagcccaaagataaggaggcctttgtacgaagcctggtttacacgccagactacgattccttcacccttgacagttacacatggccgaaggaggccatgaacgtccaaactgtgtag

SEQ ID NO: 61424 - DNA, 1815 bp, Artificial Sequence
  derived and/or modified sequence
atgggcgccgccctgggcaccggcaccagactggccccctggcccggcagagcctgcggcgccctgcccagatggacccccaccgcccccgcccagggctgccacagcaagcccggccccgccagacccgtgcccctgaagaagagaggctacgacgtgaccagaaacccccacctgaacaagggcatggccttcaccctggaggagagactgcagctgggcatccacggcctgatccccccctgcttcctgagccaggacgtgcagctgctgagaatcatgagatactacgagagacagcagagcgacctggacaagtacatcatcctgatgaccctgcaggacagaaacgagaagctgttctacagagtgctgaccagcgacgtggagaagttcatgcccatcgtgtacacccccaccgtgggcctggcctgccagcactacggcctgaccttcagaagacccagaggcctgttcatcaccatccacgacaagggccacctggccaccatgctgaacagctggcccgaggacaacatcaaggccgtggtggtgaccgacggcgagagaatcctgggcctgggcgacctgggctgctacggcatgggcatccccgtgggcaagctggccctgtacaccgcctgcggcggcgtgaacccccagcagtgcctgcccgtgctgctggacgtgggcaccaacaacgaggagctgctgagagaccccctgtacatcggcctgaagcaccagagagtgcacggcaaggcctacgacgacctgctggacgagttcatgcaggccgtgaccgacaagttcggcatcaactgcctgatccagttcgaggacttcgccaacgccaacgccttcagactgctgaacaagtacagaaacaagtactgcatgttcaacgacgacatccagggcaccgccagcgtggccgtggccggcatcctggccgccctgagaatcaccaagaacaagctgagcaaccacgtgttcgtgttccagggcgccggcgaggccgccatgggcatcgcccacctgctggtgatggccctggagaaggagggcgtgcccaaggccgaggccaccagaaagatctggatggtggacagcaagggcctgatcgtgaagggcagaagccacctgaaccacgagaaggagatgttcgcccaggaccaccccgaggtgaacagcctggaggaggtggtgagactggtgaagcccaccgccatcatcggcgtggccgccatcgccggcgccttcaccgagcagatcctgagagacatggccagcttccacgagagacccatcatcttcgccctgagcaaccccaccagcaaggccgagtgcaccgccgagaagtgctacagagtgaccgagggcagaggcatcttcgccagcggcagccccttcaagagcgtgaccctggaggacggcaagaccttcatccccggccagggcaacaacgcctacgtgttccccggcgtggccctgggcgtgatcgccggcggcatcagacacatccccgacgagatcttcctgctgaccgccgagcagatcgcccaggaggtgagcgagcagcacctgagccagggcagactgtacccccccctgagcaccatcagagacgtgagcctgagaatcgccatcaaggtgctggactacgcctacaagcacaacctggccagctactaccccgagcccaaggacaaggaggccttcgtgagaagcctggtgtacacccccgactacgacagcttcaccctggacagctacacctggcccaaggaggccatgaacgtgcagaccgtgtag

SEQ ID NO: 61425 - DNA, 1746 bp, Artificial Sequence
  derived and/or modified sequence
atgggcgccgccctgggcaccggcaccagactggccccctggcccggcagagcctgcggcgccctgcccagatggacccccaccgcccccgcccagggctgccacagcaagcccggccccgccagacccgtgcccctgaagaagagaggctacgacgtgaccagaaacccccacctgaacaagggcatggccttcaccctggaggagagactgcagctgggcatccacggcctgatccccccctgcttcctgagccaggacgtgcagctgctgagaatcatgagatactacgagagacagcagagcgacctggacaagtacatcatcctgatgaccctgcaggacagaaacgagaagctgttctacagagtgctgaccagcgacgtggagaagttcatgcccatcgtgtacacccccaccgtgggcctggcctgccagcactacggcctgaccttcagaagacccagaggcctgttcatcaccatccacgacaagggccacctggccaccatgctgaacagctggcccgaggacaacatcaaggccgtggtggtgaccgacggcgagagaatcctgggcctgggcgacctgggctgctacggcatgggcatccccgtgggcaagctggccctgtacaccgcctgcggcggcgtgaacccccagcagtgcctgcccgtgctgctggacgtgggcaccaacaacgaggagctgctgagagaccccctgtacatcggcctgaagcaccagagagtgcacggcaaggcctacgacgacctgctggacgagttcatgcaggccgtgaccgacaagttcggcatcaactgcctgatccagttcgaggacttcgccaacgccaacgccttcagactgctgaacaagtacagaaacaagtactgcatgttcaacgacgacatccagggcaccgccagcgtggccgtggccggcatcctggccgccctgagaatcaccaagaacaagctgagcaaccacgtgttcgtgttccagggcgccggcgaggccgccatgggcatcgcccacctgctggtgatggccctggagaaggagggcgtgcccaaggccgaggccaccagaaagatctggatggtggacagcaagggcctgatcgtgaagggcagaagccacctgaaccacgagaaggagatgttcgcccaggaccaccccgaggtgaacagcctggaggaggtggtgagactggtgaagcccaccgccatcatcggcgtggccgccatcgccggcgccttcaccgagcagatcctgagagacatggccagcttccacgagagacccatcatcttcgccctgagcaaccccaccagcaaggccgagtgcaccgccgagaagtgctacagagtgaccgagggcagaggcatcttcgccagcggcagccccttcaagagcgtgaccctggaggacggcaagaccttcatccccggccagggcaacaacgcctacgtgttccccggcgtggccctgggcgtgatcgccggcggcatcagacacatccccgacgagatcttcctgctgaccgccgagcagatcgcccaggaggtgagcgagcagcacctgagccagggcagactgtacccccccctgagcaccatcagagacgtgagcctgagaatcgccatcaaggtgctggactacgcctacaagcacaacctggccagctactaccccgagcccaaggacaaggaggccttcgtgagaagcctggtgtacacctag

SEQ ID NO: 61426 - protein, 673 aa, Artificial Sequence
  derived and/or modified sequence
MPLNRTLSMSSLPGLEDWEDEFDLENAVLFEVAWEVANKVGGIYTVLQTKAKVTGDEWGDNYFLVGPYTEQGVRTQVELLEAPTPALKRTLDSMNSKGCKFLAQSEEKPHVVAHFHEWLAGVGLCLCRARRLPVATIFTTHATLLGRYLCAGAVDFYNNLENFNVDKEAGERQIYHRYCMERAAAHCAHVFTTVSQITAIEAQHLLKRKPDIVTPNGLNVKKFSAMHEFQNLHAQSKARIQEFVRGHFYGHLDFNLDKTLYFFIAGRYEFSNKGADVFLEALARLNYLLRVNGSEQTVVAFFIMPARTNNFNVETLKGQAVRKQLWDTANTVKEKFGRKLYESLLVGSLPDMNKMLDKEDFTMMKRAIFATQRQSFPPVCTHNMLDDSSDPILTTIRRIGLFNSSADRVKVIFHPEFLSSTSPLLPVDYEEFVRGCHLGVFPSYYEPWGYTPAECTVMGIPSISTNLSGFGCFMEEHIADPSAYGIYILDRRFRSLDDSCSQLTSFLYSFCQQSRRQRIIQRNRTERLSDLLDWKYLGRYYMSARHMALSKAFPEHFTYEPNEADAAQGYRYPRPASVPPSPSLSRHSSPHQSEDEEDPRNGPLEEDGERYDEDEEAAKDRRNIRAPEWPRRASCTSSTSGSKRNSVDTATSSSLSTPSEPLSPTSSLGEERN

SEQ ID NO: 61427 - protein, 370 aa, Artificial Sequence
  derived and/or modified sequence
MPARTNNFNVETLKGQAVRKQLWDTANTVKEKFGRKLYESLLVGSLPDMNKMLDKEDFTMMKRAIFATQRQSFPPVCTHNMLDDSSDPILTTIRRIGLFNSSADRVKVIFHPEFLSSTSPLLPVDYEEFVRGCHLGVFPSYYEPWGYTPAECTVMGIPSISTNLSGFGCFMEEHIADPSAYGIYILDRRFRSLDDSCSQLTSFLYSFCQQSRRQRIIQRNRTERLSDLLDWKYLGRYYMSARHMALSKAFPEHFTYEPNEADAAQGYRYPRPASVPPSPSLSRHSSPHQSEDEEDPRNGPLEEDGERYDEDEEAAKDRRNIRAPEWPRRASCTSSTSGSKRNSVDTATSSSLSTPSEPLSPTSSLGEERN

SEQ ID NO: 61428 - DNA, 2022 bp, Artificial Sequence
  derived and/or modified sequence
atgcccctaaatcgcactttaagcatgagcagtctacccggactcgaagactgggaagatgagtttgacctcgagaatgctgtcttgtttgaggtggcttgggaggtcgcgaataaggtcggcggaatctataccgtgctgcagaccaaggctaaggtgacgggagatgagtggggagataactacttccttgttggaccttacactgagcagggtgtgagaacgcaagtggagctgctggaggccccaactcccgcactcaagcgcacattggacagcatgaatagcaaaggttgtaaatttctggctcagagtgaagagaaaccccacgtggtggcacactttcacgagtggctggccggagtaggactatgtttatgcagggctcgccggctgccggtggctaccattttcacaacacacgccacactcctgggacgctatttgtgcgctggcgccgtggacttttacaacaatctggagaacttcaacgtagacaaagaagccggcgagcggcagatataccacaggtactgcatggaaagagctgctgctcactgcgctcatgtttttacaacagtgagtcagatcacagccatcgaggcccagcacctgttaaagcgtaaacccgatatcgtaacaccgaatggactcaatgttaaaaaattctctgctatgcatgagtttcagaacttgcacgcgcagtcgaaggcaaggatacaagaattcgtgcggggacatttctatggccatctggactttaatctcgacaagaccctgtacttcttcattgccggaaggtacgaatttagtaacaagggcgcggatgtgtttctggaagcactagcacggttaaactatctgctgcgggtgaacggcagcgaacagactgtcgttgcctttttcattatgccagccagaactaacaactttaacgtggaaaccctgaagggccaagctgtgcgaaagcaactatgggataccgcgaacacggtcaaagaaaaattcggccgcaagctctatgaaagtcttctcgttggcagcctgcctgatatgaataaaatgctggataaagaagattttaccatgatgaaacgagccatctttgccacccagcgccagagctttccccccgtgtgtactcataatatgctggacgattctagcgacccgattttgactaccattagaagaatagggctgtttaactccagcgcagaccgcgtgaaggtaatcttccaccccgagttcctgtcgtctacatcgcctcttctgcccgtggactacgaagaattcgtaaggggctgtcatttaggggtgtttccgtcctactatgagccttggggttacacccctgccgaatgcaccgtaatgggcattccttccattagcacgaaccttagtgggttcggctgcttcatggaggagcacatcgctgatccttctgcttacggaatttatattctggaccgccgttttagatcactggacgactcttgctcccaactaactagctttctgtacagtttctgtcagcagtcacggaggcagaggattatacaacgcaataggactgagcgactgtcggatctgcttgactggaagtaccttgggaggtactacatgtctgccagacatatggcattaagtaaagcatttccagaacattttacttatgagcccaatgaggcagatgccgcacaaggctaccgatatccaaggccggcttccgtgccaccttctccgtctctttctaggcattcaagcccacatcagtccgaagacgaggaggatcctcggaacggccctctagaagaggacggagagagatatgatgaagacgaggaggccgcgaaagaccgacgcaatatcagggccccagagtggcccagacgcgccagctgcacaagcagtacaagtggctctaagaggaatagcgtggataccgcgacgtcctccagcctttccactcctagtgagcccctctctcccaccagctccctgggggaagagcgaaactag

SEQ ID NO: 61429 - DNA, 1113 bp, Artificial Sequence
  derived and/or modified sequence
atgccagcccgcacaaacaacttcaatgtagagactttaaaggggcaggcggtgcgcaaacagctttgggacaccgctaataccgtgaaggagaaatttggcagaaagttgtacgaaagcctgctcgtcggatcgctgccggatatgaataagatgctggacaaagaggatttcacaatgatgaagagggccatctttgcgacccaaagacaaagcttcccaccagtctgtacgcataatatgttggacgattcatccgatccgattctgaccaccattcggcggattggtctcttcaattctagcgccgacagggtgaaagtgattttccaccctgagttcctttcctcgacttccccgttacttccggttgattatgaagagttcgtccgagggtgtcacctgggagtatttccttcctactatgaaccatggggctacacgcccgccgagtgtactgtcatgggcattccaagcatctctaccaatttgtccggattcggctgttttatggaagagcacattgccgacccaagtgcatatgggatttacattctggataggaggtttaggtccctggatgacagctgttcgcagctgacttcctttctgtactctttttgtcagcagtctcgccgccagagaatcatccagcgcaacagaactgaaaggctctccgacctgctagactggaaatacctgggaaggtattacatgagcgccaggcacatggcactgagtaaagcatttccagagcattttacatatgaacctaatgaagcagacgcggcccaggggtacagatatcccagaccagccagtgtgccccccagcccaagcctgtcccggcactcatctccacaccagtcagaggacgaagaagacccccgcaacggcccacttgaagaggacggtgagcgctacgatgaagatgaagaggcagcaaaggaccggagaaatataagagctccagagtggccaaggagggccagctgtaccagctctacaagcggttcgaagaggaatagcgttgatacagctaccagttcctcattgtccactccttctgaaccactgtcaccaacatccagtctgggggaggagcggaactag

SEQ ID NO: 61430 - DNA, 3378 bp, Artificial Sequence
  derived and/or modified sequence
cagtgacgctgcggcctccttctgcctaggtcccaacgcttcggggcaggggtgcggtcttgcaataggaagccgagcgtcttgcaagcttcccgtcgggcaccagctactcggccccgcaccctacctggtgcattccctagacacctccggggtccctacctggagatccccggagccccccttcctgcgccagccatgcctttaaaccgcactttgtccatgtcctcactgccaggactggaggactgggaggatgaattcgacctggagaacgcagtgctcttcgaagtggcctgggaggtggctaacaaggtgggtggcatctacacggtgctgcagacgaaggcgaaggtgacaggggacgaatggggcgacaactacttcctggtggggccgtacacggagcagggcgtgaggacccaggtggaactgctggaggcccccaccccggccctgaagaggacactggattccatgaacagcaagggctgcaagttcctggcacagagtgaggagaagccacatgtggttgctcacttccatgagtggttggcaggcgttggactctgcctgtgtcgtgcccggcgactgcctgtagcaaccatcttcaccacccatgccacgctgctggggcgctacctgtgtgccggtgccgtggacttctacaacaacctggagaacttcaacgtggacaaggaagcaggggagaggcagatctaccaccgatactgcatggaaagggcggcagcccactgcgctcacgtcttcactactgtgtcccagatcaccgccatcgaggcacagcacttgctcaagaggaaaccagatattgtgacccccaatgggctgaatgtgaagaagttttctgccatgcatgagttccagaacctccatgctcagagcaaggctcgaatccaggagtttgtgcggggccatttttatgggcatctggacttcaacttggacaagaccttatacttctttatcgccggccgctatgagttctccaacaagggtgctgacgtcttcctggaggcattggctcggctcaactatctgctcagagtgaacggcagcgagcagacagtggttgccttcttcatcatgccagcgcggaccaacaatttcaacgtggaaaccctcaaaggccaagctgtgcgcaaacagctttgggacacggccaacacggtgaaggaaaagttcgggaggaagctttatgaatccttactggttgggagccttcccgacatgaacaagatgctggataaggaagacttcactatgatgaagagagccatctttgcaacgcagcggcagtctttcccccctgtgtgcacccacaatatgctggatgactcctcagaccccatcctgaccaccatccgccgaatcggcctcttcaatagcagtgccgacagggtgaaggtgattttccacccggagttcctctcctccacaagccccctgctccctgtggactatgaggagtttgtccgtggctgtcaccttggagtcttcccctcctactatgagccttggggctacacaccggctgagtgcacggttatgggaatccccagtatctccaccaatctctccggcttcggctgcttcatggaggaacacatcgcagacccctcagcttacggtatctacattcttgaccggcggttccgcagcctggatgattcctgctcgcagctcacctccttcctctacagtttctgtcagcagagccggcggcagcgtatcatccagcggaaccgcacggagcgcctctccgaccttctggactggaaatacctaggccggtactatatgtctgcgcgccacatggcgctgtccaaggcctttccagagcacttcacctacgagcccaacgaggcggatgcggcccaggggtaccgctacccacggccagcctcggtgccaccgtcgccctcgctgtcacgacactccagcccgcaccagagtgaggacgaggaggatccccggaacgggccgctggaggaagacggcgagcgctacgatgaggacgaggaggccgccaaggaccggcgcaacatccgtgcaccagagtggccgcgccgagcgtcctgcacctcctccaccagcggcagcaagcgcaactctgtggacacggccacctccagctcactcagcaccccgagcgagcccctcagccccaccagctccctgggcgaggagcgtaactaagtccgccccaccacactccccgcctgtcctgcctctctgctccagagagaggatgcagaggggtgctgctcctaaacccccgctccagatctgcactgggtgtggccccgcagtgcccccacccagtccgccaaacactccaccccctccagctccagtttccaagttcctgcactccagaatccacaaagccgtgcctttctctggctccagaatatgcataatcagcgccctggagtcccctgggcctggaccgcttcccagaggccaggaatctgccattactctgcggtggtgccagaggttttaggaaacctggcatggtgctttcaggtctggggcttttagagccccccgtgtggcttacaaattctacagcatacagagcaggccacgctcaggcccggcatgcgggccaccaagttctggaaaccacgtggtgtccctgcgaatggggcgatcaagtccagagccggggcactttcagagtttgaaggtaactgagagcagatggtcctccatttcaactccagaagtggggctctgggagggatgttctagccctccctggcatgtcagagccaggctctgcctggaggatccctccatccggctcctgtcatcccctacactttggccaagcaagaggtggtagaaccacttggctgctcattccttctggaggacacacagtctcagtccagatgccttcctgtctttctggccctttctggaccagatcctactcttcctttctaaatctgagatctccctccagggaatccgcctgcagaggacagagctggctgtcttcccccacccctaacctggcttattcccaactgctctgcccactgtgaaaccactaggttctaggtcctggcttctagatctggaaccttaccacgttactgcatactgatccctttcccatgatccagaactgaggtcactgggttctagaacccccacatttacctcgaggctcttccatccccaaactgtgccctgccttcagctttggtgaaagggagggcccctcatgtgtgctgtgctgtgtctgcaccgcttggtttgcagttgagaggggagggcaggaggggtgtgattggagtgtgtccggagatgagatgaaaaaaatacatctatatttaagaa

SEQ ID NO: 61431 - DNA, 1503 bp, Artificial Sequence
  derived and/or modified sequence
agtgacgctgcggcctccttctgcctaggtcccaacgcttcggggcaggggtgcggtcttgcaataggaagccgagcgtcttgcaagcttcccgtcgggcatctggacttcaacttggacaagaccttatacttctttatcgccggccgctatgagttctccaacaagggtgctgacgtcttcctggaggcattggctcggctcaactatctgctcagagtgaacggcagcgagcagacagtggttgccttcttcatcatgccagcgcggaccaacaatttcaacgtggaaaccctcaaaggccaagctgtgcgcaaacagctttgggacacggccaacacggtgaaggaaaagttcgggaggaagctttatgaatccttactggttgggagccttcccgacatgaacaagatgctggataaggaagacttcactatgatgaagagagccatctttgcaacgcagcggcagtctttcccccctgtgtgcacccacaatatgctggatgactcctcagaccccatcctgaccaccatccgccgaatcggcctcttcaatagcagtgccgacagggtgaaggtgattttccacccggagttcctctcctccacaagccccctgctccctgtggactatgaggagtttgtccgtggctgtcaccttggagtcttcccctcctactatgagccttggggctacacaccggctgagtgcacggttatgggaatccccagtatctccaccaatctctccggcttcggctgcttcatggaggaacacatcgcagacccctcagcttacggtatctacattcttgaccggcggttccgcagcctggatgattcctgctcgcagctcacctccttcctctacagtttctgtcagcagagccggcggcagcgtatcatccagcggaaccgcacggagcgcctctccgaccttctggactggaaatacctaggccggtactatatgtctgcgcgccacatggcgctgtccaaggcctttccagagcacttcacctacgagcccaacgaggcggatgcggcccaggggtaccgctacccacggccagcctcggtgccaccgtcgccctcgctgtcacgacactccagcccgcaccagagtgaggacgaggaggatccccggaacgggccgctggaggaagacggcgagcgctacgatgaggacgaggaggccgccaaggaccggcgcaacatccgtgcaccagagtggccgcgccgagcgtcctgcacctcctccaccagcggcagcaagcgcaactctgtggacacggccacctccagctcactcagcaccccgagcgagcccctcagccccaccagctccctgggcgaggagcgtaactaagtccgccccaccacactccccgcctgtcctgcctctctgctccagagagaggatgcagaggggtgctgctcctaaacccccgctccagatctgcactgggtgtggccccgcagtgcccccacccagtccgcc

SEQ ID NO: 61432 - DNA, 2022 bp, Artificial Sequence
  derived and/or modified sequence
atgcccctgaacagaaccctgtccatgagcagcctgcccggcctggaggactgggaggatgaatttgacctggagaatgctgtgctgtttgaggtggcctgggaggtggccaacaaggtgggcggcatctacacagtgctgcagaccaaggccaaggtgactggagatgagtggggagacaactacttcctggtgggcccctacacagagcagggcgtgaggacccaggtggagctgctggaggcccccaccccagccctgaagaggaccctggacagcatgaacagcaagggctgcaagttcctggcccagagcgaggagaagccccacgtggtggcccacttccacgagtggctggccggcgtgggcctgtgcctgtgccgggcccggcggctgcctgtggccaccatcttcaccacccacgccaccctgctgggccgctacctgtgtgccggggctgtggacttctacaacaacctggagaacttcaacgtggacaaggaggccggggagcggcagatctaccaccgctactgcatggagagagctgctgcccactgtgcccacgtgttcaccaccgtgtcccagatcacagccatcgaggcccagcacctgctgaagaggaagccagacatcgtgacccccaacggcctgaatgtgaagaagttcagcgccatgcatgagttccagaacctgcacgcccagagcaaggcccgcatccaggagtttgtgcggggccacttctacggccacctggacttcaacctggacaagaccctgtacttcttcatcgccggccgctatgagttcagcaacaagggagcagatgtgttcctggaggccctggcccggctgaactacctgctgcgggtgaatggcagcgagcagacagtggtggccttcttcatcatgcctgcccggaccaacaacttcaacgtggagaccctgaagggccaggccgtgaggaagcagctgtgggacacagccaacacagtgaaggagaagtttggaaggaagctgtatgagagcctgctggtgggcagcctgcctgacatgaacaagatgctggacaaggaggacttcaccatgatgaagagggccatctttgccacccagaggcagagcttcccccctgtgtgcacccacaacatgctggatgacagcagtgaccccatcctgaccaccatcagaagaattggcctcttcaacagcagcgctgacagagtgaaggtgatcttccaccctgagttcctgagcagcaccagccccctgctgcctgtggactatgaggagtttgtgcggggctgccacctgggcgtcttccccagctactatgagccctggggctacaccccagctgagtgcaccgtgatgggcatccccagcatcagcaccaacctgagcggcttcggctgcttcatggaggagcacatcgctgaccccagcgcctacggcatctacatcctggaccggcgcttccgcagcctggatgacagctgcagccagctgaccagcttcctgtacagcttctgccagcagagccggcggcagaggatcatccagaggaacagaacagagcggctgagtgacctgctggactggaagtacctgggccgctactacatgtctgcccggcacatggccctgagcaaggccttccctgagcacttcacctatgagcccaatgaagcagatgctgcccagggctaccgctaccccaggcctgcctctgtgccccccagccccagcctgagccgccacagcagcccccaccagagtgaagatgaggaggaccccagaaatggccccctggaggaggatggagagagatatgatgaagatgaggaggccgccaaggacagaagaaacatccgggcccctgagtggccccggcgggccagctgcaccagcagcaccagcggcagcaagaggaacagcgtggacacagccaccagcagcagcctgagcaccccatctgagcccctgagccccaccagcagcctgggggaggagaggaactag

SEQ ID NO: 61433 - DNA, 1113 bp, Artificial Sequence
  derived and/or modified sequence
atgcctgcccggaccaacaacttcaacgtggagaccctgaagggccaggccgtgaggaagcagctgtgggacacagccaacacagtgaaggagaagtttggaaggaagctgtatgagagcctgctggtgggcagcctgcctgacatgaacaagatgctggacaaggaggacttcaccatgatgaagagggccatctttgccacccagaggcagagcttcccccctgtgtgcacccacaacatgctggatgacagcagtgaccccatcctgaccaccatccgccgcatcggcctcttcaacagcagcgctgacagagtgaaggtgatcttccaccctgagttcctgagcagcaccagccccctgctgcctgtggactatgaggagtttgtgcggggctgccacctgggcgtcttccccagctactatgagccctggggctacaccccagcagaatgtactgtgatgggcatccccagcatcagcaccaacctgagcggcttcggctgcttcatggaggagcacatcgctgaccccagcgcctacggcatctacatcctggaccggcgcttccgcagcctggatgacagctgcagccagctgaccagcttcctgtacagcttctgccagcagagccggcggcagaggatcatccagaggaacagaacagagcggctgagtgacctgctggactggaagtacctgggccgctactacatgtctgcccggcacatggccctgagcaaggccttccctgagcacttcacctatgagcccaatgaagcagatgctgcccagggctaccgctaccccaggcctgcctctgtgccccccagccccagcctgagccgccacagcagcccccaccagagtgaagatgaggaggaccccagaaatggccccctggaggaggatggagagagatatgatgaagatgaggaggccgccaaggacagaagaaacatccgggcccctgagtggccccggcgggccagctgcaccagcagcaccagcggcagcaagagaaattctgtggacacagccaccagcagcagcctgagcacccccagcgagcccctgagccccaccagcagcctgggggaggagagaaattag

SEQ ID NO: 61434 - DNA, 2022 bp, Artificial Sequence
  derived and/or modified sequence
atgcccctgaaccggaccctgagcatgagcagcctgcccggcctggaggactgggaggacgagtttgacttggaaaatgctgtactgttcgaggtggcctgggaggtggccaacaaggtgggtggcatctatactgtgctgcagacaaaggcgaaagtgacaggagacgaatggggggacaattactttttagtggggccctacactgaacagggcgtgaggacacaggtggagctgctggaggcaccaacacctgctttgaagcgcacactagattctatgaactccaaggggtgcaaatttctagcacagtctgaggaaaaacctcacgttgttgcacactttcacgagtggctggccggggtcgggctctgcctgtgcagagcccgccgcttaccggtggctaccattttcactacccatgctaccctcttggggcgctacctttgcgccggggctgtggacttctataataacttagaaaacttcaatgtcgacaaggaagctggcgaaagacaaatctatcacagatactgcatggaacgcgccgccgctcactgtgctcacgtattcaccacagtatctcagataactgcaattgaggcgcaacacttactgaaacgcaaacctgacatcgtcacgccaaatggcctgaacgttaaaaaattctccgccatgcacgagttccagaacttgcacgcccagtctaaggctcggattcaggaatttgtcaggggtcacttctacggccaccttgacttcaatcttgataagacactgtacttctttatcgcaggacggtacgaattttccaacaagggcgcagatgtattcttagaagcactcgcacggttgaactacctgctgagggtgaatggatcagagcagaccgtcgtggcatttttcattatgcctgcgcgcactaacaactttaacgtggaaaccctgaaaggacaagcggtccgaaagcagctatgggacacagctaataccgtcaaagaaaaattcggcagaaagttatatgagtctctgcttgtggggtctctgccggatatgaataaaatgctagataaagaagatttcaccatgatgaagagagcaattttcgccacgcaacggcagtccttcccaccagtgtgcacccataatatgctcgatgattcatcggacccgattttgactactattagacggataggactttttaacagttctgcagacagggtgaaggttatcttccaccctgaatttctgagttccacgtctcctttactccccgtggattacgaagaatttgtgcgcggctgtcacctgggcgtcttcccctcctattatgaaccctggggatatacaccagccgagtgtacagtgatgggtataccctctatctctacaaacctgtctgggtttggatgcttcatggaagaacacatcgcagatccttccgcctatggtatttatatcctggacaggcgctttcggagtctggatgattcctgttcacagcttacatctttcctgtattcattttgccagcaatcccggcgccagcgaatcattcaaagaaatagaaccgaacggctgtccgacttgctggactggaagtacctggggagatactatatgtctgctagacacatggccctgagcaaggcatttcctgagcactttacctatgaacctaatgaggctgacgcagcgcaaggttacaggtatcccagaccagcctctgtcccgccatcccccagtctgagcaggcactcatcgccccatcagagtgaggatgaggaggatcccagaaatgggcccctcgaagaagatggtgaacgatatgacgaagacgaggaagccgccaaagatcgaagaaatatccgggcccccgaatggccacgtagagcctcttgtacgtcttccacgagcggcagcaagcgcaattcagtagacaccgctacctcttcaagcctttctactccatccgaaccattatcaccaacatcgagtctgggagaagaaagaaattag

SEQ ID NO: 61435 - DNA, 1113 bp, Artificial Sequence
  derived and/or modified sequence
atgcccgcccggaccaacaacttcaacgtggagaccctgaagggccaggccgttcggaaacaactgtgggacactgccaacacagtgaaggagaaatttggtagaaaactgtatgagagcctgttggtgggcagcctgcccgatatgaacaagatgttggataaggaggatttcaccatgatgaagcgcgctatcttcgccacgcagcgacagagctttccaccggtttgtacccacaacatgttggacgattcgagcgatccgattctgaccactataaggcggataggcctgtttaatagctcagcggatagggtcaaagtcatctttcatccagagtttctctcttccacctccccactgctgcctgtcgactacgaggagtttgtgcgcgggtgtcacctaggtgtctttccttcctattacgaaccgtgggggtacactcccgctgagtgcacggttatggggatcccgtcaatcagtaccaacctgtccgggtttgggtgctttatggaggagcatatcgcagatccctccgcatatggaatatacattttagacaggcgctttagatccctggatgatagttgtagccagctgaccagcttcctctatagcttttgtcagcagagtcggcggcagagaatcatacagcggaacagaacagagaggttaagcgatcttctagattggaagtatcttggaaggtattacatgtctgctcgtcacatggccctgtcaaaagcatttcctgaacatttcacatatgagcccaacgaggctgacgcggcccaggggtaccgttacccccgccccgccagcgtcccaccttcccccagtctttctcgacacagttctccacaccaatctgaagacgaagaggatccacggaacggacccctggaggaggacggggagcgatacgacgaagatgaggaggcggccaaggacaggcggaacatcagagctcccgagtggccccgccgggcgagctgtactagctccactagcggttccaaaaggaacagcgtagataccgccaccagctccagcttgtctacacccagcgagccactgtcccctacttcaagtctaggcgaggagagaaattag

SEQ ID NO: 61436 - DNA, 2022 bp, Artificial Sequence
  derived and/or modified sequence
atgcctcttaacaggacacttagtatgagttccctcccgggtttggaggattgggaagacgagtttgacttggaaaatgccgtcctctttgaagtcgcctgggaggtcgctaacaaggtggggggaatttacacggtgcttcagacaaaagccaaggtaaccggcgacgagtggggtgacaattatttccttgtgggcccttataccgaacagggggtcagaacacaggtcgagctgctggaggcacccactcccgctctgaaacgcaccctggacagcatgaactcaaaaggttgcaagttcctcgcgcaaagcgaggagaagcctcatgttgtggcacattttcacgagtggttggccggtgtgggtctgtgtctttgtcgcgcacggcgtctccctgtggctaccattttcaccacacacgccacactactcgggcgatacctgtgtgctggcgcagtagatttctacaataatctggagaattttaacgttgataaagaggcgggagagagacagatttatcatagatactgtatggagcgggctgccgcacactgtgcgcacgtgttcacgacagtcagccagataaccgccattgaggcacagcatctgttaaagcgaaagccggacattgttaccccaaatgggctcaacgtgaagaaattctccgctatgcacgagtttcagaacctgcacgcccagtctaaagctaggatccaggagttcgtgcggggtcacttctacgggcatctggattttaatttggacaagaccctttactttttcattgctggacgctacgaattttcaaataagggagctgacgttttccttgaggctctcgctaggctgaattatctgctgcgcgtcaatggcagcgagcagacggtggtagcattttttatcatgcccgcacgcactaataacttcaacgtcgagactctcaaaggccaagcggtgcgcaagcagttatgggacaccgccaacaccgtcaaagagaagttcggacgtaagctctatgaaagcctgctggttggaagcctccctgacatgaataaaatgctggataaggaggatttcacaatgatgaaaagagctattttcgctactcagcgccagtcttttcctccagtttgcacgcataacatgctggacgacagctcggatcccatactgaccaccattcgcaggatcggtctgttcaactcttcagcagaccgcgtgaaggtgatatttcatccagaattcctctccagtacaagtcccttgctccctgtggattacgaggaatttgtgcgcggttgccaccttggagtttttccaagttattacgaaccctggggatatacgcctgccgagtgcacggtgatggggatcccgtcaatcagcactaatctgtcagggtttggctgttttatggaggaacacatagctgatccatctgcgtacgggatttatatcctggaccgacgatttaggtcgctggacgattcttgctctcagcttacctcatttctgtattcgttttgtcagcaatcacgcaggcagcgtattattcagcggaatcgcaccgagaggctgagcgacctcctcgattggaagtacctcggtcggtattatatgtctgcgagacacatggcacttagcaaggcttttcctgagcacttcacgtacgagcccaatgaagccgacgcggcacaggggtacaggtacccaagaccagctagtgtgccgccatctcccagcctgagccggcattcctccccacaccagtcagaggacgaggaggatccccgtaatggccctctggaggaggatggcgagaggtacgacgaagatgaggaagccgcaaaggaccgccgaaatatccgtgctcccgagtggccgcgtagggcatcttgcacaagttctacaagcggcagcaagcgcaacagtgttgacactgccacaagctcctcactctcaacccccagcgagccactttcgcccacttcctccctgggtgaagaacgcaattag

SEQ ID NO: 61437 - DNA, 1113 bp, Artificial Sequence
  derived and/or modified sequence
atgccagctcggacgaataacttcaatgttgagactctaaaaggccaggccgtacgtaaacagctatgggacaccgccaataccgttaaagagaaattcggcaggaaactgtacgagtccctgctggtaggctcactgccggacatgaataagatgctcgacaaggaagatttcacaatgatgaaacgcgcaatctttgccacacagcgtcagagctttccacccgtttgcactcataatatgctggacgacagcagcgatcctattctcacgaccatccgaaggatcggactgtttaatagcagcgctgatagggttaaagtaatcttccacccggaatttctcagctccacttcacctctgctgcctgtggactatgaagagttcgttaggggctgccatctgggggtcttccctagctattacgagccttgggggtatacacccgctgaatgcactgtcatggggatacctagtataagtactaacctttctgggtttggctgtttcatggaggagcacatcgccgacccgagtgcttacggcatttatatcttagataggcgcttcagatcactcgacgatagctgtagtcaattaacatccttcctgtactcgttctgtcagcaaagtcggcgacagagaatcatccagagaaacagaaccgaacggctcagcgaccttcttgactggaagtatctcgggcgttattacatgagtgcacggcatatggctttgtcaaaagcattcccagagcattttacatatgagcctaacgaggcagatgctgcccagggttacagatacccaaggcccgcttccgttcccccttctccgtcacttagcagacatagcagcccacaccagagcgaagacgaggaggaccccagaaacggaccactcgaggaagatggagagagatatgatgaggatgaggaagcggcaaaggacaggaggaacattagggccccagagtggcctaggcgcgcaagctgcacctccagtacttccgggagcaagagaaacagtgtcgacacagctacaagtagcagtctttcgaccccatccgaaccactatccccaaccagctctctcggtgaggaacggaactag

SEQ ID NO: 61438 - DNA, 2022 bp, Artificial Sequence
  derived and/or modified sequence
atgcccctgaacagaaccctgagcatgagcagcctgcccggcctggaggactgggaggacgagttcgacctggagaacgccgtgctgttcgaggtggcctgggaggtggccaacaaggtgggcggcatctacaccgtgctgcagaccaaggccaaggtgaccggcgacgagtggggcgacaactacttcctggtgggcccctacaccgagcagggcgtgagaacccaggtggagctgctggaggcccccacccccgccctgaagagaaccctggacagcatgaacagcaagggctgcaagttcctggcccagagcgaggagaagccccacgtggtggcccacttccacgagtggctggccggcgtgggcctgtgcctgtgcagagccagaagactgcccgtggccaccatcttcaccacccacgccaccctgctgggcagatacctgtgcgccggcgccgtggacttctacaacaacctggagaacttcaacgtggacaaggaggccggcgagagacagatctaccacagatactgcatggagagagccgccgcccactgcgcccacgtgttcaccaccgtgagccagatcaccgccatcgaggcccagcacctgctgaagagaaagcccgacatcgtgacccccaacggcctgaacgtgaagaagttcagcgccatgcacgagttccagaacctgcacgcccagagcaaggccagaatccaggagttcgtgagaggccacttctacggccacctggacttcaacctggacaagaccctgtacttcttcatcgccggcagatacgagttcagcaacaagggcgccgacgtgttcctggaggccctggccagactgaactacctgctgagagtgaacggcagcgagcagaccgtggtggccttcttcatcatgcccgccagaaccaacaacttcaacgtggagaccctgaagggccaggccgtgagaaagcagctgtgggacaccgccaacaccgtgaaggagaagttcggcagaaagctgtacgagagcctgctggtgggcagcctgcccgacatgaacaagatgctggacaaggaggacttcaccatgatgaagagagccatcttcgccacccagagacagagcttcccccccgtgtgcacccacaacatgctggacgacagcagcgaccccatcctgaccaccatcagaagaatcggcctgttcaacagcagcgccgacagagtgaaggtgatcttccaccccgagttcctgagcagcaccagccccctgctgcccgtggactacgaggagttcgtgagaggctgccacctgggcgtgttccccagctactacgagccctggggctacacccccgccgagtgcaccgtgatgggcatccccagcatcagcaccaacctgagcggcttcggctgcttcatggaggagcacatcgccgaccccagcgcctacggcatctacatcctggacagaagattcagaagcctggacgacagctgcagccagctgaccagcttcctgtacagcttctgccagcagagcagaagacagagaatcatccagagaaacagaaccgagagactgagcgacctgctggactggaagtacctgggcagatactacatgagcgccagacacatggccctgagcaaggccttccccgagcacttcacctacgagcccaacgaggccgacgccgcccagggctacagataccccagacccgccagcgtgccccccagccccagcctgagcagacacagcagcccccaccagagcgaggacgaggaggaccccagaaacggccccctggaggaggacggcgagagatacgacgaggacgaggaggccgccaaggacagaagaaacatcagagcccccgagtggcccagaagagccagctgcaccagcagcaccagcggcagcaagagaaacagcgtggacaccgccaccagcagcagcctgagcacccccagcgagcccctgagccccaccagcagcctgggcgaggagagaaactag

SEQ ID NO: 61439 - DNA, 1113 bp, Artificial Sequence
  derived and/or modified sequence
atgcccgccagaaccaacaacttcaacgtggagaccctgaagggccaggccgtgagaaagcagctgtgggacaccgccaacaccgtgaaggagaagttcggcagaaagctgtacgagagcctgctggtgggcagcctgcccgacatgaacaagatgctggacaaggaggacttcaccatgatgaagagagccatcttcgccacccagagacagagcttcccccccgtgtgcacccacaacatgctggacgacagcagcgaccccatcctgaccaccatcagaagaatcggcctgttcaacagcagcgccgacagagtgaaggtgatcttccaccccgagttcctgagcagcaccagccccctgctgcccgtggactacgaggagttcgtgagaggctgccacctgggcgtgttccccagctactacgagccctggggctacacccccgccgagtgcaccgtgatgggcatccccagcatcagcaccaacctgagcggcttcggctgcttcatggaggagcacatcgccgaccccagcgcctacggcatctacatcctggacagaagattcagaagcctggacgacagctgcagccagctgaccagcttcctgtacagcttctgccagcagagcagaagacagagaatcatccagagaaacagaaccgagagactgagcgacctgctggactggaagtacctgggcagatactacatgagcgccagacacatggccctgagcaaggccttccccgagcacttcacctacgagcccaacgaggccgacgccgcccagggctacagataccccagacccgccagcgtgccccccagccccagcctgagcagacacagcagcccccaccagagcgaggacgaggaggaccccagaaacggccccctggaggaggacggcgagagatacgacgaggacgaggaggccgccaaggacagaagaaacatcagagcccccgagtggcccagaagagccagctgcaccagcagcaccagcggcagcaagagaaacagcgtggacaccgccaccagcagcagcctgagcacccccagcgagcccctgagccccaccagcagcctgggcgaggagagaaactag

SEQ ID NO: 61440 - protein, 156 aa, Artificial Sequence
  derived and/or modified sequence
MVDILGERHLVTCKGATVEAEAALQNKVVALYFAAARCAPSRDFTPLLCDFYTALVAEARRPAPFEVVFVSADGSSQEMLDFMRELHGAWLALPFHDPYRHELRKRYNVTAIPKLVIVKQNGEVITNKGRKQIRERGLACFQDWVEAADIFQNFSV

SEQ ID NO: 61441 - DNA, 471 bp, Artificial Sequence
  derived and/or modified sequence
atggtggacatcctgggcgagagacacctggtgacctgcaagggcgccaccgtggaggccgaggccgccctgcagaacaaggtggtggccctgtacttcgccgccgccagatgcgcccccagcagagacttcacccccctgctgtgcgacttctacaccgccctggtggccgaggccagaagacccgcccccttcgaggtggtgttcgtgagcgccgacggcagcagccaggagatgctggacttcatgagagagctgcacggcgcctggctggccctgcccttccacgacccctacagacacgagctgagaaagagatacaacgtgaccgccatccccaagctggtgatcgtgaagcagaacggcgaggtgatcaccaacaagggcagaaagcagatcagagagagaggcctggcctgcttccaggactgggtggaggccgccgacatcttccagaacttcagcgtgtag

SEQ ID NO: 61442 - DNA, 471 bp, Artificial Sequence
  derived and/or modified sequence
atggttgatattctaggtgagcgccaccttgtcacgtgcaaaggcgccacagttgaagcggaggccgctctgcagaataaggttgttgctctttatttcgcagccgctagatgcgccccctcaagagatttcacaccactcctatgcgatttttacacagcgctggtggcagaagctagacgcccagcaccctttgaggttgttttcgtgagtgccgatggctcctcacaggagatgttagattttatgcgagagttgcacggagcctggttggccctaccattccatgatccctaccggcacgagctccgaaagcgctacaatgtgaccgctatccccaaactcgtcatagtcaagcagaatggcgaggttataacgaacaaggggaggaaacagattagggaacgtgggctcgcctgctttcaggattgggtggaggcagctgatatctttcaaaacttctcggtgtag

SEQ ID NO: 61443 - DNA, 471 bp, Artificial Sequence
  derived and/or modified sequence
atggtggacatcctgggggagcggcacctggtgacctgcaagggggccaccgtggaggccgaggccgccctgcagaacaaggtggtggccctgtactttgctgctgcccgctgtgcccccagccgggacttcacccccctgctgtgtgacttctacacagccctggtggccgaggcccggcggcctgccccctttgaggtggtgtttgtgtctgcagatggcagcagccaggagatgctggacttcatgagggagctgcatggagcctggctggccctgcccttccatgacccctacagacatgagctgaggaagcgctacaacgtgacagccatccccaagctggtgattgtgaagcagaatggagaggtgatcaccaacaagggcaggaagcagatccgggagcggggcctggcctgcttccaggactgggtggaggccgctgacatcttccagaacttctctgtgtag

SEQ ID NO: 61444 - DNA, 471 bp, Artificial Sequence
  derived and/or modified sequence
atggtggacatcctgggcgagcggcacctggtgacctgcaagggcgcaaccgtggaggccgaggctgccctccaaaacaaagttgtggcactgtactttgccgcagcacgctgcgctccaagtagagactttaccccactcttgtgcgacttctataccgctctggtcgccgaagcccgcagaccagcgccattcgaggttgtttttgtgtccgcagacgggagctctcaggaaatgctggattttatgcgcgagctacacggggcctggcttgcactgcctttccacgacccatacaggcacgagctaagaaaacgatacaatgtgacagcaatccccaaactggtgattgtcaaacagaatggtgaggttattaccaataaaggaagaaagcagatccgtgaaagaggcttggcttgcttccaggattgggtagaggccgccgacatttttcaaaacttcagcgtttag

SEQ ID NO: 61445 - DNA, 805 bp, Artificial Sequence
  derived and/or modified sequence
aggagtgtgggcggggcgcagttgggggagggtgcagagacctgagggcttgaggttgcctggctggccccgctcccagaggcgggtgccgcgctgtcgcccaggtatctggggtctctggtgtctgagtgtctcattgtcggcgcgaacacaattgctccagccacaggcgaggcctggccaaggtgtgggcgcatctggggcaggtcttgagaggtccagcgcccggtggtgcggacagaggcggggcaccgcggcgctcgccgccgcctccccgcaggtgatcatcctcctgcaggtgtcctcgggtctcaggtggctgcgtgtctgcgccatggttgacattctgggcgagcggcacctggtgacctgtaagggcgcgacggtggaggccgaggcggcgctgcagaacaaggtggtggcactgtacttcgcggcggcccggtgcgcgccgagccgcgacttcacgccgctgctctgcgacttctatacggcgctggtggccgaggcgcggcggcccgcgcccttcgaagtggtcttcgtgtcagccgacggcagctcccaggagatgctggacttcatgcgcgagctgcatggcgcctggctggcgctgcccttccacgacccctaccggcatgagctgaggaagaggtacaacgtcacagccatccccaagcttgtgattgtgaaacaaaatggggaggtcatcaccaacaaagggcggaagcagatccgggaacgggggttggcctgcttccaggactgggtggaggcggccgatatcttccagaatttctccgtttga

SEQ ID NO: 61446 - DNA, 471 bp, Artificial Sequence
  derived and/or modified sequence
atggttgacatactgggtgaacgccacctggtgacctgcaagggcgcaacagtggaggctgaggcggctctgcaaaataaagtagtggcgctgtatttcgcagctgctcggtgcgcaccatcccgcgacttcacccctttgctttgcgacttttatactgctttggtagcagaagccagacggcctgctcccttcgaagtagttttcgttagtgcagacggttcatcccaagagatgctcgattttatgcgcgagctccatggcgcatggttagccctgccattccacgacccctatagacacgaactccgcaaaaggtacaatgttaccgcaatcccaaagctggtaattgtgaagcaaaatggggaagttatcaccaataaaggacggaagcagattcgggaacgtggcctggcctgtttccaggactgggttgaggctgccgacatctttcagaatttcagcgtctag

SEQ ID NO: 61447 - DNA, 240 bp, Artificial Sequence
  derived and/or modified sequence
atggccagaagacccagacacagcatctacagcagcgacgaggacgacgaggacttcgagatgtgcgaccacgactacgacggcctgctgcccaagagcggcaagagacacctgggcaagaccagatggaccagagaggagaacagaaccgacgtgcagtgccagcacagatggcagaaggtgctgaaccccgagctgatcaagggcccctggaccaaggaggaggaccagagaaactag

SEQ ID NO: 61448 - DNA, 312 bp, Artificial Sequence
  derived and/or modified sequence
atggccagaagacccagacacagcatctacagcagcgacgaggacgacgaggacttcgagatgtgcgaccacgactacgacggcctgctgcccaagagcggcaagagacacctgggcaagaccagatggaccagagaggaggacgagaagctgaagaagctggtggagcagaacggcaccgacgactggaaggtgatcgccaactacctgcccaacagaaccgacgtgcagtgccagcacagatggcagaaggtgctgaaccccgagctgatcaagggcccctggaccaaggaggaggaccagagaaactag

SEQ ID NO: 61449 - DNA, 240 bp, Artificial Sequence
  derived and/or modified sequence
atggcacgacgccctcgtcactctatttatagtagcgatgaggatgacgaagactttgaaatgtgtgatcacgactacgacgggcttctccctaagagcggcaaacggcacctgggtaaaacaagatggaccagggaggagaatcgcacagacgtccaatgtcagcatcggtggcaaaaagtgctcaaccccgaactgatcaagggcccttggaccaaagaagaggaccaacggaactag

SEQ ID NO: 61450 - DNA, 312 bp, Artificial Sequence
  derived and/or modified sequence
atggcccggcgccctcgacactcgatttactcaagcgatgaggatgatgaggactttgaaatgtgtgatcacgactatgatggactgttacccaaatccggaaaaaggcatcttggcaagactaggtggacacgcgaagaagatgagaaactcaagaagctggtggaacagaatggaaccgatgattggaaagtaatagcgaattacttacccaacaggacagacgtccagtgccaacaccggtggcaaaaagttcttaaccctgagttaatcaaaggcccctggacaaaagaagaagaccagcggaattag

SEQ ID NO: 61451 - DNA, 240 bp, Artificial Sequence
  derived and/or modified sequence
atggcccggcggcccaggcacagcatctacagcagtgatgaagatgatgaagattttgagatgtgtgaccatgactatgatggcctgctgcccaagagcggcaagaggcacctgggcaagacccgctggacccgggaggagaacagaacagatgtgcagtgccagcaccgctggcagaaggtgctgaaccctgagctgatcaagggcccctggaccaaggaggaggaccagaggaactag

SEQ ID NO: 61452 - DNA, 312 bp, Artificial Sequence
  derived and/or modified sequence
atggcccggcggcccaggcacagcatctacagcagtgatgaagatgatgaagattttgagatgtgtgaccatgactatgatggcctgctgcccaagagcggcaagaggcacctgggcaagacccgctggacccgggaggaggatgagaagctgaagaagctggtggagcagaatggaacagatgactggaaggtgattgccaactacctgcccaacagaacagatgtgcagtgccagcaccgctggcagaaggtgctgaaccctgagctgatcaagggcccctggaccaaggaggaggaccagaggaactag

SEQ ID NO: 61453 - DNA, 240 bp, Artificial Sequence
  derived and/or modified sequence
atggcccggcggccccggcacagcatctacagcagcgacgaggacgacgaagacttcgagatgtgcgaccatgattatgacgggttgctgcctaagagcgggaaaaggcaccttggaaaaacccgatggacccgagaagaaaaccgcacagacgtgcagtgtcaacaccggtggcagaaagtgctcaaccccgaactcattaaagggccctggaccaaggaggaagatcagaggaattag

SEQ ID NO: 61454 - DNA, 312 bp, Artificial Sequence
  derived and/or modified sequence
atggcccggcggccccggcacagcatctacagcagcgacgaggacgatgaggactttgagatgtgcgatcatgactacgacggcctcctgcctaagagtggaaagagacacctgggtaagacacggtggacaagagaagaagacgaaaagctgaagaaactggtcgaacagaacggtactgacgattggaaagtgattgccaattatctgcccaaccgcactgacgtccagtgccagcacaggtggcaaaaagtgttgaatcccgagctcataaaaggcccctggaccaaggaagaggaccagagaaactag

SEQ ID NO: 61455 - DNA, 240 bp, Artificial Sequence
  derived and/or modified sequence
atggctaggagaccacggcattctatttactctagtgatgaggatgacgaggattttgagatgtgtgatcacgactatgatggactgttgccgaagtcagggaagcgccatctgggaaagacacgctggactagagaagagaataggacagacgtgcaatgccagcaccgatggcagaaagtgttaaaccccgagctgatcaaggggccatggaccaaagaggaggaccagcgaaattag

SEQ ID NO: 61456 - DNA, 312 bp, Artificial Sequence
  derived and/or modified sequence
atggccaggcggccacgccactcaatctacagctcagacgaggacgacgaggacttcgagatgtgcgatcatgactacgacggcttgctccccaagagcggcaaaagacatctcgggaaaaccaggtggacccgagaggaggatgaaaagcttaagaaactggtggagcaaaatggaacagatgattggaaggtgattgccaactacttacctaacaggactgatgtccaatgtcagcacagatggcagaaggttttgaaccccgagctcatcaagggcccttggacgaaggaagaggaccagcgaaactag

SEQ ID NO: 61457 - protein, 605 aa, Artificial Sequence
  derived and/or modified sequence
MARRPRHSIYSSDEDDEDFEMCDHDYDGLLPKSGKRHLGKTRWTREEDEKLKKLVEQNGTDDWKVIANYLPNRTDVQCQHRWQKVLNPELIKGPWTKEEDQRVIELVQKYGPKRWSVIAKHLKGRIGKQCRERWHNHLNPEVKKTSWTEEEDRIIYQAHKRLGNRWAEIAKLLPGRTDNAIKNHWNSTMRRKVEQEGYLQESSKASQPAVATSFQKNSHLMGFAQAPPTAQLPATGQPTVNNDYSYYHISEAQNVSSHVPYPVALHVNIVNVPQPAAAAIQTQNHTCSYPGWHSTTIADHTRPHGDSAPVSCLGEHHSTPSLPADPGSLPEESASPARCMIVHQGTILDNVKNLLEFAETLQFIDSFLNTSSNHENSDLEMPSLTSTPLIGHKLTVTTPFHRDQTVKTQKENTVFRTPAIKRSILESSPRTPTPFKHALAAQEIKYGPLKMLPQTPSHLVEDLQDVIKQESDESGIVAEFQENGPPLLKKIKQEVESPTDKSGNFFCSHHWEGDSLNTQLFTQTSPVADAPNILTSSVLMAPASEDEDNVLKAFTVPKNRSLASPLQPCSSTWEPASCGKMEEQMTSSSQARKYVNAFSARTLVM

SEQ ID NO: 61458 - DNA, 1818 bp, Artificial Sequence
  derived and/or modified sequence
atggccagaagacccagacacagcatctacagcagcgacgaggacgacgaggacttcgagatgtgcgaccacgactacgacggcctgctgcccaagagcggcaagagacacctgggcaagaccagatggaccagagaggaggacgagaagctgaagaagctggtggagcagaacggcaccgacgactggaaggtgatcgccaactacctgcccaacagaaccgacgtgcagtgccagcacagatggcagaaggtgctgaaccccgagctgatcaagggcccctggaccaaggaggaggaccagagagtgatcgagctggtgcagaagtacggccccaagagatggagcgtgatcgccaagcacctgaagggcagaatcggcaagcagtgcagagagagatggcacaaccacctgaaccccgaggtgaagaagaccagctggaccgaggaggaggacagaatcatctaccaggcccacaagagactgggcaacagatgggccgagatcgccaagctgctgcccggcagaaccgacaacgccatcaagaaccactggaacagcaccatgagaagaaaggtggagcaggagggctacctgcaggagagcagcaaggccagccagcccgccgtggccaccagcttccagaagaacagccacctgatgggcttcgcccaggccccccccaccgcccagctgcccgccaccggccagcccaccgtgaacaacgactacagctactaccacatcagcgaggcccagaacgtgagcagccacgtgccctaccccgtggccctgcacgtgaacatcgtgaacgtgccccagcccgccgccgccgccatccagacccagaaccacacctgcagctaccccggctggcacagcaccaccatcgccgaccacaccagaccccacggcgacagcgcccccgtgagctgcctgggcgagcaccacagcacccccagcctgcccgccgaccccggcagcctgcccgaggagagcgccagccccgccagatgcatgatcgtgcaccagggcaccatcctggacaacgtgaagaacctgctggagttcgccgagaccctgcagttcatcgacagcttcctgaacaccagcagcaaccacgagaacagcgacctggagatgcccagcctgaccagcacccccctgatcggccacaagctgaccgtgaccacccccttccacagagaccagaccgtgaagacccagaaggagaacaccgtgttcagaacccccgccatcaagagaagcatcctggagagcagccccagaacccccacccccttcaagcacgccctggccgcccaggagatcaagtacggccccctgaagatgctgccccagacccccagccacctggtggaggacctgcaggacgtgatcaagcaggagagcgacgagagcggcatcgtggccgagttccaggagaacggcccccccctgctgaagaagatcaagcaggaggtggagagccccaccgacaagagcggcaacttcttctgcagccaccactgggagggcgacagcctgaacacccagctgttcacccagaccagccccgtggccgacgcccccaacatcctgaccagcagcgtgctgatggcccccgccagcgaggacgaggacaacgtgctgaaggccttcaccgtgcccaagaacagaagcctggccagccccctgcagccctgcagcagcacctgggagcccgccagctgcggcaagatggaggagcagatgaccagcagcagccaggccagaaagtacgtgaacgccttcagcgccagaaccctggtgatgtag

SEQ ID NO: 61459 - DNA, 1818 bp, Artificial Sequence
  derived and/or modified sequence
atggcacgacgcccaaggcacagcatttatagctctgatgaggacgacgaagatttcgaaatgtgcgatcacgactatgacggtttgctcccaaaatcgggcaaacggcatctggggaagacaagatggacacgagaggaagacgaaaagttaaaaaaactggtagaacagaatggaaccgatgattggaaggttattgcaaattaccttccaaaccgaaccgacgtgcagtgccagcacagatggcagaaggttctgaatcctgagctcatcaagggtccatggacgaaggaggaggatcagagggtgatcgagctggtgcagaagtatgggcccaagaggtggtccgtaatagccaaacacctcaaaggacgcatcggcaagcagtgtcgcgagaggtggcacaaccacctgaaccccgaggttaaaaagacatcttggacggaggaagaggatcggataatctaccaggcacacaaaagactggggaatcggtgggcagaaatcgctaaactcctgccaggcaggacggacaatgctatcaaaaatcactggaactcaacaatgcgaagaaaggtggagcaggagggatacttgcaggagagtagtaaggcctctcagcctgcagtggccaccagctttcaaaagaattcacacctcatggggttcgcccaggcaccacctacagcacagctacctgccactggacagcctacagttaacaatgattattcttattatcacatctctgaagcccagaacgtgtccagtcacgttccataccccgtggctttacacgtaaacattgtgaatgtgccccagcccgccgccgccgctattcaaactcagaaccacacttgcagttatccgggctggcattccaccaccatcgccgatcatactcggccccatggcgactctgcccccgtatcatgtctcggtgaacatcatagcactccatctctgccggcggatccaggctcgttgccagaagaaagcgctagtcccgccaggtgtatgatagtgcatcaggggaccatattagacaacgtcaagaatctcctcgagttcgccgagactttgcagtttatagacagctttttgaacacgagctcaaatcatgagaattccgacctggagatgccatctctaacctccaccccactgatcggccacaagttaacggtaacgacaccctttcacagagaccagacagttaaaacacaaaaagagaacacagtctttcggacacctgcaattaaaagaagcatccttgagagcagtcctcgaaccccaactccttttaagcacgcccttgctgcacaagaaatcaagtatgggcccctgaagatgttgcctcagacaccatcacacctcgtggaggacctgcaggacgtgatcaagcaggaatccgacgagtctggaatcgtggctgaatttcaggaaaatggccctcccctcctgaaaaaaataaagcaggaggtggagtctccgactgacaaatctggcaattttttttgctctcaccattgggaaggggatagtcttaatactcagctgttcacacagacctcacccgtggccgacgctcccaacattctcacctcaagtgtgcttatggcccccgcatctgaagatgaagataatgtgctcaaagcctttaccgttccaaagaatcgatccctggcatcacctctacaaccatgttcaagtacctgggaaccagctagttgtggaaaaatggaggaacagatgacctccagctcccaggccaggaaatacgtgaacgctttctctgcacgcaccctagtgatgtag

SEQ ID NO: 61460 - DNA, 1818 bp, Artificial Sequence
  derived and/or modified sequence
atggcccggcggcccaggcacagcatctacagcagtgatgaagatgatgaagattttgagatgtgtgaccatgactatgatggcctgctgcccaagagcggcaagaggcacctgggcaagacccgctggacccgggaggaggatgagaagctgaagaagctggtggagcagaatggaacagatgactggaaggtgattgccaactacctgcccaacagaacagatgtgcagtgccagcaccgctggcagaaggtgctgaaccctgagctgatcaagggcccctggaccaaggaggaggaccagagggtcatcgagctggtgcagaagtatggccccaagcgctggagcgtcatcgccaagcacctgaagggccgcatcggcaagcagtgccgggagcgctggcacaaccacctgaaccctgaggtgaagaagacctcctggacagaggaggaggaccgcatcatctaccaggcccacaagaggctgggcaaccgctgggccgagatcgccaagctgctgcccggccgcacagacaatgccatcaagaaccactggaacagcaccatgaggaggaaggtggagcaggagggctacctgcaggagagcagcaaggccagccagcctgctgtggccaccagcttccagaagaacagccacctgatgggctttgcccaggccccacccacagcccagctgcctgccaccggccagcccaccgtgaacaatgactacagctactaccacatcagcgaggcccagaatgtgagcagccacgtgccctaccctgtggccctgcacgtgaacatcgtgaatgtgccccagcctgctgctgctgccatccagacccagaaccacacctgcagctacccaggctggcacagcaccaccatcgctgaccacacccggccccacggggacagcgcccctgtgtcctgcctgggggagcaccacagcacccccagcctgcctgctgaccccggcagcctgcctgaggagagcgccagccctgcccgctgcatgattgtgcaccagggcaccatcctggacaacgtgaagaacctgctggagtttgctgagaccctgcagttcatcgacagcttcctgaacaccagcagcaaccatgaaaattctgacctggagatgcccagcctgaccagcacccccctcatcggccacaagctgactgtgaccacccccttccaccgggaccagacagtgaagacccagaaggaaaatacagtgttccgcaccccagccatcaagaggagcatcctggagagcagccccaggacccccacccccttcaagcacgccctggccgcccaggagatcaagtatggccccctgaagatgctgccccagacccccagccacctggtggaggacctgcaggatgtgatcaagcaggagagtgatgagagcggcatcgtggccgagttccaggagaatggaccacccctgctgaagaagatcaagcaggaggtggagagccccacagacaagagcggcaacttcttctgcagccaccactgggagggggacagcctgaacacccagctgttcacccagaccagccctgtggctgatgcccccaacatcctgaccagctctgtgctgatggccccagcctctgaagatgaagataatgtgctgaaggccttcaccgtgcccaagaacagaagcctggccagccccctgcagccctgcagcagcacctgggagcccgccagctgtgggaagatggaggagcagatgaccagcagcagccaggccaggaaatatgtgaatgccttcagcgcccggaccctggtgatgtag

SEQ ID NO: 61461 - DNA, 1818 bp, Artificial Sequence
  derived and/or modified sequence
atggcccggcggccccggcacagcatctacagcagcgacgaggacgacgaggacttcgaaatgtgcgaccacgactatgatgggttgctgcctaagtccggcaagcggcaccttggcaaaacaaggtggacacgggaagaggacgagaagttaaagaaactggtggaacagaacggcaccgatgactggaaagtgatcgccaattatctgcccaatcgcactgatgtccagtgccaacacaggtggcagaaagtgctcaaccctgagctgattaagggcccctggaccaaagaggaagatcagcgagtgatagagttagtacagaaatatggtccgaagcggtggagcgtgattgccaagcatttaaaggggcgaattggcaaacagtgtcgcgaacgttggcacaatcaccttaacccagaggtcaaaaaaacatcttggaccgaagaagaggataggattatctaccaagcacataagcggcttggaaatcggtgggccgagattgcaaaactgctccccggccggactgacaatgctatcaaaaatcattggaactccaccatgagaagaaaggttgagcaagaggggtacctgcaagaatcaagtaaagcctcacagcccgcagtggccacctcattccagaaaaactcgcacctgatgggcttcgcacaggctcctcccaccgcccaactgcccgccacaggacagccaactgttaataacgactacagttactaccatatttccgaggcacaaaatgtgagcagccacgtaccataccctgtcgcactccacgtcaatatagtgaatgtgccacagcccgccgctgcagccatccagactcagaatcacacctgttcgtaccccggctggcactcaacaactattgcggatcacactagaccacatggcgattctgctcctgtgtcatgtctgggggaacaccactccacacctagcctccctgccgaccctggcagtttacctgaggagagcgcctctccagctcgctgcatgattgtgcatcaggggaccatcctcgataatgtaaaaaaccttctcgaatttgccgaaaccctgcagttcatcgattcttttttgaatacctcgtccaaccatgagaatagtgatctggaaatgcctagtttgacatccacacccctaatcgggcataagctcacagtcaccactcccttccacagggaccagaccgttaaaacccaaaaagagaacacagtatttagaacgcctgccataaagaggtctatcttggagtcttctccgcgtacgcccacaccgtttaagcacgcattggcggcccaggagatcaaatatggacccctgaagatgctcccccagactccctcccaccttgtagaggacctgcaagatgtgattaaacaggaaagcgacgagtcgggcatcgttgcggaattccaggaaaacggaccgcctctgcttaaaaagatcaagcaggaggtggaaagtcctacagataaatctggcaacttcttctgttcacaccactgggagggtgactcactcaacacccaactgttcacgcagacctcacctgtggcggacgctcccaacattttgactagtagtgtgcttatggccccggctagcgaggatgaagataacgtgctgaaggcgttcaccgtgccgaaaaatcgatctctcgcctctcctctacagccttgttcgtctacatgggaacccgcttcatgtggcaaaatggaagaacagatgactagctcctcccaggcgaggaagtatgtgaacgcatttagtgcgcgtacattagtgatgtag

SEQ ID NO: 61462 - DNA, 1818 bp, Artificial Sequence
  derived and/or modified sequence
atggccagacgaccacggcacagtatctatagctctgacgaggacgatgaagacttcgaaatgtgtgaccacgactatgatgggttactacccaaatctgggaagagacacctgggcaagactagatggacacgggaagaagatgagaagctgaagaaactggttgagcaaaacggtaccgacgactggaaggtgattgccaattacctacccaacagaaccgatgtacagtgccagcacaggtggcaaaaagttttaaatcccgagctcatcaaagggccatggaccaaggaagaggaccagagagtgatcgagctggtgcagaagtacggacccaaaagatggagtgtgatagcaaaacacctgaagggtaggatcgggaagcagtgccgtgaacgttggcacaatcacctgaatcccgaggtcaagaaaactagctggactgaagaggaagatcggatcatatatcaggcccataagcgcctggggaacagatgggccgaaattgccaagctcttgccagggcgtaccgacaacgccatcaagaaccactggaattcaaccatgcgaaggaaggtcgagcaagaaggctatctgcaggaatctagtaaagcaagccagccagctgtggccacatcttttcagaagaacagccatctgatgggattcgcccaggctccgcctactgcccagcttccagccaccggtcagcccacagtgaacaatgactactcctactaccatatatccgaagctcagaatgtttcatctcacgtgccttatcccgtcgccctgcacgtgaatattgtgaatgttccccagccagcagctgctgctatccaaacccagaaccacacatgcagctatccaggttggcactccaccacaatcgccgatcacacgcgcccacacggagacagtgcacccgtaagctgtttgggtgagcatcacagcacaccatcactaccagctgacccaggttccttgcccgaggaatctgctagcccagccagatgtatgatcgtgcatcagggcacgattctggacaacgttaagaatcttcttgaatttgcagaaacattacaatttattgacagcttcctgaacacatcaagtaatcacgagaattcagaccttgagatgccttcactcaccagcaccccattaatcggtcacaaactgacagtgactactcccttccaccgtgatcagactgtgaagactcaaaaggaaaacacggtgttccggactcctgccataaaacggtcgatccttgaaagctccccaaggaccccaactccatttaaacacgccctggccgcacaggagataaaatacggccctcttaaaatgctgcctcagacacctagtcatctcgtagaagaccttcaggacgtgatcaaacaggagagcgacgaatccggaattgttgctgaatttcaagagaacggccctcctctgctgaaaaagattaaacaagaggtggaaagtcccacagacaagtctggcaatttcttttgcagccatcattgggagggggattctctcaacacacagcttttcactcaaacatccccagtagcagatgcgcctaacattctgacatctagtgtactcatggcacctgcctctgaggatgaggacaacgtgcttaaagcctttaccgtccctaaaaatcgttcactggcttccccattacagccatgctccagtacttgggagcccgcttcctgtgggaagatggaggagcagatgacctcatcatctcaggccagaaagtatgtcaacgccttttctgccagaaccctagtaatgtag

SEQ ID NO: 61463 - DNA, 1818 bp, Artificial Sequence
  derived and/or modified sequence
atggcccgaagaccccggcacagcatatatagcagtgacgaggatgatgaggactttgagatgtgtgaccatgactatgatgggctgcttcccaagtctggaaagcgtcacttggggaaaacaaggtggacccgggaagaggatgaaaaactgaagaagctggtggaacagaatggaacagatgactggaaagttattgccaattatctcccgaatcgaacagatgtgcagtgccagcaccgatggcagaaagtactaaaccctgagctcatcaagggtccttggaccaaagaagaagatcagagagtgatagagcttgtacagaaatacggtccgaaacgttggtctgttattgccaagcacttaaaggggagaattggaaaacaatgtagggagaggtggcataaccacttgaatccagaagttaagaaaacctcctggacagaagaggaagacagaattatttaccaggcacacaagagactggggaacagatgggcagaaatcgcaaagctactgcctggacgaactgataatgctatcaagaaccactggaattctacaatgcgtcggaaggtcgaacaggaaggttatctgcaggagtcttcaaaagccagccagccagcagtggccacaagcttccagaagaacagtcatttgatgggttttgctcaggctccgcctacagctcaactccctgccactggccagcccactgttaacaacgactattcctattaccacatttctgaagcacaaaatgtctccagtcatgttccataccctgtagcgttacatgtaaatatagtcaatgtccctcagccagctgccgcagccattcagacacagaaccacacatgcagctaccccgggtggcacagcaccaccattgccgaccacaccagacctcatggagacagtgcacctgtttcctgtttgggagaacaccactccactccatctctgccagcggatcctggctccctacctgaagaaagcgcctcgccagcaaggtgcatgatcgtccaccagggcaccattctggataatgttaagaacctcttagaatttgcagaaacactccaatttatagattctttcttaaacacttccagtaaccatgaaaactcagacttggaaatgccttctttaacttccacccccctcattggtcacaaattgactgttacaacaccatttcatagagaccagactgtgaaaactcaaaaggaaaatactgtttttagaaccccagctatcaaaaggtcaatcttagaaagctctccaagaactcctacaccattcaaacatgcacttgcagctcaagaaattaaatacggtcccctgaagatgctacctcagacaccctctcatctagtagaagatctgcaggatgtgatcaaacaggaatctgatgaatctggaattgttgctgagtttcaagaaaatggaccacccttactgaagaaaatcaaacaagaggtggaatctccaactgataaatcaggaaacttcttctgctcacaccactgggaaggggacagtctgaatacccaactgttcacgcagacctcgcctgtggcagatgcaccgaatattcttacaagctccgttttaatggcaccagcatcagaagatgaagacaatgttctcaaagcatttacagtacctaaaaacaggtccctggcgagccccttgcagccttgtagcagtacctgggaacctgcatcctgtggaaagatggaggagcagatgacatcttccagtcaagctcgtaaatacgtgaatgcattctcagcccggacgctggtcatgtga

SEQ ID NO: 61464 - protein, 1119 aa, Artificial Sequence
  derived and/or modified sequence
MPRPELPLPEGWEEARDFDGKVYYIDHTNRTTSWIDPRDRYTKPLTFADCISDELPLGWEEAYDPQVGDYFIDHNTKTTQIEDPRVQWRREQEHMLKDYLVVAQEALSAQKEIYQVKQQRLELAQQEYQQLHAVWEHKLGSQVSLVSGSSSSSKYDPEILKAEIATAKSRVNKLKREMVHLQHELQFKERGFQTLKKIDKKMSDAQGSYKLDEAQAVLRETKAIKKAITCGEKEKQDLIKSLAMLKDGFRTDRGSHSDLWSSSSSLESSSFPLPKQYLDVSSQTDISGSFGINSNNQLAEKVRLRLRYEEAKRRIANLKIQLAKLDSEAWPGVLDSERDRLILINEKEELLKEMRFISPRKWTQGEVEQLEMARKRLEKDLQAARDTQSKALTERLKLNSKRNQLVRELEEATRQVATLHSQLKSLSSSMQSLSSGSSPGSLTSSRGSLVASSLDSSTSASFTDLYYDPFEQLDSELQSKVEFLLLEGATGFRPSGCITTIHEDEVAKTQKAEGGGRLQALRSLSGTPKSMTSLSPRSSLSSPSPPCSPLMADPLLAGDAFLNSLEFEDPELSATLCELSLGNSAQERYRLEEPGTEGKQLGQAVNTAQGCGLKVACVSAAVSDESVAGDSGVYEASVQRLGASEAAAFDSDESEAVGATRIQIALKYDEKNKQFAILIIQLSNLSALLQQQDQKVNIRVAVLPCSESTTCLFRTRPLDASDTLVFNEVFWVSMSYPALHQKTLRVDVCTTDRSHLEECLGGAQISLAEVCRSGERSTRWYNLLSYKYLKKQSRELKPVGVMAPASGPASTDAVSALLEQTAVELEKRQEGRSSTQTLEDSWRYEETSENEAVAEEEEEEVEEEEGEEDVFTEKASPDMDGYPALKVDKETNTETPAPSPTVVRPKDRRVGTPSQGPFLRGSTIIRSKTFSPGPQSQYVCRLNRSDSDSSTLSKKPPFVRNSLERRSVRMKRPSPPPQPSSVKSLRSERLIRTSLDLELDLQATRTWHSQLTQEISVLKELKEQLEQAKSHGEKELPQWLREDERFRLLLRMLEKRQMDRAEHKGELQTDKMMRAAAKDVHRLRGQSCKEPPEVQSFREKMAFFTRPRMNIPALSADDV

SEQ ID NO: 61465 - DNA, 3360 bp, Artificial Sequence
  derived and/or modified sequence
atgcccagacccgagctgcccctgcccgagggctgggaggaggccagagacttcgacggcaaggtgtactacatcgaccacaccaacagaaccaccagctggatcgaccccagagacagatacaccaagcccctgaccttcgccgactgcatcagcgacgagctgcccctgggctgggaggaggcctacgacccccaggtgggcgactacttcatcgaccacaacaccaagaccacccagatcgaggaccccagagtgcagtggagaagagagcaggagcacatgctgaaggactacctggtggtggcccaggaggccctgagcgcccagaaggagatctaccaggtgaagcagcagagactggagctggcccagcaggagtaccagcagctgcacgccgtgtgggagcacaagctgggcagccaggtgagcctggtgagcggcagcagcagcagcagcaagtacgaccccgagatcctgaaggccgagatcgccaccgccaagagcagagtgaacaagctgaagagagagatggtgcacctgcagcacgagctgcagttcaaggagagaggcttccagaccctgaagaagatcgacaagaagatgagcgacgcccagggcagctacaagctggacgaggcccaggccgtgctgagagagaccaaggccatcaagaaggccatcacctgcggcgagaaggagaagcaggacctgatcaagagcctggccatgctgaaggacggcttcagaaccgacagaggcagccacagcgacctgtggagcagcagcagcagcctggagagcagcagcttccccctgcccaagcagtacctggacgtgagcagccagaccgacatcagcggcagcttcggcatcaacagcaacaaccagctggccgagaaggtgagactgagactgagatacgaggaggccaagagaagaatcgccaacctgaagatccagctggccaagctggacagcgaggcctggcccggcgtgctggacagcgagagagacagactgatcctgatcaacgagaaggaggagctgctgaaggagatgagattcatcagccccagaaagtggacccagggcgaggtggagcagctggagatggccagaaagagactggagaaggacctgcaggccgccagagacacccagagcaaggccctgaccgagagactgaagctgaacagcaagagaaaccagctggtgagagagctggaggaggccaccagacaggtggccaccctgcacagccagctgaagagcctgagcagcagcatgcagagcctgagcagcggcagcagccccggcagcctgaccagcagcagaggcagcctggtggccagcagcctggacagcagcaccagcgccagcttcaccgacctgtactacgaccccttcgagcagctggacagcgagctgcagagcaaggtggagttcctgctgctggagggcgccaccggcttcagacccagcggctgcatcaccaccatccacgaggacgaggtggccaagacccagaaggccgagggcggcggcagactgcaggccctgagaagcctgagcggcacccccaagagcatgaccagcctgagccccagaagcagcctgagcagccccagccccccctgcagccccctgatggccgaccccctgctggccggcgacgccttcctgaacagcctggagttcgaggaccccgagctgagcgccaccctgtgcgagctgagcctgggcaacagcgcccaggagagatacagactggaggagcccggcaccgagggcaagcagctgggccaggccgtgaacaccgcccagggctgcggcctgaaggtggcctgcgtgagcgccgccgtgagcgacgagagcgtggccggcgacagcggcgtgtacgaggccagcgtgcagagactgggcgccagcgaggccgccgccttcgacagcgacgagagcgaggccgtgggcgccaccagaatccagatcgccctgaagtacgacgagaagaacaagcagttcgccatcctgatcatccagctgagcaacctgagcgccctgctgcagcagcaggaccagaaggtgaacatcagagtggccgtgctgccctgcagcgagagcaccacctgcctgttcagaaccagacccctggacgccagcgacaccctggtgttcaacgaggtgttctgggtgagcatgagctaccccgccctgcaccagaagaccctgagagtggacgtgtgcaccaccgacagaagccacctggaggagtgcctgggcggcgcccagatcagcctggccgaggtgtgcagaagcggcgagagaagcaccagatggtacaacctgctgagctacaagtacctgaagaagcagagcagagagctgaagcccgtgggcgtgatggcccccgccagcggccccgccagcaccgacgccgtgagcgccctgctggagcagaccgccgtggagctggagaagagacaggagggcagaagcagcacccagaccctggaggacagctggagatacgaggagaccagcgagaacgaggccgtggccgaggaggaggaggaggaggtggaggaggaggagggcgaggaggacgtgttcaccgagaaggccagccccgacatggacggctaccccgccctgaaggtggacaaggagaccaacaccgagacccccgcccccagccccaccgtggtgagacccaaggacagaagagtgggcacccccagccagggccccttcctgagaggcagcaccatcatcagaagcaagaccttcagccccggcccccagagccagtacgtgtgcagactgaacagaagcgacagcgacagcagcaccctgagcaagaagccccccttcgtgagaaacagcctggagagaagaagcgtgagaatgaagagacccagcccccccccccagcccagcagcgtgaagagcctgagaagcgagagactgatcagaaccagcctggacctggagctggacctgcaggccaccagaacctggcacagccagctgacccaggagatcagcgtgctgaaggagctgaaggagcagctggagcaggccaagagccacggcgagaaggagctgccccagtggctgagagaggacgagagattcagactgctgctgagaatgctggagaagagacagatggacagagccgagcacaagggcgagctgcagaccgacaagatgatgagagccgccgccaaggacgtgcacagactgagaggccagagctgcaaggagccccccgaggtgcagagcttcagagagaagatggccttcttcaccagacccagaatgaacatccccgccctgagcgccgacgacgtgtag

SEQ ID NO: 61466 - DNA, 3360 bp, Artificial Sequence
  derived and/or modified sequence
atgcctagacctgagctgcctttgcctgaaggctgggaggaagccagggattttgacggcaaagtgtattatatagaccacaccaataggactacatcatggatcgatccaagggaccgctacactaagccacttacctttgccgattgtattagtgacgagctgcccctgggctgggaggaggcgtatgacccccaagtgggggattactttattgaccacaatacaaagacaacccagatcgaggatcctcgcgtccagtggagacgcgaacaggagcacatgctgaaggactatctcgtcgtggcccaggaagcgctgagtgctcaaaaggaaatataccaagtcaaacagcagagactggaactagcccaacaggaatatcagcagttacacgctgtgtgggaacataagctgggatctcaggttagcttggtgtccgggagttcctcgtccagcaagtacgatccagaaattcttaaggccgaaattgctactgcaaagtccagagtcaacaagctgaaacgggaaatggttcacctgcagcacgagctgcagttcaaggagagaggtttccagactcttaagaaaatcgataagaagatgtccgacgctcagggctcctacaagctagacgaggctcaggccgtgctgcgggagaccaaggccatcaagaaggccattacatgcggtgaaaaggaaaagcaagaccttatcaaatccctcgccatgctgaaggacggctttaggacggaccgcggctctcactctgatttgtggagcagcagcagcagtctcgagagctcctctttcccgctcccaaaacaataccttgacgtcagcagtcaaaccgatatctccgggtcctttggtattaactccaacaaccagctggccgagaaagtccggttgcgactacgatacgaggaggcgaaaaggcgcatagcaaatttaaaaattcaactggctaagcttgattccgaagcttggccaggagtccttgatagtgaacgcgatcggcttatactcattaatgagaaagaggagttgctcaaggagatgaggttcatctccccaaggaagtggacgcagggggaagtcgaacagctagaaatggcgcggaaacggttggagaaagatctgcaggctgccagggacactcagtcaaaggcgttaacagagaggctcaagctgaactctaaacggaaccagctggtgcgggagttagaggaggctactcggcaagtcgccacactgcacagtcagttaaagagcctatcttcatccatgcagagtctttcttccgggtccagtcctgggagtctcacaagtagccgagggtccctcgtggcatcatcgctggatagcagtacctcagccagctttaccgacttatattatgatccctttgaacagctcgatagtgagctccagagcaaggtcgagttcctcctgctggaaggagcaacaggctttcggccctctgggtgtattactacaatccatgaagatgaagtagccaagactcagaaagcagaaggcggcgggagactgcaggcattaaggtctttgtcaggaactcccaagtctatgacatccttgtcaccgcgttcaagcctgagcagtccaagccccccttgttcccctctaatggctgatcctctgctggccggagatgcatttctcaacagcttagaattcgaagacccagaactctcggcaaccctttgtgaactcagcttgggaaacagtgctcaggagcggtatcgtcttgaggaacctgggaccgaaggcaagcagctgggacaagctgtgaatactgcccagggatgcggtcttaaagtagcttgtgtgtcagccgctgtttcagacgaaagcgtcgctggagactcgggcgtgtatgaagcgtccgtgcagcgactgggtgcgtctgaagcggccgccttcgactcggacgagagtgaagcagtgggagccactcggattcagatagctctgaagtatgatgagaaaaataagcaatttgccatcctgattatccagctttcaaacctgtctgcactgctccagcagcaggaccaaaaagtgaacatcagggttgctgtgttgccctgctccgagagtaccacatgtctgttccgaaccagaccattggacgcatcggacactctcgtctttaacgaggtgttctgggtgtctatgagttatccagctctgcatcagaagacacttcgcgtcgacgtatgcacgaccgacaggtctcatctcgaggaatgcctgggcggtgcccaaatttcgctggcagaagtctgcaggtctggagagcgaagtactcgctggtacaacctgctaagctacaagtatctcaagaagcaaagtagggagttgaagcctgttggcgtaatggcccccgcttctggccctgcctcaacagacgcagtcagtgcactgctcgagcagaccgccgttgagttagaaaagcgccaggaggggagatcttccactcagactctggaggactcctggcgctacgaggagacgtccgagaatgaagcggttgcagaagaggaagaagaggaggttgaagaagaagagggtgaagaggacgtgttcaccgagaaagcctcccctgatatggacggctatccagctttaaaagtcgataaagagactaacaccgaaacccctgccccgtctccaacggtggtgcggcccaaggatcgccgtgtggggacaccttcccagggtccatttctgaggggcagcactatcattcggagtaagacattctcccctggtccccagtctcaatacgtttgcagactgaatagatccgattccgattcatctaccctcagtaaaaaaccaccattcgttagaaactcactggagagacgctctgtccgaatgaaacgacctagtccacctcctcagccttcatctgtcaagtccttgcgcagcgagaggctgatccggacctccctagatttagaactcgacttgcaggccactcgaacatggcattctcagcttactcaggaaatttcagtccttaaggagctaaaagagcagttagagcaggcgaagagccacggagaaaaggagcttccccagtggttaagggaagacgaaaggttcagacttctgctgcgtatgctcgagaagagacagatggatcgcgccgagcacaaaggagaactccagactgacaaaatgatgagggccgccgccaaggacgtgcatcgcctgaggggccagagctgcaaggaacctcctgaggtccagagtttccgcgaaaagatggctttctttacacgcccacgcatgaatatccccgcactatctgcggacgacgtgtag

SEQ ID NO: 61467 - DNA, 3360 bp, Artificial Sequence
  derived and/or modified sequence
atgcccaggcctgagctgcccctgcctgagggctgggaggaggcccgggactttgatggcaaggtgtactacatcgaccacaccaacagaaccacctcctggattgacccccgggaccgctacaccaagcccctgacctttgctgactgcatcagtgatgagctgcccctgggctgggaggaggcctatgacccccaggtgggggactacttcatcgaccacaacaccaagaccacccagatcgaggacccccgggtgcagtggaggcgggagcaggagcacatgctgaaggactacctggtggtggcccaggaggccctgagcgcccagaaggagatctaccaggtgaagcagcagaggctggagctggcccagcaggagtaccagcagctgcatgctgtgtgggagcacaagctgggcagccaggtgtccctggtgtctggcagcagcagcagcagcaaatatgaccctgagatcctgaaggccgagatcgccacagccaagagccgggtgaacaagctgaagcgggagatggtgcacctgcagcacgagctgcagttcaaggagcggggcttccagaccctgaagaagattgacaagaagatgtctgatgcccagggcagctacaagctggatgaggcccaggccgtgctgcgggagaccaaggccatcaagaaggccatcacctgtggggagaaggagaagcaggacctgatcaagagcctggccatgctgaaggatggcttcagaacagaccggggcagccacagcgacctgtggagcagcagcagcagcctggagagcagcagcttccccctgcccaagcagtacctggatgtgagcagccagacagacatcagcggcagctttggcatcaacagcaacaaccagctggccgagaaggtgcggctgcggctgcgctatgaggaggccaagagaagaattgccaacctgaagatccagctggccaagctggacagcgaggcctggccaggagtgctggacagcgagcgggacaggctcatcctgatcaatgagaaggaggagctgctgaaggagatgaggttcatcagccccaggaagtggacccagggcgaggtggagcagctggagatggccaggaagaggctggagaaggacctgcaggccgcccgggacacccagagcaaggccctgacagagcggctgaagctgaacagcaagaggaaccagctggtgcgggagctggaggaggccacccggcaggtggccaccctgcacagccagctgaagagcctgagcagctccatgcagagcctgagcagcggcagcagccctggcagcctgaccagcagccggggcagcctggtggccagcagcctggacagcagcaccagcgccagcttcacagacctgtactatgacccctttgagcagctggacagcgagctgcagagcaaggtggagttcctgctgctggagggcgccaccggcttccggcccagcggctgcatcaccaccatccatgaagatgaggtggccaagacccagaaggccgagggcggcggccgcctgcaggccctgcggagcctgagcggcacccccaagtccatgaccagcctgagccccaggagcagcctgagcagccccagccccccctgcagccccctgatggctgaccccctgctggccggagatgccttcctgaacagcctggagtttgaggaccctgagctgagcgccaccctgtgtgagctgagcctgggcaacagcgcccaggagcgctaccgcctggaggagcccggcacagagggcaagcagctgggccaggccgtgaacacagcccagggctgcggcctgaaggtggcctgtgtgtctgctgctgtgtctgatgagagcgtggccggggacagcggcgtgtatgaggcctctgtgcagaggctgggcgccagcgaggccgccgcctttgacagtgatgagagcgaggccgtgggcgccacccgcatccagatcgccctgaagtatgatgagaagaacaagcagtttgccatcctgatcatccagctgagcaacctgagcgccctgctgcagcagcaggaccagaaggtgaacatccgggtggccgtgctgccctgcagcgagagcaccacctgcctcttccgcacccggcccctggatgccagtgacaccctggtgttcaatgaggtgttctgggtgtccatgagctacccagccctgcaccagaagaccctgcgggtggatgtgtgcaccacagacaggagccacctggaggagtgcctgggcggggcccagatcagcctggccgaggtgtgccgctctggagagaggagcacccgctggtacaacctgctgagctacaagtacctgaagaagcagagccgggagctgaagcctgtgggcgtgatggccccagccagcggccctgccagcacagatgctgtgtctgccctgctggagcagacagctgtggagctggagaagaggcaggagggccgcagcagcacccagaccctggaggacagctggaggtatgaggagaccagtgaaaatgaggccgtggccgaggaggaggaggaggaggtggaggaggaggagggggaggaggatgtgttcacagagaaggccagcccagacatggatggctacccagccctgaaggtggacaaggagaccaacacagagaccccagcccccagccccaccgtggtgcggcccaaggaccggcgggtgggcacccccagccagggccccttcctgcggggcagcaccatcatccgcagcaagaccttcagccctggcccccagagccagtatgtgtgccgcctgaacagaagtgacagcgacagcagcaccctgagcaagaagcccccatttgtgaggaacagcctggagaggagatctgtgaggatgaagaggcccagccccccaccccagcccagctctgtgaagagcctgcggtctgagcggctcatccgcaccagcctggacctggagctggacctgcaggccaccaggacctggcacagccagctgacccaggagatctctgtgctgaaggagctgaaggagcagctggagcaggccaagagccatggagagaaggagctgccccagtggctgcgggaggatgagcgcttccggctgctgctgaggatgctggagaagaggcagatggacagagctgagcacaagggggagctgcagacagacaagatgatgagagctgctgccaaggatgtgcaccggctgcggggccagagctgcaaggagcccccagaggtgcagagcttccgggagaagatggccttcttcacccggcccaggatgaacatcccagccctgtctgcagatgatgtgtag

SEQ ID NO: 61468 - DNA, 3360 bp, Artificial Sequence
  derived and/or modified sequence
atgccccggcccgagctgcccctgcccgagggctgggaggaggcccgggactttgatggcaaggtctactatattgaccataccaatcggacaactagctggattgaccccagagaccgttacactaagccactaactttcgccgattgtatttccgacgagttgccccttgggtgggaggaagcctacgacccccaagtgggcgactacttcatcgaccataacaccaagactacccagattgaggatccacgcgtccagtggaggagagagcaagaacatatgcttaaggactatctggttgtcgctcaggaggctctgtctgcacagaaagagatctaccaggtcaaacagcagaggcttgagctagcgcagcaggaataccagcaactgcatgctgtgtgggagcacaaactcgggagccaggtgagcctggtctcaggcagttctagtagctctaagtatgaccccgaaattctgaaggccgagattgccaccgccaaaagcagagttaataaattaaagagagagatggtgcatttgcagcatgagttacagtttaaggagcgagggttccagactctcaagaaaattgataagaagatgagcgatgcgcagggctcctacaagctggacgaagctcaagctgtcctccgggagaccaaagcgattaagaaagcaattacctgtggcgagaaggaaaaacaggacctgattaagtccttagctatgctgaaagatggatttaggaccgatcgagggtcacactccgacctgtggagttcctcctcctcgctggaatcatcatcctttcccttgcctaagcagtatctggacgtatcatctcagaccgatatctcggggtcattcggcattaactcaaacaatcagttggccgagaaagtacgcctgcgtctccgatatgaggaagccaagcggcgtatcgccaatttgaagatacagttggcaaaactggatagtgaagcctggccgggggtactggactcagagagggaccgattgatactcatcaacgaaaaagaagaactgctgaaagagatgcgctttatatcaccccggaaatggacccagggtgaggtggaacagctggaaatggcccgtaaacgcctggagaaagatttacaagccgcaagagatacccagagcaaggccttaacagaacgcttgaagttaaattcgaaacgtaaccagctcgttcgcgagttggaagaggcaacaagacaagtcgcgaccttacattctcaactcaagagcctgtcctctagtatgcagagtctgagctccggttccagccccggatcgttgacatccagtcgaggttcactggttgcatcttcactggacagcagcacaagcgcctcttttacagatttatactatgatccatttgagcagctggacagcgagctccagtccaaagtggagtttctgctgcttgaaggggcaaccggtttccgtccgagcggatgcatcaccacaatccacgaggatgaggtggcgaaaactcagaaggcggagggaggcggaagactccaggcactgcgctcgttgtctggcacccccaaatctatgacctcactcagccctcggagctccctgagctccccctctcctccctgtagtccccttatggccgacccactgctagcgggagacgcctttctgaatagccttgagttcgaggacccggaattatctgccaccctgtgtgagctgtcacttggcaactctgctcaggagcgctataggctggaagaacccggtaccgagggtaagcaacttggtcaggccgttaacacggcgcaaggatgtggactgaaagtcgcgtgcgtcagcgccgccgttagcgatgaaagcgtggccggtgactctggcgtgtatgaggcttccgttcagcggctcggagcaagcgaggcggccgccttcgacagtgacgagagcgaagccgtgggagcaacccggatccagatcgccctgaagtatgacgagaaaaataaacagtttgctatcctgattatccagttgtcaaatctgagtgctctgctgcagcagcaggatcagaaggtgaacatccgcgtcgcagtccttccgtgtagtgagagcacaacatgtttgttcaggacaaggccgctggatgcatccgatacactggtctttaacgaagtattttgggtgtcaatgagttatccagctctgcaccagaagactttacgtgttgacgtgtgtaccaccgaccgatctcatctcgaggaatgtcttggaggcgcgcaaattagcctggcagaagtatgcagatctggtgagaggtcaactagatggtacaatctgctgtcatataaatacctaaaaaagcagagtcgggagcttaaaccagtcggcgtcatggcacctgcatctggccctgcttctaccgacgcagtgtcagcactgctagagcaaaccgccgtggaactggaaaagcggcaggagggcaggagctctacccagaccttggaggacagttggagatacgaggaaactagcgagaacgaggccgtggccgaagaagaggaagaggaagtggaggaagaggagggtgaagaggatgttttcactgagaaggcctcacctgatatggatggataccctgcgttgaaggtagataaggaaacgaacacagaaacccccgctccctccccgacagtcgtcaggcctaaagaccgacgcgtaggcactccctctcaagggccctttctcaggggctctactattattaggagcaagacctttagtccggggccccagtcccagtacgtatgtcgcctcaacagatctgactcggattcgagcaccctgagtaagaaacctcccttcgttcgaaacagtctggagaggagatccgttcgcatgaaacgcccatcgccccctccccaaccttcttccgtgaagtctctccggtctgagcggctgatccgtacctctctggatttggagcttgacctacaggccacccgaacatggcactcacagctgacccaagagatttctgtcctcaaggaactgaaggaacagttagagcaggccaagtcacacggggaaaaagagttgcctcagtggctgcgggaagatgagcgctttagactgctgctccgcatgctagagaaacgccagatggatcgagccgagcacaagggcgaactgcagactgacaagatgatgcgagctgcagcaaaggatgtgcacaggctccgcggccaatcttgcaaagagccgccagaggtgcagtcattccgggaaaaaatggccttcttcacacggccacgcatgaacatacctgccctgtctgcagacgatgtttag

SEQ ID NO: 61469 - DNA, 3360 bp, Artificial Sequence
  derived and/or modified sequence
atgccacgccctgagctgcctcttccagaagggtgggaagaggctcgagatttcgacggcaaggtctactacattgaccacaccaaccgcactacttcttggattgacccaagagaccggtacactaagcccttgaccttcgctgactgcatatctgacgagctgccgctgggctgggaagaagcttatgatcctcaggtgggagattacttcattgatcataacaccaagactacccaaatcgaggaccccagggtgcagtggcgaagggagcaggaacatatgctcaaggactacttagtggtcgcgcaggaagccttgtcagcacaaaaggagatatatcaagttaaacagcaaagactggagctcgctcagcaggaatatcagcagctgcacgcagtgtgggaacataaactggggagtcaggtgagcttggtgtccggcagttcatcttcgagcaaatacgaccccgaaatcctgaaagctgagatcgccactgctaaaagcagagtgaacaagctcaagagagaaatggtgcaccttcagcatgaactccagtttaaggaaagaggctttcaaaccttaaagaagattgacaaaaagatgtccgacgcccaggggtcatataagctggacgaggcacaggcggtgctgagggaaactaaggcgattaaaaaagccattacatgtggggagaaggagaaacaagacttgatcaagtcgctagctatgttaaaggatggctttcggactgatagagggtcacattcggacttgtggagcagtagtagttcattggagagctcttcatttcccctgcccaaacagtacctggatgtttcaagccagaccgacattagcgggagtttcggaataaactcaaacaaccagctagcagaaaaggttagactgagattgcggtatgaggaggccaaaaggcgcattgccaacctgaagatccagcttgcaaagttagatagtgaggcctggccgggagttctcgactctgagcgagacaggcttatcctgattaacgagaaggaagaattgcttaaggaaatgcggttcattagtcccaggaaatggacgcagggagaggtggaacaattggagatggcccgaaaaaggttagagaaggatctccaggccgctagggatactcaatctaaggcgctgaccgagcgcttaaagttgaacagcaaacgcaaccagttggtgcgcgaactggaagaagcgactaggcaggttgctacgttgcacagccagctcaaaagcctatcttccagcatgcaaagtctgagcagtggaagcagcccgggatcactcaccagctcaagaggtagcttggtcgcgtccagcctcgactcaagcaccagtgccagtttcactgatctttactacgacccattcgagcaactggattccgaactgcagtctaaagtggaattcctcctcctagaaggcgctaccgggtttcgacccagtggctgcattacaacgatccatgaagacgaggtcgccaagacacagaaggcggaggggggtggtcgtctccaggctctcagatctcttagcggcacccctaaaagcatgactagccttagcccccgttcgagcctatcatcaccatctcctccctgctcacctctcatggccgacccattgctggccggagatgcattcctaaactctctcgaatttgaagaccctgagttgtccgctactctttgtgagttgtccctgggtaatagcgcccaggaacgatatcgtctggaggaacccggaacggagggtaagcagctcggccaggcagtgaatacagcccagggatgtggcttaaaggtggcctgtgtgtctgccgctgtaagcgacgagtcagtggccggtgactctggggtttacgaagcctcagtgcagcgcctcggtgccagcgaggccgctgccttcgactcagatgagagcgaggccgtgggggctaccaggattcaaattgccctcaagtatgacgaaaaaaacaagcagtttgcaattttgattatacagctttcaaatctgagcgctctgcttcagcagcaagatcagaaggtaaacatccgggtagcggtgctgccatgtagtgagagtacaacttgcctctttcgcactagacccctagatgccagtgacaccttagtgtttaacgaggtgttttgggtgtccatgtcctaccctgcccttcaccagaagaccctgagagtggatgtgtgtaccacagatcgaagccatctagaagagtgcctaggtggtgcgcagatcagcttggctgaagtgtgtagaagcggcgaaaggagcacccgctggtacaacctgctgagttacaaatacctgaaaaagcagtcacgcgagttgaaacccgtcggcgtgatggccccagcttccggccctgcctccacggacgccgtgtctgctcttcttgaacaaacggcagtagaactggagaagcgccaggaaggtcgtagttctacgcagacgcttgaagacagctggcgttacgaggagacctctgagaatgaggctgtggccgaggaggaagaagaagaagtcgaagaggaggaaggagaggaggatgtgtttacggaaaaggcctcacctgatatggacggatatcccgcactaaaagttgacaaagaaacaaatacagagacccccgcaccaagccctaccgttgtcaggcctaaggatcgacgcgtaggaaccccaagtcagggcccatttctgaggggttcaacaataatacggtctaaaaccttttcacctgggccacagtctcagtatgtgtgtagactcaatcgctctgactctgactcatctaccttgtctaaaaaaccccctttcgtgcgcaatagtctggagcgtcggtccgttcgtatgaaaaggccctctccacccccacagccctcttcagttaaaagtttgcgttcagaacgcctcatacggacctcccttgatttggaactggacctccaggcaacacgaacatggcattcacaactcacgcaggagatctccgtcctgaaagaattgaaggagcagcttgaacaggccaaaagccacggtgaaaaggagcttcctcagtggctccgggaagatgaacgttttaggctcttgcttcggatgctcgagaagcgccagatggacagagccgaacacaagggtgagctacagaccgacaagatgatgagagctgctgccaaagatgtgcatcgcctccgtggacagtcctgtaaggagcccccagaggtccaatctttccgggaaaaaatggctttctttacaagaccaagaatgaatatcccagcgttgtctgccgatgatgtttag

SEQ ID NO: 61470 - DNA, 3562 bp, Artificial Sequence
  derived and/or modified sequence
aagatgccccggccggagctgcccctgccggagggctgggaggaggcgcgcgacttcgacggcaaggtctactacatagaccacacgaaccgcaccaccagctggatcgacccgcgggacaggtacaccaaaccgctcacctttgctgactgcattagtgatgagttgccgctaggatgggaagaggcatatgacccacaggttggagattacttcatagaccacaacaccaaaaccactcagattgaggatcctcgagtacaatggcggcgggagcaggaacatatgctgaaggattacctggtggtggcccaggaggctctgagtgcacaaaaggagatctaccaggtgaagcagcagcgcctggagcttgcacagcaggagtaccagcaactgcatgccgtctgggagcataagctgggctcccaggtcagcttggtctctggttcatcatccagctccaagtatgaccctgagatcctgaaagctgaaattgccactgcaaaatcccgggtcaacaagctgaagagagagatggttcacctccagcacgagctgcagttcaaagagcgtggctttcagaccctgaagaaaatcgataagaaaatgtctgatgctcagggcagctacaaactggatgaagctcaggctgtcttgagagaaacaaaagccatcaaaaaggctattacctgtggggaaaaggaaaagcaagatctcattaagagccttgccatgttgaaggacggcttccgcactgacagggggtctcactcagacctgtggtccagcagcagctctctggagagttcgagtttcccgctaccgaaacagtacctggatgtgagctcccagacagacatctcgggaagcttcggcatcaacagcaacaatcagttggcagagaaggtcagattgcgccttcgatatgaagaggctaagagaaggatcgccaacctgaagatccagctggccaagcttgacagtgaggcctggcctggggtgctggactcagagagggaccggctgatccttatcaacgagaaggaggagctgctgaaggagatgcgcttcatcagcccccgcaagtggacccagggggaggtggagcagctggagatggcccggaagcggctggaaaaggacctgcaggcagcccgggacacccagagcaaggcgctgacggagaggttaaagttaaacagtaagaggaaccagcttgtgagagaactggaggaagccacccggcaggtggcaactctgcactcccagctgaaaagtctctcaagcagcatgcagtccctgtcctcaggcagcagccccggatccctcacgtccagccggggctccctggttgcatccagcctggactcctccacttcagccagcttcactgacctctactatgacccctttgagcagctggactcagagctgcagagcaaggtggagttcctgctcctggagggggccaccggcttccggccctcaggctgcatcaccaccatccacgaggatgaggtggccaagacccagaaggcagagggaggtggccgcctgcaggctctgcgttccctgtctggcaccccaaagtccatgacctccctatccccacgttcctctctctcctccccctccccaccctgttcccctctcatggctgaccccctcctggctggtgatgccttcctcaactccttggagtttgaagacccggagctgagtgccactctttgtgaactgagccttggtaacagcgcccaggaaagataccggctggaggaaccaggaacggagggcaagcagctgggccaagctgtgaatacggcccaggggtgtggcctgaaagtggcctgtgtctcagccgccgtatcggacgagtcagtggctggagacagtggtgtgtacgaggcttccgtgcagagactgggtgcttcagaagctgctgcatttgacagtgacgaatcggaagcagtgggtgcgacccgaattcagattgccctgaagtatgatgagaagaataagcaatttgcaatattaatcatccagctgagtaacctttctgctctgttgcagcaacaagaccagaaagtgaatatccgcgtggctgtccttccttgctctgaaagcacaacctgcctgttccggacccggcctctggacgcctcagacactctagtgttcaatgaggtgttctgggtatccatgtcctatccagcccttcaccagaagaccttaagagtcgatgtctgtaccaccgacaggagccatctggaagagtgcctgggaggcgcccagatcagcctggcggaggtctgccggtctggggagaggtcgactcgctggtacaaccttctcagctacaaatacttgaagaaacagagcagggagctcaagccagtgggagtcatggcccctgcctcagggcctgccagcacggacgctgtgtctgctctgttggaacagacagcagtggagctggagaagaggcaggagggcaggagcagcacacagacactggaagacagctggaggtatgaggagaccagtgagaatgaggcagtagccgaggaagaggaggaggaggtggaggaggaggagggagaagaggatgttttcaccgagaaagcctcacctgatatggatgggtacccagcattaaaggtggacaaagagaccaacacggagaccccggccccatcccccacagtggtgcgacctaaggaccggagagtgggcaccccgtcccaggggccatttcttcgagggagcaccatcatccgctctaagaccttctccccaggaccccagagccagtacgtgtgccggctgaatcggagtgatagtgacagctccactctgtccaaaaagccaccttttgttcgaaactccctggagcgacgcagcgtccggatgaagcggccgtccccacccccacagccttcctcggtcaagtcgctgcgctccgagcgtctgatccgtacctcgctggacctggagttagacctgcaggcgacaagaacctggcacagccaattgacccaggagatctcggtgctgaaggagctcaaggagcagctggaacaagccaagagccacggggagaaggagctgccacagtggttgcgtgaggacgagcgtttccgcctgctgctgaggatgctggagaagcggcagatggaccgagcggagcacaagggtgagcttcagacagacaagatgatgagggcagctgccaaggatgtgcacaggctccgaggccagagctgtaaggaacccccagaagttcagtctttcagggagaagatggcatttttcacccggcctcggatgaatatcccagctctctctgcagatgacgtctaatcgccagaaaagtatttcctttgttccactgaccaggctgtgaacattgactgtggctaaagttatttatgtggtgttatatgaaggtactgagtcacaagtcctctagtgctcttgttggtttgaagatgaaccgactttttagtttgggtcctactgttgttattaaaaacagaacaaaaacaaaacacacacacac

SEQ ID NO: 61471 - protein, 469 aa, Artificial Sequence
  derived and/or modified sequence
MEDSTSPKQEKENQEELGETRRPWEGKTAASPQYSEPESSEPLEAKQGPETGRQSRSSRPWSPQSRAKTPLGGPAGPETSSPAPVSPREPSSSPSPLAPARQDLAAPPQSDRTTSVIPEAGTPYPDPLEQSSDKRESTPHHTSQSEGNTFQQSQQPKPHLCGRRDVSYNNAKQKELRFDVFQEEDSNSDYDLQQPAPGGSEVAPSMLEITIQNAKAYLLKTSSNSGFNLYDHLSNMLTKILNERPENAVDIFENISQDVKMAHFSKKFDALQNENELLPTYEIAEKQKALFLQGHLEGVDQELEDEIGRCNWFNSIQKNEEEEEEEDEEKDDSDYIEQEVGLPLLTPISEDLEIQNIPPWTTRLSSNLIPQYAIAVLQSNLWPGAYAFSNGKKFENFYIGWGHKYSPDNYTPPVPPPVYQEYPSGPEITEMDDPSVEEEQAFRAAQEAVLLAAENEESEEDEDEEDDYD

SEQ ID NO: 61472 - protein, 600 aa, Artificial Sequence
  derived and/or modified sequence
MEDSTSPKQEKENQEELGETRRPWEGKTAASPQYSEPESSEPLEAKQGPETGRQSRSSRPWSPQSRAKTPLGGPAGPETSSPAPVSPREPSSSPSPLAPARQDLAAPPQSDRTTSVIPEAGTPYPDPLEQSSDKRESTPHHTSQSEGNTFQQSQQPKPHLCGRRDVSYNNAKQKELRFDVFQEEDSNSDYDLQQPAPGGSEVAPSMLEITIQNAKAYLLKTSSNSGFNLYDHLSNMLTKILNERPENAVDIFENISQDVKMAHFSKKFDALQNENELLPTYEIAEKQKALFLQGHLEGVDQELEDEIAENALPNVMESAFYFEQAGVGLGTDETYRIFLALKQLTDTHPIQRCRFWGKILGLEMNYIVAEVEFREGEDEEEVEEEDVAEERDNGESEAHEDEEDELPKSFYKAPQAIPKEESRTGANKYVYFVCNEPGRPWVKLPPVIPAQIVIARKIKKFFTGRLDAPIISYPPFPGNESNYLRAQIARISAGTHVSPLGFYQFGEEEGEEEEEAEGGRNSFEENPDFEGIQVIDLVESLSNWVHHVQHILSQRFRIYPPGQHGYPQISFHNMLLQSFNPTFGLEHMPSPMAKSLKIST

SEQ ID NO: 61473 - DNA, 1410 bp, Artificial Sequence
  derived and/or modified sequence
atggaggattccacaagcccaaaacaagaaaaggagaaccaagaggagctcggggagacaagaaggccgtgggagggtaagacagctgcgagcccccagtattctgaacccgaaagctcagaacccctcgaggcaaagcagggccctgagacaggaagacagagtcgatctagtcgaccttggtccccccagagcagagctaagacgcccctgggaggacccgccgggccagagactagctcgccagcacctgtcagtccccgggaaccatcgtcgagcccgtccccactagcccccgcccgacaagacctcgctgcaccaccccagagcgatcgcacaacttccgtgatccccgaggcgggtacgccctacccagaccccctggagcaatcttccgacaaacgcgagagtacgccacatcacacttcacagagcgaggggaatacgtttcagcagtcccagcagccgaagccccacctgtgcggccgcagagatgtgtcttacaacaatgcaaagcagaaggaattaaggtttgacgtgttccaagaagaagattcaaattccgattatgatttgcagcagccggctccgggcgggagcgaggtggccccttctatgctagagatcacaattcaaaacgctaaggcatatctgttaaagacctcctccaatagtgggttcaacctgtatgatcatcttagtaacatgctgaccaaaatcctcaacgaacgccccgaaaatgccgttgacatctttgaaaatatttcccaggatgtgaagatggcccacttctcaaagaagttcgacgcgttacagaacgagaacgaactcttgcccacatacgagattgccgaaaagcagaaggccttgttcctgcagggccatctcgagggcgtggaccaggaattggaggacgagattgggcggtgtaattggttcaactcaattcagaaaaatgaggaggaggaagaagaggaagatgaggagaaggacgactccgattatatcgagcaggaagtaggtctgcctctcctaaccccaatctcagaggatcttgagatccagaacatcccaccttggacaacccggctcagctctaatttaatcccccagtacgcaattgccgtgttgcagagtaacctgtggccgggtgcctatgccttttctaacgggaagaagtttgagaatttctacatagggtggggccataaatacagtcccgataactacacccctcctgtgccccccccagtgtatcaggaatatccttccggccctgagataactgaaatggacgatccctcagtagaggaggagcaggcctttcgggctgctcaggaggcagtactgctagccgctgagaacgaagagagtgaggaggacgaggatgaggaagacgattacgattag

SEQ ID NO: 61474 - DNA, 1803 bp, Artificial Sequence
  derived and/or modified sequence
atggaggacagcacctctccaaagcaggagaaggagaatcaggaggagctgggcgaaaccagacggccctgggaaggaaaaacggctgcttcgccgcaatattcagagcccgagtcttctgagcctctggaggccaagcaagggcctgagaccgggcgccagtcacggtcatctaggccatggtcccctcagagccgcgcaaaaaccccattaggggggcctgcgggcccagagacgtccagtccagccccagtttcaccacgggaaccgtcctctagcccctccccactggccccagccaggcaggacctggcagccccaccacagtcagacaggactacttccgttatccctgaggccggtacaccctatccagaccccctggagcagtcgagcgataaacgggaaagtacacctcaccacacctcccagagcgaggggaatactttccagcaatctcaacaaccgaaaccacacctctgtgggaggagggacgtcagctacaacaacgcgaaacagaaagagctgaggttcgacgtcttccaggaggaggactccaacagtgactatgatctgcagcagcccgcccccggcggctctgaagttgcccctagcatgctcgaaattacaatccagaatgcgaaagcctacctcctcaagacgtctagcaattctggcttcaatctgtacgatcatctttctaatatgttgaccaagatcctgaatgagaggcctgagaacgccgtcgatatcttcgagaatatctctcaggatgttaagatggcccacttcagtaagaaatttgacgccctgcagaacgaaaacgagttacttcctacttacgaaatcgctgagaaacaaaaagccctgttcctccaagggcatctcgagggcgtggaccaagaattagaggacgagatcgccgagaatgcattgcccaatgttatggagtcggcgttttatttcgagcaggctggtgtgggactgggcaccgatgaaacctacaggattttcttggccctcaaacagctcaccgatactcaccctattcagcgttgcagattctggggaaaaatcctgggactcgaaatgaattatattgtggccgaagtggaatttcgcgaaggggaggatgaggaagaggtggaagaagaggatgtggcagaagagcgggacaacggcgaaagcgaggcccatgaggatgaggaggatgagcttcctaagtccttctataaagccccacaggcaattcccaaagaggagagccgaacgggtgcaaacaagtacgtgtacttcgtgtgcaacgaacccggtaggccttgggtaaagctcccaccagtgatccccgcgcagatcgttatagctcgtaaaattaagaaattcttcaccggacgccttgatgctccaattatttcctatcctccattccctggtaacgagagtaactatctcagagcccagatcgccagaatctcggccgggacacacgtttccccactagggttttaccagttcggagaggaagagggtgaggaagaagaggaagctgagggcgggagaaactcttttgaagagaacccagacttcgaaggaattcaggtgatcgatctcgtggagtcgctgagcaactgggtccaccacgtacaacacatcctctcccaacgctttaggatctacccaccaggacagcatggctacccacagatctcatttcacaacatgctactgcagagctttaacccaaccttcggcctggaacacatgccaagccctatggccaagagtctcaagatatctacatag

SEQ ID NO: 61475 - DNA, 1410 bp, Artificial Sequence
  derived and/or modified sequence
atggaggacagcaccagccccaagcaggagaaggagaaccaggaggagctgggggagacccggcggccctgggagggcaagacagctgccagcccccagtacagcgagcctgagagcagcgagcccctggaggccaagcagggccctgagaccggccggcagagccgcagcagccggccctggagcccccagagccgggccaagacccccctgggcggccctgctggccctgagaccagcagccctgcccctgtgagcccccgggagcccagcagcagccccagccccctggccccagcccggcaggacctggccgccccaccccagagcgacaggaccaccagcgtcatccctgaggccggcaccccctacccagaccccctggagcagagcagtgacaagcgggagagcaccccccaccacaccagccagagcgagggcaacaccttccagcagagccagcagcccaagccccacctgtgtggcagaagagatgtgtcctacaacaatgccaagcagaaggagctgcgctttgatgtgttccaggaggaggacagcaacagcgactatgacctgcagcagcctgcccctgggggcagcgaggtggcccccagcatgctggagatcaccatccagaatgccaaggcctacctgctgaagaccagcagcaacagcggcttcaacctgtatgaccacctgagcaacatgctgaccaagatcctgaatgaaagaccagaaaatgctgtggacatctttgagaacatcagccaggatgtgaagatggcccacttcagcaagaagtttgatgccctgcagaatgaaaatgagctgctgcccacctatgaaattgctgagaagcagaaggccctcttcctgcagggccacctggagggcgtggaccaggagctggaggatgaaattggccgctgcaactggttcaacagcatccagaagaatgaggaggaggaggaggaggaggatgaggagaaggatgacagcgactacatcgagcaggaggtgggcctgcccctgctgacccccatcagcgaggacctggagatccagaacatccccccctggaccacccggctgagcagcaacctgatcccccagtatgccatcgctgtgctgcagagcaacctgtggccaggggcctatgccttcagcaatggcaagaagtttgagaacttctacatcggctggggccacaagtacagcccagacaactacaccccacctgtgcccccacctgtgtaccaggagtaccccagcggccctgagatcacagagatggatgaccccagcgtggaggaggagcaggccttccgggccgcccaggaggccgtgctgctggccgcagaaaatgaggagagcgaggaggatgaagatgaagaagatgattatgactag

SEQ ID NO: 61476 - DNA, 1803 bp, Artificial Sequence
  derived and/or modified sequence
atggaggacagcaccagccccaagcaggagaaggagaaccaggaggagctgggggagacccggcggccctgggagggcaagacagctgccagcccccagtacagcgagcctgagagcagcgagcccctggaggccaagcagggccctgagaccggccggcagagccgcagcagccggccctggagcccccagagccgggccaagacccccctgggcggccctgctggccctgagaccagcagccctgcccctgtgagcccccgggagcccagcagcagccccagccccctggccccagcccggcaggacctggccgccccaccccagagcgacaggaccaccagcgtcatccctgaggccggcaccccctacccagaccccctggagcagagcagtgacaagcgggagagcaccccccaccacaccagccagagcgagggcaacaccttccagcagagccagcagcccaagccccacctgtgtggcagaagagatgtgtcctacaacaatgccaagcagaaggagctgcgctttgatgtgttccaggaggaggacagcaacagcgactatgacctgcagcagcctgcccctgggggcagcgaggtggcccccagcatgctggagatcaccatccagaatgccaaggcctacctgctgaagaccagcagcaacagcggcttcaacctgtatgaccacctgagcaacatgctgaccaagatcctgaatgaaagaccagaaaatgctgtggacatctttgagaacatcagccaggatgtgaagatggcccacttcagcaagaagtttgatgccctgcagaatgaaaatgagctgctgcccacctatgaaattgctgagaagcagaaggccctcttcctgcagggccacctggagggcgtggaccaggagctggaggatgaaattgctgaaaatgccctgcccaacgtgatggagagcgccttctactttgagcaggccggcgtgggcctgggcacagatgagacctaccgcatcttcctggccctgaagcagctgacagacacccaccccatccagcgctgccgcttctggggcaagatcctgggcctggagatgaactacatcgtggccgaggtggagttccgggagggagaagatgaggaggaggtggaggaggaggatgtggccgaggagcgggacaatggagagagcgaggcccatgaagatgaagaagatgagctgcccaagagcttctacaaggccccccaggccatccccaaggaggagagcaggactggagccaacaagtatgtgtactttgtgtgcaatgaacctggccggccctgggtgaagctgccccctgtgatcccagcccagatcgtcatcgccaggaagatcaagaagttcttcaccggccgcctggatgcccccatcatctcctacccacccttccctggaaatgaaagcaactacctgcgggcccagatcgcccgcatctctgctggcacccacgtgagccccctgggcttctaccagtttggagaggaggagggggaggaggaggaggaggccgagggcggcaggaacagctttgaagaaaatccagactttgagggcatccaggtgattgacctggtggagagcctgagcaactgggtgcaccacgtgcagcacatcctgagccagcgcttccgcatctacccacctggccagcacggctacccccagatctccttccacaacatgctgctgcagagcttcaaccccaccttcggcctggagcacatgcccagccccatggccaagagcctgaagatcagcacctag

SEQ ID NO: 61477 - DNA, 1410 bp, Artificial Sequence
  derived and/or modified sequence
atggaggacagcaccagccccaagcaggagaaggagaaccaggaggagttgggggagacacggcgcccttgggaggggaaaactgccgcttccccacagtattctgagcccgaaagtagtgagcccttggaagctaaacagggaccagagactgggagacaatccagaagttcccgaccctggagcccccagagcagagccaaaacccccctcggcgggcccgcaggaccggagacctcttcccccgcaccagtgagtccaagggagcctagttcatctcccagccccctggcccccgcgcgccaggacctcgcagcacccccccaaagcgacagaactacctctgtcattccggaagccggcactccctaccctgatccactggaacagtcctcagacaaaagggagtccacaccccaccatacctctcagagcgaggggaacacgtttcagcagtctcaacagcctaaacctcacctgtgtgggcggcgggatgtaagctacaacaatgccaagcagaaggagcttcgctttgacgtatttcaagaggaggactcaaacagtgactatgacctccagcagccagctccaggtggatccgaggtggccccatctatgctggaaatcaccatccagaacgctaaagcttacctgctcaaaacctcctcaaactctggcttcaatctgtatgatcacctgtccaatatgctgactaagatactgaacgagcgacccgagaacgcggtggacatcttcgagaatattagtcaggacgtaaaaatggctcatttttcaaaaaaatttgatgccctacagaacgaaaacgagctcctaccaacttacgagatagcggagaagcagaaagcattgtttctgcaggggcatctcgaaggagttgaccaggagcttgaagatgaaattggtaggtgcaattggttcaattcgatccagaagaacgaggaggaagaggaagaggaggacgaggagaaggatgattctgactatatcgaacaggaggtcggcttacccctgctgactccaatctccgaggatctggaaattcagaatatcccaccatggacaacaaggctgtctagcaacctcattccccagtacgctatcgctgtgctacagtcgaacctgtggcccggtgcttacgcctttagtaatggtaagaagttcgagaatttctacatcggatggggtcacaagtacagccccgacaattacaccccacccgtgccgccgccagtctaccaagagtatccaagcggaccagagattacggaaatggatgatccatcagtggaggaggaacaagccttccgtgccgcccaggaggccgttctcttagcagctgagaatgaagagtccgaagaggatgaggatgaggaagacgattacgattag

SEQ ID NO: 61478 - DNA, 1803 bp, Artificial Sequence
  derived and/or modified sequence
atggaggacagcaccagccccaagcaggagaaggagaaccaggaggagctgggcgagacccgccgcccctgggagggtaaaacggccgcctcaccccagtatagcgaacccgagagcagtgagccgcttgaggcaaagcaagggcccgaaacaggtcgccagtcccgaagttccaggccatggagcccccagtcccgagccaagactccactgggtggacccgcggggcccgagacaagttctcccgctcctgtttctcctagggagccttcttcatcgccttcacctcttgctcctgccagacaagacttggctgctcctccccagagtgaccgaacaacgtcagtaataccagaggcgggtacgccatatccagatcctttagagcagagttctgacaaaagagagagtaccccacatcacacaagccagtccgaaggaaatacctttcagcaatcacagcaacccaagccacacctttgcggcaggcgtgatgtgagctataacaacgctaaacaaaaggaactccggttcgatgtgtttcaggaggaagatagcaactccgactacgacctgcaacagccggccccaggtggaagcgaggtggctccatcaatgctggaaatcacaatccaaaatgccaaagcttacctgctcaagacaagtagcaacagtggattcaacctgtacgatcatctgtccaacatgctgacaaaaatccttaatgaacgccccgagaatgctgtggacattttcgagaatatctcgcaggacgtcaaaatggctcatttctctaagaagttcgacgcccttcagaatgagaacgaattactcccgacttatgaaatcgcagagaagcagaaggcactctttcttcagggccatttagagggggtcgaccaagaactcgaagacgaaatcgcggagaacgcactccctaacgtgatggaatcagctttctacttcgagcaagcgggcgtcggcctgggtactgacgagacctatcggatctttctggcactgaaacaactcacagatacccacccaatacagcgttgccgattctggggcaaaatcttgggtctggaaatgaactatatagttgcagaagtggaatttagagagggggaagatgaggaggaagttgaggaagaagatgtggccgaagaacgagataacggcgaatccgaagcccacgaggacgaggaagacgagttaccaaaatccttttacaaggcaccccaggccatcccaaaggaggagtcacgaactggggccaataaatacgtgtatttcgtgtgtaacgaacccggacggccctgggtgaagctgccacctgtgatccctgcccagatcgtgattgcaagaaagataaaaaagttctttaccggcaggctcgacgcacccatcattagttatcctcccttccccgggaacgagtccaattacctgcgggcccaaatcgctcggatttctgcaggcactcacgtatccccattgggtttctaccagtttggggaggaagaaggagaagaagaggaagaggccgaagggggtcgcaactcctttgaggagaaccctgacttcgaagggatccaggtgattgacctggttgagagcctgtccaactgggtccaccacgtacagcacatcctatctcagcggttccgtatatacccacctgggcagcacggctatcctcagatctcattccataacatgctgttgcagagttttaatcctacatttggcctcgagcatatgcctagtccaatggctaagagccttaagattagcacttag

SEQ ID NO: 61479 - DNA, 1410 bp, Artificial Sequence
  derived and/or modified sequence
atggaggactctacatcaccgaagcaggagaaagagaatcaagaagagctcggagagactagacgtccatgggagggcaagacggcggcaagcccccagtattctgaacctgaaagcagtgagccactggaggccaaacagggccctgagacaggacgccagagccgctccagcagaccctggtcgccgcagagccgggctaagactcctttgggagggcctgccggaccggaaacatctagtcctgcgccagtctcaccgagggagccctcctccagtccctcccctttagcacccgctagacaggacctggccgctccccctcagagcgacaggaccaccagtgtgattccggaagccggaactccataccccgatcctctggaacagtcatcagacaaaagggagtcgacccctcaccacacctcgcaaagcgaaggaaacacattccaacagagccagcagccgaagccccatctctgtgggcgacgcgatgtatcctacaataatgccaagcagaaggagttgcgctttgacgttttccaggaagaagatagtaattccgactacgacctgcagcagcctgcccctggaggtagcgaagtcgccccaagcatgctcgagatcacgattcagaacgccaaagcttaccttctgaaaacgtctagtaatagcggattcaatctgtacgatcaccttagtaatatgctcaccaaaatattgaacgaaagacccgaaaatgctgtagacatttttgagaatattagccaggacgtcaagatggcccacttctctaagaaattcgacgccctacagaatgagaatgaactgctcccgacatacgagatagccgaaaagcaaaaggccctgtttctgcagggccatctggagggagtggaccaggaacttgaggacgagatagggaggtgcaattggtttaatagtatccagaagaatgaggaggaagaagaagaagaggacgaagagaaagacgattctgattatatcgaacaagaagttgggctcccactcctcacgccaatatccgaggacttggaaattcagaacatccccccttggaccacccggctgagttctaacctgatcccccagtacgctatcgctgttctgcagagcaacctatggccgggagcttatgcctttagcaatggcaagaaatttgaaaatttttacataggatgggggcataaatactctccagataattatacgcctccggtcccccctcccgtctatcaggagtatccaagcggccctgaaatcaccgagatggatgatccatcagtcgaggaggagcaagctttccgcgcagcacaagaagcggtgttgctggccgcagagaatgaggagtcagaagaggacgaagacgaggaggatgactatgattag

SEQ ID NO: 61480 - DNA, 1803 bp, Artificial Sequence
  derived and/or modified sequence
atggaggattctacaagcccaaagcaggaaaaggaaaaccaggaagagctgggagagactcgcaggccatgggagggtaagaccgcggcttcacctcagtactctgaacctgaaagcagtgagcctctcgaggctaagcaaggcccagagaccggacggcagagccggtccagcagaccgtggagcccacagtcccgagctaaaacaccattgggcggaccagccggtcccgagacttcttctcccgctcccgtcagcccgagggaacccagcagtagcccgagccccttggcacctgccagacaggatctcgccgctccaccgcagtcggatagaacgacttccgttattcccgaggcgggtaccccctaccccgaccctctcgagcagtcaagtgacaaacgagaatccactcctcaccatactagtcagtcagagggtaacaccttccaacagtctcagcagcctaagccgcatctctgcggcagaagggacgtgtcatataataatgccaagcagaaggagctgaggtttgatgtgtttcaggaggaagattccaattccgattatgatttgcagcagcctgcccctggagggagtgaagtggctccttctatgctggagataacaatacagaacgccaaagcctacctgctaaagacctccagtaacagtggctttaatctatatgaccacctgtcaaatatgctgacaaagattctgaatgaaagacccgagaacgcggtagacatcttcgaaaatataagtcaagatgtaaagatggcccatttttcgaaaaagttcgatgccttgcagaatgagaacgaattattgcccacctacgaaattgcagagaagcagaaggccctttttttgcagggccatcttgagggcgtggatcaagagttagaagatgaaattgctgaaaatgcgctccccaatgtgatggagtccgctttttacttcgagcaggccggtgtgggactaggcacagacgagacgtatcggatctttctggcgctaaaacagcttaccgatacacacccaattcagcggtgtaggttctggggaaagatccttggactagagatgaattatattgtggcggaggtcgagttcagggagggcgaagatgaggaggaggtggaggaagaggacgttgcggaagagcgggacaatggggagagtgaggcccatgaggacgaggaagacgagctgcccaaaagcttctataaggcgccacaggcaattccgaaagaagaatcccgaactggcgcaaacaagtacgtctattttgtgtgcaacgagcctggtcgcccttgggttaaacttccaccagttatccccgcacagattgtgatcgccagaaagattaaaaaattctttaccggtaggctcgacgctccaattatctcctatccccctttccccggaaatgaatccaattatcttagagcacagatcgctcggatttcagcaggcacacatgtcagcccactcggattctatcagttcggcgaggaggagggcgaggaggaagaagaggcagagggcggtagaaacagttttgaggagaatcctgatttcgaagggattcaagtgatcgatttggtcgaatctctgtctaactgggtccatcacgtgcagcacattctgagccagagatttagaatttatcccccagggcagcatggatatcctcagatcagttttcacaacatgctgcttcagagctttaaccccactttcggactggagcatatgccttccccgatggccaagagtctaaagatctctacgtag

SEQ ID NO: 61481 - DNA, 1410 bp, Artificial Sequence
  derived and/or modified sequence
atggaggactcaacctccccgaagcaagaaaaagaaaaccaagaagaactaggggaaacaaggcggccatgggaaggaaagacagcagcttctccccaatattctgagcctgagtcgtctgagcccttggaggcgaagcaggggccagaaactggacgccagtcccgaagcagccgtccttggagcccgcagtctagagccaagacgcctctgggtggccccgcgggaccagaaacatcatcacctgctcctgtctctccgcgggagccctcttcctctccttctcccctggctccggccagacaagacctcgcggcaccacctcagtcggacaggaccacgagtgtgattcctgaagctgggacaccttatcctgatcctttggaacaatcatctgataaaagagaatcaactcctcatcacacaagccagtcagaaggaaacacctttcaacagtctcagcaacccaaaccccacctgtgtggacgaagggacgtgagctataacaacgctaaacagaaagagctgagatttgacgtttttcaggaggaagactcaaacagtgactatgatttacagcagccggcgcctgggggctctgaagtggcccccagcatgcttgagatcaccattcagaatgctaaggcttacctgctgaagactagcagcaattcgggctttaatctatatgatcatctttctaatatgttgaccaagatattaaatgagcgtcctgaaaatgctgttgacatctttgaaaatattagccaagatgtgaagatggcacattttagtaaaaaatttgatgcactacaaaatgagaatgagttgcttccaacatatgaaatagcagaaaagcaaaaggctctttttctccagggacatttggaaggagttgaccaagaattggaagatgaaataggtcgctgtaattggttcaactccatacaaaaaaatgaggaagaagaagaggaagaagatgaagaaaaagacgattctgactacatagaacaggaagtggggcttcctcttttgacaccaatctctgaagatttagagattcagaatatacccccctggacaacacggttatcctcaaatctcattccacaatatgctattgcagtccttcaatccaacctttggcctggagcatatgccttctccaatggcaaaaagtttgaaaatttctacataggctggggtcataagtatagtccagacaattatacacccccagttccaccaccagtttatcaagaataccccagtggaccagaaattacagaaatggatgatcctagtgtggaggaggagcaggctttcagggctgcacaagaagcagttctactcgcagctgagaatgaagaatctgaggaagatgaagatgaggaagatgattatgactaa

SEQ ID NO: 61482 - DNA, 2704 bp, Artificial Sequence
  derived and/or modified sequence
atggagataggacgcagcaactcacagagcaaccaggacccagaaatcgcttaagagaccgcggcaaagtaacttaactgagttgccttcttccatattttcacgcccctttcatccagaacattttttttcttgaactgcttccatggaggactcaacctccccgaagcaagaaaaagaaaaccaagaagaactaggggaaacaaggcggccatgggaaggaaagacagcagcttctccccaatattctgagcctgagtcgtctgagcccttggaggcgaagcaggggccagaaactggacgccagtcccgaagcagccgtccttggagcccgcagtctagagccaagacgcctctgggtggccccgcgggaccagaaacatcatcacctgctcctgtctctccgcgggagccctcttcctctccttctcccctggctccggccagacaagacctcgcggcaccacctcagtcggacaggaccacgagtgtgattcctgaagctgggacaccttatcctgatcctttggaacaatcatctgataaaagagaatcaactcctcatcacacaagccagtcagaaggaaacacctttcaacagtctcagcaacccaaaccccacctgtgtggacgaagggacgtgagctataacaacgctaaacagaaagagctgagatttgacgtttttcaggaggaagactcaaacagtgactatgatttacagcagccggcgcctgggggctctgaagtggcccccagcatgcttgagatcaccattcagaatgctaaggcttacctgctgaagactagcagcaattcgggctttaatctatatgatcatctttctaatatgttgaccaagatattaaatgagcgtcctgaaaatgctgttgacatctttgaaaatattagccaagatgtgaagatggcacattttagtaaaaaatttgatgcactacaaaatgagaatgagttgcttccaacatatgaaatagcagaaaagcaaaaggctctttttctccagggacatttggaaggagttgaccaagaattggaagatgaaatagcagaaaacgctcttccaaatgtaatggagtcagctttttattttgaacaagctggagttggtttgggcacagatgagacataccgcatatttcttgccctcaagcagcttactgatacccacccaatccaaagatgccgcttctggggaaagatcttgggtctggaaatgaattatattgtagctgaagtggaatttcgtgagggggaagatgaagaggaagtggaagaggaagatgtagctgaagagagggacaatggagaaagtgaagctcatgaagatgaggaagatgaattaccaaagtccttttacaaggccccacaggctataccaaaagaagaaagtagaacaggtgccaacaaatatgtctattttgtttgcaatgaaccaggaagaccatgggtgaagttaccaccagttatacctgcacaaattgttattgcaagaaaaatcaagaaatttttcactgggcgattggatgctcccatcataagctacccacctttcccaggaaatgagagtaattatttacgagcacaaattgcccgaatttcagcaggaacccacgtcagtcctctaggattttatcagtttggtgaagaggaaggagaggaggaggaagaggcagaaggtgggcgaaatagctttgaggaaaaccctgattttgaaggcatccaagtgattgatctagtagaatccctatccaattgggttcatcatgtacagcatattctctctcagagattcagaatatacccccctggacaacacggttatcctcaaatctcattccacaatatgctattgcagtccttcaatccaacctttggcctggagcatatgccttctccaatggcaaaaagtttgaaaatttctacataggctggggtcataagtatagtccagacaattatacacccccagttccaccaccagtttatcaagaataccccagtggaccagaaattacagaaatggatgatcctagtgtggaggaggagcaggctttcagggctgcacaagaagcagttctactcgcagctgagaatgaagaatctgaggaagatgaagatgaggaagatgattatgactaataaacataaaattagcctggttttatgtgacactgatacacacacaccccttatatgggactaattttacacttttctgtgttatgtgtgtatatacatacacatgtaagaaattattcaactgcaaaatctcaatcttgaaaatcaagcttgaaatttcataggtagaaatattagcatttttattgaaagatactcacaggattttccagaggctaaataacatgcaattgcataattgttctgagggttatggataatggaatatgtgtttgtacattcctgtttttaaaagggctcaggtttcacatggtccaggtgaggtaaaacaattaaaataaataaataaatggtctcaggtttaatttgtaatacgacaaacactggaagatataacccacaggaaattcttggaaacatcaatactttttaaagagtgtcaaggggtatgaagacaaaaaatattgatagtcactagagtaatgtattcttaacctttgtaagaactgatctcagcatgtattcttaaacctttgtaattacc

SEQ ID NO: 61483 - DNA, 1410 bp, Artificial Sequence
  derived and/or modified sequence
atggaggacagcaccagccccaagcaggagaaggagaaccaggaggagctgggcgagaccagaagaccctgggagggcaagaccgccgccagcccccagtacagcgagcccgagagcagcgagcccctggaggccaagcagggccccgagaccggcagacagagcagaagcagcagaccctggagcccccagagcagagccaagacccccctgggcggccccgccggccccgagaccagcagccccgcccccgtgagccccagagagcccagcagcagccccagccccctggcccccgccagacaggacctggccgcccccccccagagcgacagaaccaccagcgtgatccccgaggccggcaccccctaccccgaccccctggagcagagcagcgacaagagagagagcaccccccaccacaccagccagagcgagggcaacaccttccagcagagccagcagcccaagccccacctgtgcggcagaagagacgtgagctacaacaacgccaagcagaaggagctgagattcgacgtgttccaggaggaggacagcaacagcgactacgacctgcagcagcccgcccccggcggcagcgaggtggcccccagcatgctggagatcaccatccagaacgccaaggcctacctgctgaagaccagcagcaacagcggcttcaacctgtacgaccacctgagcaacatgctgaccaagatcctgaacgagagacccgagaacgccgtggacatcttcgagaacatcagccaggacgtgaagatggcccacttcagcaagaagttcgacgccctgcagaacgagaacgagctgctgcccacctacgagatcgccgagaagcagaaggccctgttcctgcagggccacctggagggcgtggaccaggagctggaggacgagatcggcagatgcaactggttcaacagcatccagaagaacgaggaggaggaggaggaggaggacgaggagaaggacgacagcgactacatcgagcaggaggtgggcctgcccctgctgacccccatcagcgaggacctggagatccagaacatccccccctggaccaccagactgagcagcaacctgatcccccagtacgccatcgccgtgctgcagagcaacctgtggcccggcgcctacgccttcagcaacggcaagaagttcgagaacttctacatcggctggggccacaagtacagccccgacaactacaccccccccgtgcccccccccgtgtaccaggagtaccccagcggccccgagatcaccgagatggacgaccccagcgtggaggaggagcaggccttcagagccgcccaggaggccgtgctgctggccgccgagaacgaggagagcgaggaggacgaggacgaggaggacgactacgactag

SEQ ID NO: 61484 - DNA, 1803 bp, Artificial Sequence
  derived and/or modified sequence
atggaggacagcaccagccccaagcaggagaaggagaaccaggaggagctgggcgagaccagaagaccctgggagggcaagaccgccgccagcccccagtacagcgagcccgagagcagcgagcccctggaggccaagcagggccccgagaccggcagacagagcagaagcagcagaccctggagcccccagagcagagccaagacccccctgggcggccccgccggccccgagaccagcagccccgcccccgtgagccccagagagcccagcagcagccccagccccctggcccccgccagacaggacctggccgcccccccccagagcgacagaaccaccagcgtgatccccgaggccggcaccccctaccccgaccccctggagcagagcagcgacaagagagagagcaccccccaccacaccagccagagcgagggcaacaccttccagcagagccagcagcccaagccccacctgtgcggcagaagagacgtgagctacaacaacgccaagcagaaggagctgagattcgacgtgttccaggaggaggacagcaacagcgactacgacctgcagcagcccgcccccggcggcagcgaggtggcccccagcatgctggagatcaccatccagaacgccaaggcctacctgctgaagaccagcagcaacagcggcttcaacctgtacgaccacctgagcaacatgctgaccaagatcctgaacgagagacccgagaacgccgtggacatcttcgagaacatcagccaggacgtgaagatggcccacttcagcaagaagttcgacgccctgcagaacgagaacgagctgctgcccacctacgagatcgccgagaagcagaaggccctgttcctgcagggccacctggagggcgtggaccaggagctggaggacgagatcgccgagaacgccctgcccaacgtgatggagagcgccttctacttcgagcaggccggcgtgggcctgggcaccgacgagacctacagaatcttcctggccctgaagcagctgaccgacacccaccccatccagagatgcagattctggggcaagatcctgggcctggagatgaactacatcgtggccgaggtggagttcagagagggcgaggacgaggaggaggtggaggaggaggacgtggccgaggagagagacaacggcgagagcgaggcccacgaggacgaggaggacgagctgcccaagagcttctacaaggccccccaggccatccccaaggaggagagcagaaccggcgccaacaagtacgtgtacttcgtgtgcaacgagcccggcagaccctgggtgaagctgccccccgtgatccccgcccagatcgtgatcgccagaaagatcaagaagttcttcaccggcagactggacgcccccatcatcagctacccccccttccccggcaacgagagcaactacctgagagcccagatcgccagaatcagcgccggcacccacgtgagccccctgggcttctaccagttcggcgaggaggagggcgaggaggaggaggaggccgagggcggcagaaacagcttcgaggagaaccccgacttcgagggcatccaggtgatcgacctggtggagagcctgagcaactgggtgcaccacgtgcagcacatcctgagccagagattcagaatctacccccccggccagcacggctacccccagatcagcttccacaacatgctgctgcagagcttcaaccccaccttcggcctggagcacatgcccagccccatggccaagagcctgaagatcagcacctag

SEQ ID NO: 61485 - protein, 1060 aa, Artificial Sequence
  derived and/or modified sequence
MGNSITYRDQAAVENHLEQRLHQPQKLLEDLRKTDAQQFRTAMKCLLEDKKDGLDLKDIIIDLGEIRERALQSPGVNRSLFLITLERCFQMLNSLECVEILGKVLRGSSGSFLQPDITERLPRDLREDAFKNLSAVFKDLYDKTSAHSQRALYSWMTGILQTSSNATDDSASWVSAEHLWVLGRYMVHLSFEEITKISPIEIGLFISYDNATKQLDMVYDITPELAQAFLERISSSNFNMRNTSTIHRLGLLVCFYNDLELLDATVAQVLLYQMIKCSHLRGFQAGVQKLKAELLDIAMENQTLNETLGSLSDAVVGLTYSQLESLSPEAVHGAISTLNQVSGWAKSQVIILSAKYLAHEKVLSFYNVSQMGALLAGVSTQAFCSMKRKDISQVLRSAVSQYVSDLSPAQQQGILSKMVQAEDTAPGIVEIQGAFFKEVSLFDLRRQPGFNSTVLKDKELGRSQALFLYELLLKTTRRPEELLSAGQLVKGVTCSHIDAMSTDFFLAHFQDFQNNFALLSPYQVNCLAWKYWEVSRLSMPPFLLAALPARYLASVPASQCVPFLISLGKSWLDSLVLDSHKKTSVLRKVQQCLDDSIADEYTVDIMGNLLCHLPAAIIDRGISPRAWATALHGLRDCPDLNPEQKAAVRLKLLGQYGLPQHWTAETTKDLGPFLVLFSGDELSSIATKFPEILLQAASKMARTLPTKEFLWAVFQSVRNSSDKIPSYDPMPGCHGVVAPSSDDIFKLAEANACWALEDLRCMEEDTFIRTVELLGAVQGFSRPQLMTLKEKAIQVWDMPSYWREHHIVSLGRIALALNESELEQLDLSSIDTVASLSWQTEWTPGQAESILQGYLDDSGYSIQDLKSFHLVGLGATLCAINITEIPLIKISEFRVVVARIGTLLCSTHVLAEFKRKAEVVFGDPTEWTSSVLQELGTIAAGLTKAELRMLDKDLMPYFQPSAIKCLPDEIFKELSAEQIASLGPENAAAVTHAQRRRLSPLQLQSLQQALDGAKTHSWQDAPASAGPTRTSSSRSPAGALQSWGLWLGCPLLVLMAKLLW

SEQ ID NO: 61486 - DNA, 3183 bp, Artificial Sequence
  derived and/or modified sequence
atgggtaactcgatcacctatagggaccaggcggcagtggaaaaccatctagagcagcggctccaccaaccgcagaagctcctagaggatctgcgcaagacagacgctcagcagtttagaacagcgatgaaatgtctcttggaggacaaaaaagatggcctcgatctaaaagacatcatcatcgatctgggcgagattagagaacgcgctctgcagtcccctggagtcaaccggtctctatttctgataacccttgagcggtgcttccaaatgctgaattccttggagtgtgtagagattctcggcaaagtgctgagggggtcgtctggcagctttttacagcccgacattacagaacgactgccacgagacctcagagaagacgcctttaagaacctgagcgcagtgttcaaagacctgtacgataagacatccgctcattctcaaagagctctgtactcttggatgacggggatcctgcaaacatcatcaaacgccactgacgattcagccagctgggtatccgccgagcatctatgggtgttaggaagatatatggtgcacctgagcttcgaggagataaccaaaatatcacccatcgaaattgggctgttcatatcctatgataatgctactaagcagctggacatggtatatgatattacaccagagttagctcaggcatttctggaacgcatttcttctagtaattttaacatgcggaacacgtctaccatacacagactaggtcttctcgtttgtttctacaacgacctggaattgctcgatgccacagtggctcaggtccttctgtaccaaatgattaaatgcagccacttgaggggttttcaggcgggagtgcagaagctcaaggccgagctactggacattgccatggaaaaccaaactttgaatgagactttagggtccctgtcagacgctgttgtcggtctgacatactcacagcttgagtctctttctcctgaggctgtgcatggggccattagtaccctcaatcaggttagcggatgggccaagtcccaggtgattattttatccgccaagtacttggcccatgaaaaggtgttgagtttctacaatgtgtcgcagatgggagcactcctggcaggggtgagcacacaggcattctgctctatgaaaaggaaggacattagccaggttctccgcagcgccgtctctcagtatgtgtccgacctctcacctgcccagcagcaggggatcctgagcaaaatggtgcaggctgaagataccgctcccggaatagtcgaaatccagggggcctttttcaaggaggtcagcctgttcgacttacggagacagcctggctttaattccacagtgctgaaagataaggagctgggacgcagtcaggcactgtttttatatgagctgctgttgaagaccacccgcaggcctgaggagctcctgtctgctggccagctagtaaaaggggtgacatgctctcatattgacgccatgagtactgatttcttcctagctcactttcaagattttcagaacaactttgccttgctgagcccctatcaagtgaattgcctggcttggaagtattgggaagtgagccgactttccatgccaccattcctgcttgctgccctgccagctaggtatttggcttctgtgcctgccagccagtgtgtccctttcctgataagcctgggaaagagttggctcgatagcctggtgctggactcacacaaaaagacgtccgtgcttaggaaggtacagcaatgtttagacgatagtattgcagatgaatatacagtcgacataatgggcaaccttctgtgccatctgccggctgccatcattgatagggggatctccccacgcgcctgggctacggccctgcatggcttgcgcgactgccctgatctgaatccggagcaaaaagccgctgtaagacttaagctcctcgggcaatatggcctaccccagcactggaccgcagagactaccaaagacctggggccatttctcgtattattttcaggcgatgaactgtcaagtatcgccacaaaattccccgagatcctgcttcaggccgctagcaagatggcccggacccttcccaccaaagagtttctgtgggcggtgtttcagagcgtcaggaacagctccgacaagattcccagttatgaccccatgccgggatgtcacggagtggtggcgccctcctcagacgacatctttaaactggctgaggccaacgcttgttgggctttagaggacctgcgttgtatggaggaggatactttcatcagaaccgtggaacttttaggagcagttcaaggattctctcgcccacagctcatgacccttaaagaaaaagccatccaggtttgggacatgccgtcttattggcgcgagcatcacatcgtgtccctgggcaggatcgcactggcactgaatgagtccgagctggagcagctcgatctgtcgtctatcgatacagtagcatctctgtcttggcagacagagtggacccctggccaggccgaatcaatcctccagggctacttggatgatagcggctattcaatccaggatctcaaatcctttcacctagtaggcttgggtgctacgctgtgcgcaatcaacatcacagagatacctctaattaaaatttcagagtttcgagtggttgtggctaggatcggcacattgctgtgttccacacacgtgctggccgagtttaaaagaaaggcagaagtggtgtttggagatccgaccgagtggacatcatccgtcctccaggaattagggactatcgccgccgggctgacaaaggctgaactcagaatgttagacaaagacctgatgccctattttcagccctccgctatcaagtgcctgccggacgaaatattcaaagaactgtcggccgaacagattgccagcctcggcccagagaatgccgctgccgtgacccatgcccagcgcagaagactcagccccttgcagctgcaaagtctccagcaggccttggatggtgcgaaaacacacagttggcaggatgctccagcctccgccggaccgacgcggacatcgagtagcagaagtcccgctggagccctccagagctggggactatggctggggtgcccactgcttgtcttgatggctaagctgctgtggtag

SEQ ID NO: 61487 - DNA, 3183 bp, Artificial Sequence
  derived and/or modified sequence
atgggcaacagcatcacctacagagaccaggccgctgtggagaaccacctggagcagaggctgcaccagccccagaagctgctggaggacctgaggaagacagatgcccagcagttcagaacagccatgaagtgcctgctggaggacaagaaggatggcctggacctgaaggacatcatcatcgacctgggggagatccgggagcgggccctgcagagccctggggtgaacagaagcctcttcctgatcaccctggagcgctgcttccagatgctgaacagcctggagtgtgtggagatcctgggcaaggtgctgcggggcagcagcggcagcttcctgcagcctgacatcacagagcggctgccccgggacctgagagaagatgccttcaagaacctgtctgctgtgttcaaggacctgtatgacaagaccagcgcccacagccagagggccctgtacagctggatgacaggcatcctgcagaccagcagcaatgccacagatgacagcgcctcctgggtgtctgctgagcacctgtgggtgctgggccgctacatggtgcacctgagctttgaggagatcaccaagatcagccccatcgagatcggcctcttcatctcctatgacaatgccaccaagcagctggacatggtgtatgacatcaccccagagctggcccaggccttcctggagcgcatcagcagcagcaacttcaacatgaggaacaccagcaccatccaccggctgggcctgctggtgtgcttctacaatgacctggagctgctggatgccaccgtggcccaggtgctgctgtaccagatgatcaagtgcagccacctgcggggcttccaggccggcgtgcagaagctgaaggccgagctgctggacatcgccatggagaaccagaccctgaatgagaccctgggcagcctgagtgatgctgtggtgggcctgacctacagccagctggagagcctgagccctgaggccgtgcacggggccatcagcaccctgaaccaggtgtctggctgggccaagagccaggtgatcatcctgagcgccaagtacctggcccacgagaaggtgctgtccttctacaacgtgtcccagatgggcgccctgctggccggcgtgtccacccaggccttctgcagcatgaagaggaaggacatcagccaggtgctgcggtctgctgtgtcccagtatgtgtctgacctgagccctgcccagcagcagggcatcctgagcaagatggtgcaggccgaggacacagcccctggcatcgtggagatccagggcgccttcttcaaggaggtgtccctgtttgacctgcggcggcagcccggcttcaacagcacagtgctgaaggacaaggagctgggccgcagccaggccctcttcctgtatgagctgctgctgaagaccaccaggaggcctgaggagctgctgtctgctggccagctggtgaagggcgtgacctgcagccacattgatgccatgagcacagacttcttcctggcccacttccaggacttccagaacaactttgccctgctgagcccctaccaggtgaactgcctggcctggaagtactgggaggtgtcccggctgtccatgccacccttcctgctggccgccctgcctgcccgctacctggcctctgtgcctgccagccagtgtgtgcccttcctgatcagcctgggcaagtcctggctggacagcctggtgctggacagccacaagaagacctctgtgctgaggaaggtgcagcagtgcctggatgacagcattgctgatgagtacacagtggacatcatgggcaacctgctgtgccacctgcctgctgccatcatcgaccggggcatcagcccccgggcctgggccacagccctgcacggcctgcgggactgcccagacctgaaccctgagcagaaggctgctgtgcggctgaagctgctgggccagtatggcctgccccagcactggacagctgagaccaccaaggacctgggccccttcctggtgctcttctctggagatgagctgagcagcatcgccaccaagtttcctgagatcctgctgcaggccgccagcaagatggcccggaccctgcccaccaaggagttcctgtgggccgtgttccagagcgtgaggaacagcagtgacaagatccccagctatgaccccatgcctggctgccacggcgtggtggcccccagcagtgatgacatcttcaagctggccgaggccaatgcctgctgggccctggaggacctgcgctgcatggaggaggacaccttcatcagaacagtggagctgctgggcgctgtgcagggcttcagccggccccagctgatgaccctgaaggagaaggccatccaggtgtgggacatgcccagctactggagggagcaccacatcgtgtccctgggcagaattgccctggccctgaatgaaagtgagctggagcagctggacctgagcagcattgacacagtggccagcctgtcctggcagacagagtggaccccaggccaggccgagagcatcctgcagggctacctggatgacagcggctacagcatccaggacctgaagagcttccacctggtgggcctgggcgccaccctgtgtgccatcaacatcacagagatccccctcatcaagatcagcgagttccgggtggtggtggcccgcatcggcaccctgctgtgcagcacccacgtgctggccgagttcaagaggaaggccgaggtggtgtttggagaccccacagagtggaccagctctgtgctgcaggagctgggcaccatcgccgccggcctgaccaaggccgagctgaggatgctggacaaggacctgatgccctacttccagcccagcgccatcaagtgcctgcctgatgagatcttcaaggagctgtctgctgagcagatcgccagcctgggcccagaaaatgctgctgctgtgacccacgcccagaggcggcggctgagccccctgcagctgcagagcctgcagcaggccctggatggagccaagacccacagctggcaggatgccccagccagcgctggccccaccaggaccagcagcagccgcagccctgctggggccctgcagagctggggcctgtggctgggctgccccctgctggtgctgatggccaagctgctgtggtag

SEQ ID NO: 61488 - DNA, 3183 bp, Artificial Sequence
  derived and/or modified sequence
atgggcaacagcatcacctaccgggaccaggccgccgtggagaaccacctagaacagaggctccaccagccacaaaaactgttggaagatctgcgaaaaactgacgcacagcaatttaggactgctatgaagtgtctgcttgaggacaagaaggatgggctggacttgaaggacattatcatcgacctaggggaaatccgagagcgtgccctgcagagtcctggggtgaaccgctcactcttcttgatcaccctggaaaggtgcttccagatgctgaattccctggagtgtgtcgaaatcttaggtaaggtactcagaggatcttctgggagcttcttgcagcccgacataacagagagactgccaagggatcttagagaagacgcattcaagaacctctcagcagttttcaaggacttatacgacaaaacgtccgcccattcacaaagagcgctgtactcctggatgaccggcattctacagacatcttccaatgccacagatgactcagccagttgggtgagcgccgagcatctgtgggtcctgggtaggtacatggtgcacctgtccttcgaagagattaccaaaatcagccctatagagatcggcctgtttatttcttatgataacgcgacaaagcagctggatatggtgtacgacataactcctgagctggctcaggcgtttctggaaagaatttcttcctccaacttcaacatgaggaacacgtccaccattcacagacttggactccttgtttgcttctacaatgatctggaacttctcgatgcaactgtcgcccaagtgctgctctatcagatgattaagtgtagccacctgcgggggttccaggccggggtccagaagcttaaagcggaactactggatatcgccatggaaaaccaaacccttaacgagaccttagggtcactgagcgatgcggtggtcggcctgacttattcacagctggagtcattgagccctgaggccgttcatggagcaatcagcacactgaaccaggtctcagggtgggcaaaaagccaggtcattatattaagcgccaaatacttggcacacgagaaggttctctcattttacaacgtgtcccagatgggcgcactgctggcgggggtcagcactcaggcgttctgttcgatgaagagaaaggacatttcccaagtgttgagatcagccgtgtcacagtatgtgtctgacctgtcacccgctcaacaacaaggtattctctctaagatggtgcaggccgaggacacagcccccggtatcgtcgagatacagggtgctttcttcaaggaggtgtccctctttgatctaagacgccagcctggatttaatagcaccgtgctcaaggataaagaacttggccggtctcaggcgctgttcctgtacgaactcctcttgaagaccacgagacgcccagaggaactcctgtcggcaggccaactagtgaaaggagtcacgtgcagccatattgacgccatgagtaccgacttctttttggcccatttccaggatttccagaataattttgccctgctcagcccctatcaggtgaactgcttagcgtggaagtactgggaggtgagccgcctgtctatgccccctttcttgctcgcagcccttcccgctaggtacctcgcaagcgtgcctgcatcccagtgtgttccttttctgatttctctgggaaagtcgtggctcgactctctagtgttggatagccacaaaaagaccagcgtgctacgcaaggtgcaacaatgtttggatgattctattgccgacgaatacaccgttgacatcatgggcaatcttctgtgccatctgcctgctgctatcatcgaccggggcatcagcccccgagcatgggcaaccgctctacacggcctgagggactgccctgacctgaatccagaacaaaaggcggccgtacggctcaaactgcttggacaatacggtttaccccagcactggacagccgagacgaccaaggatttggggcctttccttgtccttttttcgggtgatgaactctcaagtattgcaaccaagtttccggagatcctactccaggcagcttctaaaatggcacgaacactcccgactaaggaatttctgtgggccgtgttccaatctgtgaggaactcttccgataagattccctcctacgatcccatgcctggctgtcacggtgtcgtcgctcctagttctgacgatatttttaagctggctgaagcgaatgcatgctgggccctcgaagatctgcgttgcatggaagaagacacctttatccggacagtggaactcctcggcgcagtccaaggcttctcacgaccacagctcatgaccctgaaggaaaaggccattcaggtgtgggacatgcctagttactggcgcgaacaccatatagtgtccctggggagaattgctctggccttgaatgagtccgaacttgagcagttagacctgagcagcattgacactgtcgcaagcctgtcatggcagactgaatggactccaggccaggcagaatcaatactgcaagggtacctggacgactccggctattccattcaagatctcaagtcatttcatctggtgggcctaggggccacactatgcgctattaatattaccgagataccactgatcaaaatctccgagtttagggtcgtggtcgcaagaatcgggaccctgctctgttcaacccatgttctggccgaatttaaacgaaaggcagaagtagtattcggagatccaacagagtggacgtcatcagttttgcaagagctcggtactatcgccgcagggctgacgaaggccgagctgcgcatgttagataaggatctaatgccatatttccaaccctccgcaatcaaatgtctgcctgatgagatcttcaaagagctaagcgctgagcagattgcgtcgctgggcccagagaatgcagcagccgtgacccacgcgcagagaaggaggctaagcccactccagctgcagtctctgcaacaggccctggatggggctaagacacattcctggcaggatgctccggcttccgcaggccccactaggaccagttcttctaggagcccagccggtgccctccagagttggggcctgtggctaggctgcccactccttgtgctgatggccaaattgctctggtag

SEQ ID NO: 61489 - DNA, 3466 bp, Artificial Sequence
  derived and/or modified sequence
ttcgcctgtattttgctcctgcgctggtagcttgggtttgggcacagtgccatctggggttctaaacttcctggacaaaggccagctgctgctgatgggaaactcaatcacctacagggaccaggcagccgtggaaaaccacctggagcagcgtctgcaccagccccagaagctgctggaggacctgaggaagacagacgcccagcagttccgcactgccatgaaatgcctcttagaagacaagaaggacggcttggacctgaaagacatcatcatcgacttaggagagattcgagaacgagccttgcagagccctggcgtgaaccgcagcctgtttctcatcacactggagaggtgtttccagatgctgaactccctggagtgtgtggagatcctgggcaaggtgctgagggggtcctcagggagctttctccagccagacatcacagagcggctccctcgggacctgcgcgaggatgcctttaagaacctatctgcagtgttcaaagatctctacgacaaaacctcggctcattcccagagagctctctattcctggatgactggaatactgcagacatcctccaatgccactgatgactctgcttcatgggtcagtgcggaacacttatgggttttgggcagatacatggttcacctatcgtttgaagaaattacgaaaattagtcctatagaaattgggctgtttatcagctatgacaacgccaccaagcagctggacatggtctatgacatcacacctgagctggcccaggcgtttctggagaggatcagctcctccaactttaacatgaggaatacctccaccatccacaggctggggctgctggtttgtttctacaatgacctggaattgctggatgccactgtggctcaagtcctgctttaccagatgatcaagtgcagccacctgaggggcttccaggctggcgtccagaagctcaaagcagaactcctggacattgccatggagaaccagaccctcaatgagaccctgggttctttgtcggatgcagttgtaggtttgacctacagccaactggaatccctctcccccgaggctgtgcacggagccatctccaccctcaaccaggtctcaggttgggccaagagccaggtcatcatcttgtctgccaaatacttggcccatgagaaggtgctgtctttctacaatgtcagccagatgggcgcactgctggctggggtcagcacccaggccttctgcagcatgaaacgcaaggacatctcgcaggtcctgagaagtgccgtctcccagtatgtatccgacttgtcacctgcccagcagcaaggtatcctcagcaagatggtccaagcggaagacactgccccaggcatcgtggagatacaaggggctttctttaaggaagtgtctctctttgatttaaggaggcaacctggattcaactctacagtcctgaaggataaggaacttggaaggagccaggctctgttcctgtatgagcttctgttaaagaccaccagaaggcctgaggagcttttgagtgctgggcagctggtcaaaggcgtgacctgctcacacattgatgccatgagcactgacttctttctggcccatttccaggattttcagaacaacttcgccctgctttcaccctatcaggttaattgtttggcgtggaaatactgggaagtttccagattgtctatgccacctttcctcttggctgcactcccggcccgctacctggcttctgtcccagcctcccagtgtgtgccctttctgatcagcctggggaagagctggttggactccttggttttagattcccacaaaaagacttcagtcctcaggaaagtgcagcagtgcctggacgactccattgctgatgagtacactgtggacatcatggggaacctgctgtgtcacttgccggcagccatcatcgacagggggatctcccccagggcttgggcgactgctctacacggcctcagagactgcccagacctcaaccctgagcaaaaggctgcagtgaggctcaagctcctgggacagtatggactccctcagcactggacagccgagaccacgaaggacttgggaccctttctagtacttttctcaggagatgaattaagctctatagccacaaagtttcctgagatccttctgcaagcagcttccaagatggccaggaccctgcccactaaagaattcctctgggctgtctttcagtctgttcggaacagcagtgataagatccccagctatgaccctatgcctggttgccatggagtcgtggccccctcttctgatgacatcttcaagttggccgaagccaacgcctgctgggccctggaggacctgcggtgcatggaggaagacacattcatcaggaccgtggaactgctgggagctgtccagggtttcagccggcctcagctgatgaccctgaaggagaaagcaatacaggtttgggacatgccatcttactggagagaacaccatatcgtctccctggggcgcattgctctggctcttaatgagagtgagctggagcagctggacctcagctccatagacactgtggcttccctaagctggcaaacagaatggaccccgggacaggctgaatccattttgcaagggtacctggatgattcaggatacagtatccaggacctgaagagctttcatttggtaggacttggtgcaaccctgtgtgctataaacatcactgaaatcccacttataaagatctcagaattcagggtggtagtggccagaattgggaccctgctctgcagcacacatgtcttagccgagtttaagaggaaggctgaagttgtgtttggggatcccactgagtggaccagttctgtcttgcaggagcttgggaccattgcagctggattaactaaggcagagctccggatgcttgacaaggatttgatgccatatttccagccatcagcaataaaatgccttcctgatgagatattcaaagagctgtccgcggagcagatcgcctccctgggtccggagaacgccgcggcggtgacccacgcccagcgccggcggctcagtccactgcagctgcagagcctccagcaggcgctagatggcgccaagactcactcctggcaggacgcgcccgctagcgccggtcccactagaacctcatcctcgcgttctcccgcaggagctctccagtcgtggggtctttggcttggttgtcccctgctggttctaatggccaagctcctgtggtgagtggcctgagcgcatcgtcctgtgttgccccaagcagctggccaacatgtgtagagacaggatgctccagatggtgggacacccttccctggatccagaccctcatctagggcagggaaaccctggggccttgatggtgaaaatgcaccccaaatgaaaaataattattaaaaatgatcttgcaaatta

SEQ ID NO: 61490 - DNA, 3183 bp, Artificial Sequence
  derived and/or modified sequence
atgggaaattctatcacataccgtgatcaggcagccgtggagaatcacctggaacagcggctgcaccaacctcagaagcttctggaggatctgcgaaagacagatgcccagcagttccgaactgccatgaaatgcctactggaggacaaaaaagatggcctcgacctgaaggatatcataattgatctgggtgagatacgcgagcgcgcactgcagagtccaggagtcaaccgatccctctttctcatcaccttggagcgctgcttccagatgctgaactctcttgagtgcgtcgaaattctaggcaaggtcttaaggggcagttctggttctttccttcaaccagacatcaccgaaagactccccagggacctgagagaagacgcgtttaaaaacctgtccgcagtgttcaaagatctgtacgacaagacctctgcccattcccagagagctctctatagctggatgactggaatcttgcaaacatcttctaacgcaacagatgatagcgcatcgtgggtcagtgcggagcatctgtgggtgttgggcagatacatggtccacctgtcgtttgaggaaattacaaagattagccctatagagattggtcttttcatcagctacgacaacgctacaaagcaacttgacatggtatatgacattacgccagagcttgcccaggcctttctggagagaatctcttcatccaattttaatatgcgcaatacgtcaacgatccacagacttggactgctcgtgtgtttttacaatgacctggaactgttagacgctacagtggctcaagtgttactataccagatgattaaatgctctcatttgagagggttccaggcaggcgtccagaaactgaaggcggaactcttggacatcgcaatggaaaatcagaccttgaatgagaccctggggtcactctcagatgcagtggtgggactcacctactctcagttagagtctctttcgcccgaggcggtgcacggagccattagtacattgaatcaggtctcaggttgggccaagtcccaggtcatcatactcagtgctaagtacctcgcacacgaaaaagtgttatctttctataatgtgtctcagatgggcgctctgttggctggcgtgtctactcaggctttttgctcaatgaagcggaaggacatcagtcaggtgttacgcagcgccgtttcccagtacgtgagcgacctcagcccagcgcagcaacaaggaattttatctaagatggtgcaggctgaagatacagctcccggtattgtggagatccagggcgcatttttcaaggaggtgagcctgttcgatctgcggagacagccgggatttaattccacagtgctcaaggataaggaactcggcaggagccaggcattattcctgtacgagctccttctcaaaaccactaggaggcctgaagagctcctgtcagccggacagctggtgaagggagtgacctgttctcacattgatgcaatgagcactgacttcttcttagcccacttccaggattttcaaaataatttcgctctgctgagcccataccaggtaaactgtctggcttggaagtattgggaagttagtaggttgtctatgccaccatttctgttagctgctctgcctgcaaggtacctggccagcgtcccagctagccagtgcgttcccttcctgatttctctcggaaaatcctggctcgatagtctagtgctcgacagccataagaagaccagtgtgctccgcaaagtgcagcaatgcttggatgactctatcgcggacgagtacacagtggatatcatgggcaatctgctctgccaccttcctgcagcaatcattgaccggggaataagcccgcgtgcgtgggccaccgctctccacggcctccgcgactgccccgacctgaatcccgagcaaaaagccgctgtcaggctgaagcttttggggcagtacggattgcctcagcactggaccgctgagactactaaggacctggggccttttctggtcttgttttcaggagatgaattgtccagcatcgctaccaagtttccagaaattctcctccaagcagcgtctaaaatggcccgaaccctgcctaccaaagagttcctctgggccgtattccaaagcgtgaggaactctagcgacaagatcccgagttacgaccctatgcccggttgccatggagtggttgcccctagcagcgatgatattttcaagcttgccgaagccaacgcatgttgggccctggaagatttacgatgtatggaagaggatacctttatccggacagtggaattgttaggggctgtgcagggcttctccagacctcagcttatgaccttgaaagagaaggctattcaggtctgggacatgccctcttactggcgcgagcaccacattgtctccctcggaaggatcgcactggcactgaatgaaagcgagctggagcagttggacctgtcctccattgacaccgtggcttcactgtcctggcagaccgaatggacccccggtcaggccgagagtatacttcagggatacctggatgactctggctacagcattcaagacctgaaatctttccatctggtggggctcggagcaacactttgtgccattaatattactgagatacctttaatcaagatatcagaatttagagtggtagtggccagaattggcacccttctgtgcagcactcacgttctggccgaatttaagcgcaaggccgaagttgtgtttggagatccaacagagtggacctccagcgttcttcaggagctcgggaccattgcagctggactaaccaaggcagagcttcgaatgctagacaaggacctcatgccctacttccagccttctgcgattaaatgcctaccggacgagatctttaaggagctgtctgccgagcaaatagcctctctgggaccagagaacgctgctgccgtgacacatgcccagaggaggcgcctgagccccctacagctgcagtcgctacagcaggccctcgatggtgcaaagacacactcttggcaagatgcccctgcctcagctggcccaacccgtacgagcagctcacggtctccggctggcgcactgcagtcatgggggctgtggcttggctgtccactgctggttctgatggcgaagctcctctggtag

SEQ ID NO: 61491 - DNA, 3183 bp, Artificial Sequence
  derived and/or modified sequence
atgggcaacagcatcacctacagagaccaggccgccgtggagaaccacctggagcagagactgcaccagccccagaagctgctggaggacctgagaaagaccgacgcccagcagttcagaaccgccatgaagtgcctgctggaggacaagaaggacggcctggacctgaaggacatcatcatcgacctgggcgagatcagagagagagccctgcagagccccggcgtgaacagaagcctgttcctgatcaccctggagagatgcttccagatgctgaacagcctggagtgcgtggagatcctgggcaaggtgctgagaggcagcagcggcagcttcctgcagcccgacatcaccgagagactgcccagagacctgagagaggacgccttcaagaacctgagcgccgtgttcaaggacctgtacgacaagaccagcgcccacagccagagagccctgtacagctggatgaccggcatcctgcagaccagcagcaacgccaccgacgacagcgccagctgggtgagcgccgagcacctgtgggtgctgggcagatacatggtgcacctgagcttcgaggagatcaccaagatcagccccatcgagatcggcctgttcatcagctacgacaacgccaccaagcagctggacatggtgtacgacatcacccccgagctggcccaggccttcctggagagaatcagcagcagcaacttcaacatgagaaacaccagcaccatccacagactgggcctgctggtgtgcttctacaacgacctggagctgctggacgccaccgtggcccaggtgctgctgtaccagatgatcaagtgcagccacctgagaggcttccaggccggcgtgcagaagctgaaggccgagctgctggacatcgccatggagaaccagaccctgaacgagaccctgggcagcctgagcgacgccgtggtgggcctgacctacagccagctggagagcctgagccccgaggccgtgcacggcgccatcagcaccctgaaccaggtgagcggctgggccaagagccaggtgatcatcctgagcgccaagtacctggcccacgagaaggtgctgagcttctacaacgtgagccagatgggcgccctgctggccggcgtgagcacccaggccttctgcagcatgaagagaaaggacatcagccaggtgctgagaagcgccgtgagccagtacgtgagcgacctgagccccgcccagcagcagggcatcctgagcaagatggtgcaggccgaggacaccgcccccggcatcgtggagatccagggcgccttcttcaaggaggtgagcctgttcgacctgagaagacagcccggcttcaacagcaccgtgctgaaggacaaggagctgggcagaagccaggccctgttcctgtacgagctgctgctgaagaccaccagaagacccgaggagctgctgagcgccggccagctggtgaagggcgtgacctgcagccacatcgacgccatgagcaccgacttcttcctggcccacttccaggacttccagaacaacttcgccctgctgagcccctaccaggtgaactgcctggcctggaagtactgggaggtgagcagactgagcatgccccccttcctgctggccgccctgcccgccagatacctggccagcgtgcccgccagccagtgcgtgcccttcctgatcagcctgggcaagagctggctggacagcctggtgctggacagccacaagaagaccagcgtgctgagaaaggtgcagcagtgcctggacgacagcatcgccgacgagtacaccgtggacatcatgggcaacctgctgtgccacctgcccgccgccatcatcgacagaggcatcagccccagagcctgggccaccgccctgcacggcctgagagactgccccgacctgaaccccgagcagaaggccgccgtgagactgaagctgctgggccagtacggcctgccccagcactggaccgccgagaccaccaaggacctgggccccttcctggtgctgttcagcggcgacgagctgagcagcatcgccaccaagttccccgagatcctgctgcaggccgccagcaagatggccagaaccctgcccaccaaggagttcctgtgggccgtgttccagagcgtgagaaacagcagcgacaagatccccagctacgaccccatgcccggctgccacggcgtggtggcccccagcagcgacgacatcttcaagctggccgaggccaacgcctgctgggccctggaggacctgagatgcatggaggaggacaccttcatcagaaccgtggagctgctgggcgccgtgcagggcttcagcagaccccagctgatgaccctgaaggagaaggccatccaggtgtgggacatgcccagctactggagagagcaccacatcgtgagcctgggcagaatcgccctggccctgaacgagagcgagctggagcagctggacctgagcagcatcgacaccgtggccagcctgagctggcagaccgagtggacccccggccaggccgagagcatcctgcagggctacctggacgacagcggctacagcatccaggacctgaagagcttccacctggtgggcctgggcgccaccctgtgcgccatcaacatcaccgagatccccctgatcaagatcagcgagttcagagtggtggtggccagaatcggcaccctgctgtgcagcacccacgtgctggccgagttcaagagaaaggccgaggtggtgttcggcgaccccaccgagtggaccagcagcgtgctgcaggagctgggcaccatcgccgccggcctgaccaaggccgagctgagaatgctggacaaggacctgatgccctacttccagcccagcgccatcaagtgcctgcccgacgagatcttcaaggagctgagcgccgagcagatcgccagcctgggccccgagaacgccgccgccgtgacccacgcccagagaagaagactgagccccctgcagctgcagagcctgcagcaggccctggacggcgccaagacccacagctggcaggacgcccccgccagcgccggccccaccagaaccagcagcagcagaagccccgccggcgccctgcagagctggggcctgtggctgggctgccccctgctggtgctgatggccaagctgctgtggtag

SEQ ID NO: 61492 - protein, 540 aa, Artificial Sequence
  derived and/or modified sequence
MYENECECQLLLKEMLERLNKEADEALLHNLRLQLEAQFLQDDISAAKDRHKKNLLEVQTYISILQQIIHTTPPASIVTSGMREEKLLTEREVAALRSQLEEGREVLSHLQAQRVELQAQTTTLEQAIKSAHECYDDEIQLYNEQIETLRKEIEETERVLEKSSYDCRQLAVAQQTLKNELDRYHRIIEIEGNRLTSAFIETPIPLFTQSHGVSLSTGSGGKDLTRALQDITAAKPRQKALPKNVPRRKEIITKDKTNGALEDAPLKGLEDTKLVQVVLKEESESKFESESKEVSPLTQEGAPEDVPDGGQISKGFGKLYRKVKEKVRSPKEPETPTELYTKERHVLVTGDANYVDPRFYVSSITAKGGVAVSVAEDSVLYDGQVEPSPESPKPPLENGQVGLQEKEDGQPIDQQPIDKEIEPDGAELEGPEEKREGEERDEESRRPCAMVTPGAEEPSIPEPPKPAADQDGAEVLGTRSRSLPEKGPPKALAYKTVEVVESIEKISTESIQTYEETAVIVETMIGKTKSDKKKSGEKSS

SEQ ID NO: 61493 - DNA, 1623 bp, Artificial Sequence
  derived and/or modified sequence
atgtatgagaacgaatgtgagtgtcagctgcttttgaaagagatgttagagcggttaaataaggaagctgatgaagccctgttgcataacctgagacttcaattggaagctcagtttttacaggacgacatttctgcggccaaagatcggcataagaaaaatctgctggaggttcagacttacatctcaatactacagcaaatcatccataccacaccaccagcaagcatcgtgacatcagggatgcgggaggagaagttgctaacagaacgtgaggtcgcagccctccgttcgcaactcgaggagggacgggaggtgctgtcccacctgcaggctcagcgggttgagttgcaggcacaaaccaccacactcgaacaggccattaagtctgcacatgaatgctatgatgacgagatccagctttataatgagcagatcgaaacactgcgtaaggagatagaggagacggaacgcgttctggaaaagtcttcatatgactgcagacagctggccgtggctcagcagactttaaaaaatgaactagacaggtaccacaggatcattgagatcgagggaaacagacttacttccgcctttattgagaccccaatccccctgtttacccagtctcacggcgtaagcctgtccactggatccgggggcaaagatctgacaagagcactgcaagacattacggcagcaaagcccagacagaaagcattgcccaagaacgttcctaggcgaaaagagatcatcaccaaagataaaacaaatggggcactcgaagacgctcctttgaaaggactggaagacaccaagctcgtgcaggtggtgctgaaagaggagtccgagtctaagtttgaatcggagtcaaaagaggtgagcccattgacgcaagaaggcgcccctgaagacgttccagacggggggcagatttcaaagggatttggaaagctctatagaaaggtgaaggagaaagtcagaagccctaaggagccagaaactcccactgaactatacactaaggagagacacgtgctggttacaggcgacgctaattacgtggaccccagattctatgtatctagtataacagccaaagggggggtggccgtgagtgtggccgaggattctgtgttatacgatggccaggtggagccctcgccggagtctcctaaaccccctctggaaaatggacaggtcggcctacaagagaaggaggatggacagcccatcgatcagcagcccattgataaggagatcgagccggacggagctgagctggaaggcccggaggaaaaacgcgagggcgaggagcgcgatgaggaatcacggagaccttgtgccatggtcaccccaggcgcagaggagcccagcatacctgagccacctaagccagccgctgaccaggacggggctgaggtgttgggaacccgcagccggtcattgcctgaaaaagggcctcccaaggcactggcctacaaaacagttgaagtggtggaaagtatcgagaaaatttctacggagagcatccagacgtacgaagaaactgcggtgattgtggagactatgattggtaagaccaagtctgacaagaaaaagtctggggagaaatcatcgtag

SEQ ID NO: 61494 - DNA, 1623 bp, Artificial Sequence
  derived and/or modified sequence
atgtatgaaaatgaatgtgagtgccagctgctgctgaaggagatgctggagcggctgaacaaggaggctgatgaggccctgctgcacaacctgcggctgcagctggaggcccagttcctgcaggatgacatctctgctgccaaggacagacacaagaagaacctgctggaggtgcagacctacatcagcatcctgcagcagatcatccacaccaccccaccagccagcatcgtgaccagcggcatgagggaggagaagctgctgacagagcgggaggtggccgccctgcggagccagctggaggagggccgggaggtgctgagccacctgcaggcccagagggtggagctgcaggcccagaccaccaccctggagcaggccatcaagagcgcccatgaatgttatgatgatgagatccagctgtacaatgagcagatcgagaccctgaggaaggagattgaggagacagagcgggtgctggagaagagcagctatgactgccggcagctggccgtggcccagcagaccctgaagaatgagctggaccgctaccaccgcatcatcgagattgagggcaaccggctgaccagcgccttcatcgagacccccatccccctcttcacccagagccatggagtgtccctgagcactggaagtggcggcaaggacctgacccgggccctgcaggacatcacagctgccaagccccggcagaaggccctgcccaagaatgtgcccaggaggaaggagatcatcaccaaggacaagaccaacggggccctggaggatgcccccctgaagggcctggaggacaccaagctggtgcaggtggtgctgaaggaggagagcgagagcaagtttgaaagtgagagcaaggaggtgagccccctgacccaggagggcgccccagaagatgtgcctgatggcggccagatcagcaagggctttgggaagctgtacaggaaggtgaaggagaaggtgcgcagccccaaggagcctgagacccccacagagctgtacaccaaggagagacatgtgctggtgactggagatgccaactacgtggacccccgcttctacgtgagcagcatcacagccaagggcggcgtggccgtgtctgtggccgaggacagcgtgctgtatgatggccaggtggagcccagccctgagagccccaagccacccctggagaatggccaggtgggcctgcaggagaaggaggatggccagcccatcgaccagcagcccatcgacaaggagattgaaccagatggagctgagctggagggccctgaggagaagcgggagggggaggagagagatgaggagagcagaagaccctgtgccatggtgaccccaggagctgaggagcccagcatccctgagccccccaagccagctgctgaccaggatggagctgaggtgctgggcaccaggagccgcagcctgcctgagaagggcccccccaaggccctggcctacaagacagtggaggtggtggagagcattgagaagatcagcacagagagcatccagacctatgaggagacagctgtgattgtggagaccatgattggcaagaccaagagtgacaagaagaagtctggagagaagagcagctag

SEQ ID NO: 61495 - DNA, 1623 bp, Artificial Sequence
  derived and/or modified sequence
atgtacgagaacgagtgcgagtgccagctgctgctgaaggagatgctcgaaaggctgaataaggaggccgacgaggcgctactgcataacttaaggttgcagttggaagctcagtttctccaagacgatataagcgccgcgaaagacagacacaagaagaacctgcttgaagtccagacatacatcagtatcttgcaacaaattatccacacgacccccccagcctccatagtaacatccggcatgagagaagagaagctgttaacagaacgggaggtggccgctctgaggagccagttggaggaaggcagagaagtgctgtctcatctgcaggcgcaacgcgtcgaattgcaagcccaaactactactctagaacaggctatcaagtctgcacacgagtgttacgatgacgaaattcagctttacaacgaacagattgaaacccttagaaaggagatcgaagaaacagaaagggtgctggagaaaagctcatatgactgccggcagctggctgtagcgcaacaaacactcaagaatgaattggatagatatcatcgaattattgagattgaaggcaaccgactcacttccgcattcattgagacgcctatccccttatttacacagagccatggcgtctcgctctccactggcagcggaggcaaggatcttacccgggccttgcaagacatcacagcggccaagccgagacagaaagccctcccaaaaaatgtgccgcggaggaaagaaattatcactaaagataagacaaacggtgcacttgaagacgcccccctgaagggactggaggataccaaactggtgcaggtggtgcttaaggaagagtccgagtcaaagtttgagtcagaaagcaaagaagtaagtcctttgacccaggaaggagcccccgaagacgtacccgatggaggccagatttcgaaggggttcggcaagctctaccggaaagtgaaagagaaggtcaggtcccccaaggagcccgagactcccactgagctgtacaccaaggaacgccacgttctggttacgggtgacgcgaactacgtggacccaagattttacgtatcctccatcaccgcaaagggtggagtggccgtttcagtggcagaggactccgtgctttatgacggccaagtcgaaccaagtccggagtctccaaagccccctttggagaacggtcaagtgggcctccaggagaaggaagatggccaacctatagatcagcagcccattgacaaggaaatcgagcctgatggggcggagctggaaggacccgaggagaaacgcgagggggaggagcgggacgaagagagccgcaggccatgcgccatggtgacaccaggagctgaggaaccttcgattccagagccaccaaaacctgccgccgaccaggatggcgcagaagtattaggcaccaggtctaggtccctgccagagaaggggccgccaaaggccctagcctataagactgtggaggtggtcgaatctatagaaaagatcagcactgaatccattcaaacttatgaggagaccgccgtgatcgtggagactatgatcggaaaaactaagagtgacaaaaagaagagtggggagaagtcctcttag

SEQ ID NO: 61496 - DNA, 1623 bp, Artificial Sequence
  derived and/or modified sequence
atgtatgaaaacgagtgtgaatgtcagttgttactgaaagaaatgctcgagcgccttaataaggaggccgacgaggcgctcctgcacaaccttcgacttcagttggaagcgcagttcttacaggatgacataagcgcagcaaaagatcggcacaaaaagaatctcttagaggtccaaacgtatattagcatcctccagcagattatacataccacaccccctgcatctatcgttacttccgggatgcgcgaagagaaattactaaccgaacgcgaagtggcggctctacgtagccagctggaagagggcagggaggttttatcccacctgcaagcgcagagggtggaactgcaggcgcagacaacgactctggagcaggctattaagagtgctcatgagtgttatgacgatgagattcagctctataatgagcagattgaaacgcttcgaaaggaaattgaggagacagagcgcgtcctggaaaaatcttcatacgactgccgccagttagctgtggcgcaacaaaccctgaagaacgaacttgatcgttaccacagaatcattgagatcgaggggaatcggctgacaagcgcttttatcgaaacacctattccactgtttactcaaagccacggcgtgtccttgtcaacgggctctggaggtaaggatctcacgcgcgctcttcaggacatcacggccgctaagcccaggcagaaagcactccctaaaaatgtgcccaggaggaaagagatcataaccaaagataaaaccaatggcgctctcgaggatgctcctctaaagggactagaggacaccaagttggtgcaggttgtgctgaaggaggagagtgagtccaagttcgagtcagagtccaaagaggtctcaccactcacgcaggaaggcgctcccgaggatgtgcccgatggcggtcagatcagcaagggtttcgggaagctgtatcggaaggtgaaagagaaagttcggtccccaaaggagccggaaacccctaccgaactttacaccaaagagcgccatgttttggtgacaggggatgcaaactatgtggaccctaggttctacgtttcttccattacggccaaggggggagtggctgtgagcgtggccgaagatagtgtgctctacgatgggcaggtggagcctagcccagagtccccaaaaccccctctcgagaacggccaggtgggccttcaagaaaaggaggatggccagcctattgaccagcagccaattgacaaggaaatagagccagacggtgccgaacttgagggtcccgaggaaaaacgagagggtgaggaacgagacgaagagtcccgtcgcccatgcgctatggtcacccctggcgcagaggaacccagcattccggagcctcccaaaccagccgcagaccaggacggcgcagaagtcctcggcactcgctcccggagcttgcccgagaaagggccaccgaaggcactcgcatacaaaacggttgaggtggttgagtctatagaaaaaatcagtactgagtctattcaaacatatgaagagaccgccgtgattgtcgaaacaatgattggaaagaccaaatctgacaagaagaaatccggagagaaatcatcctag

SEQ ID NO: 61497 - DNA, 1623 bp, Artificial Sequence
  derived and/or modified sequence
atgtacgagaacgagtgcgagtgccagctgctgctgaaggagatgctggagagactgaacaaggaggccgacgaggccctgctgcacaacctgagactgcagctggaggcccagttcctgcaggacgacatcagcgccgccaaggacagacacaagaagaacctgctggaggtgcagacctacatcagcatcctgcagcagatcatccacaccaccccccccgccagcatcgtgaccagcggcatgagagaggagaagctgctgaccgagagagaggtggccgccctgagaagccagctggaggagggcagagaggtgctgagccacctgcaggcccagagagtggagctgcaggcccagaccaccaccctggagcaggccatcaagagcgcccacgagtgctacgacgacgagatccagctgtacaacgagcagatcgagaccctgagaaaggagatcgaggagaccgagagagtgctggagaagagcagctacgactgcagacagctggccgtggcccagcagaccctgaagaacgagctggacagataccacagaatcatcgagatcgagggcaacagactgaccagcgccttcatcgagacccccatccccctgttcacccagagccacggcgtgagcctgagcaccggcagcggcggcaaggacctgaccagagccctgcaggacatcaccgccgccaagcccagacagaaggccctgcccaagaacgtgcccagaagaaaggagatcatcaccaaggacaagaccaacggcgccctggaggacgcccccctgaagggcctggaggacaccaagctggtgcaggtggtgctgaaggaggagagcgagagcaagttcgagagcgagagcaaggaggtgagccccctgacccaggagggcgcccccgaggacgtgcccgacggcggccagatcagcaagggcttcggcaagctgtacagaaaggtgaaggagaaggtgagaagccccaaggagcccgagacccccaccgagctgtacaccaaggagagacacgtgctggtgaccggcgacgccaactacgtggaccccagattctacgtgagcagcatcaccgccaagggcggcgtggccgtgagcgtggccgaggacagcgtgctgtacgacggccaggtggagcccagccccgagagccccaagccccccctggagaacggccaggtgggcctgcaggagaaggaggacggccagcccatcgaccagcagcccatcgacaaggagatcgagcccgacggcgccgagctggagggccccgaggagaagagagagggcgaggagagagacgaggagagcagaagaccctgcgccatggtgacccccggcgccgaggagcccagcatccccgagccccccaagcccgccgccgaccaggacggcgccgaggtgctgggcaccagaagcagaagcctgcccgagaagggcccccccaaggccctggcctacaagaccgtggaggtggtggagagcatcgagaagatcagcaccgagagcatccagacctacgaggagaccgccgtgatcgtggagaccatgatcggcaagaccaagagcgacaagaagaagagcggcgagaagagcagctag

SEQ ID NO: 61498 - protein, 171 aa, Artificial Sequence
  derived and/or modified sequence
MWTLGRRAVAGLLASPSPAQAQTLTRVPRPAELAPLCGRRGLRTDIDATCTPRRASSNQRGLNQIWNVKKQSVYLMNLRKSGTLGHPGSLDETTYERLAEETLDSLAEFFEDLADKPYTFEDYDVSFGSGVLTVKLGGDLGTYVINKQTPNKQIWLSSPSRLTWLLWLFHP

SEQ ID NO: 61499 - DNA, 980 bp, Artificial Sequence
  derived and/or modified sequence
agtctcccttgggtcaggggtcctggttgcactccgtgctttgcacaaagcaggctctccatttttgttaaatgcacgaatagtgctaagctgggaagttcttcctgaggtctaacctctagctgctcccccacagaagagtgcctgcggccagtggccaccaggggtcgccgcagcacccagcgctggagggcggagcgggcggcagacccggagcagcatgtggactctcgggcgccgcgcagtagccggcctcctggcgtcacccagcccagcccaggcccagaccctcacccgggtcccgcggccggcagagttggccccactctgcggccgccgtggcctgcgcaccgacatcgatgcgacctgcacgccccgccgcgcaagttcgaaccaacgtggcctcaaccagatttggaatgtcaaaaagcagagtgtctatttgatgaatttgaggaaatctggaactttgggccacccaggctctctagatgagaccacctatgaaagactagcagaggaaacgctggactctttagcagagttttttgaagaccttgcagacaagccatacacgtttgaggactatgatgtctcctttgggagtggtgtcttaactgtcaaactgggtggagatctaggaacctatgtgatcaacaagcagacgccaaacaagcaaatctggctatcttctccatccaggttaacgtggctcctgtggctgttccatccctgaggaaaagtgaggaccatgctctccaaacaggccatgtgctggactacctctgtttctgtctcctgggattccaatcagcaagtgagcaacgaagcaacccagacagtgtggttcataggatggctgggtaagtggctgtttgttttttccttactgtggatatgtatcagtgaaggaatctgtagaacattcttgatgggaacatttagtcatatcaagtcaataaattaatgtttaggctggg

SEQ ID NO: 61500 - DNA, 516 bp, Artificial Sequence
  derived and/or modified sequence
atgtggacactgggtagacgggctgtggcaggactgctggccagtcctagccccgcgcaggcccagacactcacacgcgtgccgagacctgcagaactcgcccctctgtgtggaagacggggtctgaggactgacatcgacgcgacctgtactccaaggagagcttccagcaatcagaggggtctcaatcagatctggaacgtgaagaagcagtccgtgtacttgatgaatctgaggaagagtggcacactgggacatcctggatctcttgacgagacaacctacgagcgacttgccgaggagacattagactcgcttgccgaatttttcgaggacctggcagataaaccctatacctttgaagactatgatgtctccttcgggagcggtgttctaacagttaagctcggcggtgatctcggaacatatgtgatcaataaacagacccctaacaagcaaatctggctttcttccccctctcgcctgacatggcttttgtggctgttccacccctag

SEQ ID NO: 61501 - DNA, 516 bp, Artificial Sequence
  derived and/or modified sequence
atgtggaccctgggccggcgggctgtggccggcctgctggccagccccagccctgcccaggcccagaccctgaccagggtgcccaggcctgctgagctggcccccctgtgtggcagaagaggcctgaggacagacattgatgccacctgcaccccaagaagagccagcagcaaccagaggggcctgaaccagatctggaatgtgaagaagcagagcgtgtacctgatgaacctgaggaagagcggcaccctgggccaccctggcagcctggatgagaccacctatgagcggctggccgaggagaccctggacagcctggccgagttctttgaggacctggccgacaagccctacacctttgaagattatgatgtgtcctttggaagtggagtgctgactgtgaagctgggcggggacctgggcacctacgtgatcaacaagcagacccccaacaagcagatctggctgagcagccccagccggctgacctggctgctgtggctgttccacccctag

SEQ ID NO: 61502 - DNA, 516 bp, Artificial Sequence
  derived and/or modified sequence
atgtggaccctgggccggcgggccgtggccggcctgctggccagcccttctcccgcccaagcccagaccctcacccgagtgcctcgccctgcggagcttgcacccctctgtggcaggcggggactgagaacagacatagacgccacatgtaccccgagaagagccagctccaatcagcgggggcttaaccagatttggaatgtgaagaagcagtccgtctatctgatgaatctgaggaaatccgggacactgggacatccaggctctttagatgaaactacatatgaacgactggctgaggagacactggatagcctggccgagttttttgaggacctggctgacaagccatacacctttgaggactatgacgtttcctttggttccggagtgcttacagtgaaactgggcggcgaccttggaacttatgtaataaacaagcagacgcccaacaagcagatctggctgagttctccatccagactcacctggttactctggctctttcacccatag

SEQ ID NO: 61503 - DNA, 516 bp, Artificial Sequence
  derived and/or modified sequence
atgtggacgttgggcagaagggcggtagccggtctattagcgagtccaagcccggctcaagcacagaccctgacccgggtccctaggcccgcagagctcgctcctctctgcggaaggcgcggactgagaacagacatagatgccacatgtactccaaggagagcatcctcgaatcagcggggtctgaatcaaatttggaatgtgaagaagcagtccgtgtacctcatgaacctcagaaagtctggcacgctcggccatcctgggagcctggatgaaacaacgtatgagcgcctggccgaggaaactttggacagtttagccgagtttttcgaagacctggccgacaagccatacaccttcgaggactacgatgtctctttcggcagcggggtcctcactgtcaaacttgggggagaccttggtacctacgtgattaacaaacagaccccaaacaaacagatctggctcagtagcccttctcggctgacctggctcctgtggctatttcatccctag

SEQ ID NO: 61504 - DNA, 516 bp, Artificial Sequence
  derived and/or modified sequence
atgtggaccctgggcagaagagccgtggccggcctgctggccagccccagccccgcccaggcccagaccctgaccagagtgcccagacccgccgagctggcccccctgtgcggcagaagaggcctgagaaccgacatcgacgccacctgcacccccagaagagccagcagcaaccagagaggcctgaaccagatctggaacgtgaagaagcagagcgtgtacctgatgaacctgagaaagagcggcaccctgggccaccccggcagcctggacgagaccacctacgagagactggccgaggagaccctggacagcctggccgagttcttcgaggacctggccgacaagccctacaccttcgaggactacgacgtgagcttcggcagcggcgtgctgaccgtgaagctgggcggcgacctgggcacctacgtgatcaacaagcagacccccaacaagcagatctggctgagcagccccagcagactgacctggctgctgtggctgttccacccctag

SEQ ID NO: 61505 - protein, 600 aa, Artificial Sequence
  derived and/or modified sequence
MKPFQLDLLFVCFFLFSQELGLQKRGCCLVLGYMAKDKFRRMNEGQVYSFSQQPQDQVVVSGQPVTLLCAIPEYDGFVLWIKDGLALGVGRDLSSYPQYLVVGNHLSGEHHLKILRAELQDDAVYECQAIQAAIRSRPARLTVLVPPDDPVILGGPVISLRAGDPLNLTCHADNAKPAASIIWLRKGEVINGATYSKTLLRDGKRESIVSTLFISPGDVENGQSIVCRATNKAIPGGKETSVTIDIQHPPLVNLSVEPQPVLEDNVVTFHCSAKANPAVTQYRWAKRGQIIKEASGEVYRTTVDYTYFSEPVSCEVTNALGSTNLSRTVDVYFGPRMTTEPQSLLVDLGSDAIFSCAWTGNPSLTIVWMKRGSGVVLSNEKTLTLKSVRQEDAGKYVCRAVVPRVGAGEREVTLTVNGPPIISSTQTQHALHGEKGQIKCFIRSTPPPDRIAWSWKENVLESGTSGRYTVETISTEEGVISTLTISNIVRADFQTIYNCTAWNSFGSDTEIIRLKEQGSEMKSGAGLEAESVPMAVIIGVAVGAGVAFLVLMATIVAFCCARSQRSTGGRSGISGRGTEKKARLRLPRRASKQECNEQGS

SEQ ID NO: 61506 - DNA, 1803 bp, Artificial Sequence
  derived and/or modified sequence
atgaaacccttccagttagacctcttatttgtttgcttttttctgttttcacaggaactggggttgcaaaagcgcggctgctgtctcgtactggggtatatggctaaagataaatttagacggatgaacgaagggcaggtgtacagcttctcacagcagccacaggaccaggtggtcgttagcgggcagccagtgacactgctgtgcgcaatccccgagtacgatgggttcgtgctgtggattaaggatggcttagccctcggagtcggacgagacctgagctcttacccgcagtacctcgtagtgggaaatcacctgtcaggagagcaccacctgaaaatcctgagggccgaactgcaggacgacgctgtctacgagtgccaggccatccaggcagccatccgcagcaggccagccagactgactgtcttggtgcctcccgatgaccccgtgattctgggtggtcccgtgattagcttgagggccggggaccctctaaatctgacttgccacgccgataatgccaagcccgcagcaagtatcatatggttaaggaaaggcgaagtgatcaacggggcaacgtattccaaaaccctgttaagagacggtaagcgagaatctatagtgagtacactgtttatttcccctggcgacgtcgaaaacggacagagcattgtctgtcgggctactaacaaggccatcccaggcggcaaggagacgagcgtaactatcgatatccagcaccctcctttggtgaatctgagcgtggaaccccagcccgtgctggaagacaatgtggttactttccattgcagtgccaaagcgaatcccgctgtcacccagtacaggtgggccaagcgcggtcagatcatcaaagaggccagcggcgaggtgtataggactacagttgattatacttatttcagcgagccagtgtcgtgtgaggtgaccaatgccctcggctcaacgaatctgtcacgaacggtagatgtgtatttcggaccccgcatgacaacagagcctcagtcactgctcgtagatcttggtagtgacgccattttttcttgtgcttggaccggaaacccttcacttaccattgtgtggatgaagcgaggctcaggggtggtgttatctaacgaaaagacccttacactgaaatcagtcaggcaggaagatgccggcaagtatgtatgtagagctgtggtgccccgagtcggtgcgggtgagcgagaagttactctgactgtaaatggaccgcctattatcagttcaacccaaacacagcatgcactccatggagaaaaaggccagattaagtgtttcatacgcagtacacccccaccagaccgcattgcctggagctggaaggagaacgtgctggaatccggaacttcaggacgatacaccgtggaaactatctccaccgaagaaggagtgatatccacactgacgatttctaatatcgttagagctgattttcagaccatctataactgcaccgcctggaattctttcggatcggatacagagatcattagactgaaggaacagggaagcgagatgaaatcaggcgccggccttgaggccgagtccgtacccatggccgtcattataggggtagctgtaggtgctggtgtggcattcctcgtgttaatggccacaatagtagccttttgctgtgcacgctcgcagcgtagcacaggggggcgatcaggcataagtggccgcggcaccgagaagaaggctcgactccgcctgccaagacgggcctcgaagcaggaatgcaatgaacagggctcctag

SEQ ID NO: 61507 - DNA, 2474 bp, Artificial Sequence
  derived and/or modified sequence
gcccgcctgaggaagccgtgtgcctgggatgccaagagccagagaatggatcttctccgagtggggacattgctgacaatcccggcttcccgaggcggctaagaacaggcagtttgtgtcggctggctgcagatacccagaggcacaaagagaccgaagccacccggagggacccacggacggacagatggtaggcgcgaacccgagaggaccggcggaggctgagcaccgagagccgccaaggaagagaaactaaccacagccaagttaccccgccggctttccttcgctgcgctaaggaatgaaacccttccagctcgatctgctcttcgtctgcttcttcctcttcagtcaagagctgggcctccagaagagaggatgctgtctggtgctgggctacatggccaaggacaagtttcggagaatgaatgaaggccaagtctattccttcagccagcagccccaggaccaggtggtggtgtcgggacagccagtgacgctactttgcgccatccccgaatacgatggcttcgttctgtggatcaaggacggcttggctctgggtgtgggcagggacctctcaagttacccacagtacctggtggtagggaaccacctgtcaggggagcaccacctgaagatcctgagggcagagctgcaagacgatgcggtgtacgagtgccaggccatccaggccgccatccgctcccgccccgcacgcctcacagtcctggtgccgcctgatgaccccgtcatcctggggggccctgtgatcagcctgcgtgcgggggaccctctcaacctcacctgccacgcagacaatgccaagcctgcagcctccatcatctggttgcgaaagggagaggtcatcaatggggccacctactccaagaccctgcttcgggacggcaagcgggagagcatcgtcagcaccctcttcatctcccctggtgacgtggagaatggccagagcatcgtgtgtcgtgccaccaacaaagccatccccggaggaaaggagacgtcggtcaccattgacatccagcaccctccactggtcaacctctcggtggagccacagccagtgctggaggacaacgtcgtcactttccactgctctgcaaaggccaacccagctgtcacccagtacaggtgggccaagcggggccagatcatcaaggaggcatctggagaggtgtacaggaccacagtggactacacgtacttctcagagcccgtctcctgtgaggtgaccaacgccctgggcagcaccaacctcagccgcacggttgacgtctactttgggccccggatgaccacagaaccccaatccttgctcgtggatctgggctctgatgccatcttcagctgcgcctggaccggcaacccatccctgaccatcgtctggatgaagcggggctccggagtggtcctgagcaatgagaagaccctgaccctcaaatccgtgcgccaggaggacgcgggcaagtacgtgtgccgggctgtggtgccccgtgtgggagccggggagagagaggtgaccctgaccgtcaatggaccccccatcatctccagcacccagacccagcacgccctccacggcgagaagggccagatcaagtgcttcatccggagcacgccgccgccggaccgcatcgcctggtcctggaaggagaacgttctggagtcgggcacatcggggcgctatacggtggagaccatcagcaccgaggagggcgtcatctccaccctgaccatcagcaacatcgtgcgggccgacttccagaccatctacaactgcacggcctggaacagcttcggctccgacactgagatcatccggctcaaggagcaaggttcggaaatgaagtcgggagccgggctggaagcagagtctgtgccgatggccgtcatcattggggtggccgtaggagctggtgtggccttcctcgtccttatggcaaccatcgtggcgttctgctgtgcccgttcccagagaagtacgggagggagatccgggatctcagggagggggacagagaaaaaggccaggcttaggctgccccggagagcaagtaagcaggagtgcaatgaacaggggtcctaacagtgctgtgagctcctggggcagggagtgggtctgatgcatcggtgtatgtgagcctgggcaacatggcgcctggcagagtgggcgctaggctgaggttgacctggactagactgaacttcatctgcagggcagccagcattttggattgaacacatagctctttcagtcaggaactgtacagaaagatagggggaaaagcggtttgtggtttgatccttgctctacaagagctgttagtctagagagaccccatctctacaacaaaataaaaataaagagctgctagtctcaccagaaaagcaggtcactcacacagctgtgggggagtgggtggggaagcaataaaggaattgctttgagaaaactt

SEQ ID NO: 61508 - DNA, 1803 bp, Artificial Sequence
  derived and/or modified sequence
atgaagcccttccagctggacctgctgtttgtgtgcttcttcctgttcagccaggagctgggcctgcagaagaggggctgctgcctggtgctgggctacatggccaaggacaagttccggaggatgaatgaaggccaggtgtacagcttcagccagcagccccaggaccaggtggtggtgtctggccagcctgtgaccctgctgtgtgccatcccagaatatgatggctttgtgctgtggatcaaggatggcctggccctgggcgtgggccgggacctgagcagctacccccagtacctggtggtgggcaaccacctgtctggagagcaccacctgaagatcctgcgggcagagctgcaggatgatgctgtgtatgagtgccaggccatccaggccgccatccgcagcaggcctgcccggctgactgtgctggtgcccccagatgaccccgtcatcctgggcggccctgtgatcagcctgcgggccggggaccccctgaacctgacctgccacgccgacaatgccaagccagctgccagcatcatctggctgaggaagggggaggtgatcaatggagccacctacagcaagaccctgctgagagatggcaagcgggagagcatcgtgtccaccctcttcatcagccctggagatgtggagaatggccagagcatcgtgtgccgggccaccaacaaggccatccctgggggcaaggagacctctgtgaccatcgacatccagcacccccccctggtgaacctgtctgtggagccccagcctgtgctggaggacaacgtggtgaccttccactgcagcgccaaggccaacccagctgtgacccagtaccgctgggccaagaggggccagatcatcaaggaggccagcggggaggtgtaccgcaccaccgtggactacacctacttcagcgagcctgtgtcctgtgaggtgaccaatgccctgggcagcaccaacctgagcaggacagtggatgtgtacttcggccccaggatgaccacagagccccagagcctgctggtggacctgggcagtgatgccatcttcagctgtgcctggacaggcaaccccagcctgaccatcgtgtggatgaagaggggcagcggcgtggtgctgagcaatgagaagaccctgaccctgaagtctgtgcggcaggaggatgctgggaagtatgtgtgcagagctgtggtgccccgggtgggcgctggggagcgggaggtgaccctgactgtgaatggaccacccatcatcagcagcacccagacccagcacgccctgcacggggagaagggccagatcaagtgcttcatccgcagcaccccacctccagacagaattgcctggagctggaaggaaaatgtgctggagagcggcaccagcggccgctacacagtggagaccatcagcacagaggagggcgtcatcagcaccctgaccatcagcaacatcgtgcgggctgacttccagaccatctacaactgcacagcctggaacagctttggaagtgacacagagatcatccggctgaaggagcagggcagcgagatgaagtctggagctggcctggaggccgagagcgtgcccatggctgtgatcatcggcgtggccgtgggcgctggggtggccttcctggtgctgatggccaccatcgtggccttctgctgtgcccggagccagaggagcactggaggccgcagcggcatcagcggccggggcacagagaagaaggcccggctgcggctgccccggcgggccagcaagcaggagtgcaatgagcagggcagctag

SEQ ID NO: 61509 - DNA, 1803 bp, Artificial Sequence
  derived and/or modified sequence
atgaagcccttccagctggacctgctgttcgtgtgcttcttcctgttcagccaagaactcgggctacaaaaacgcggatgttgtttggtcctggggtacatggctaaagacaaatttcggaggatgaacgagggtcaggtgtatagcttttcccaacaacctcaggaccaggtggtggtcagtgggcagcctgtgaccctcctctgcgccatcccggaatatgacgggttcgtcctttggatcaaagacggcctggcgttgggcgtagggcgagatttatctagttaccctcagtacttggtggttgggaatcatctgtccggcgagcatcatttaaagatactgcgcgccgagctccaggacgatgcagtctacgaatgtcaggcgatccaagcagcaattaggagcagacctgcccgactgacagtcctggtaccaccagatgacccagtgattctagggggacctgtcatttccctgcgggcaggggatcctctcaatctcacgtgccatgctgataacgcaaagccagcagctagcattatttggctccgtaaaggggaggtcatcaatggagcgacctacagtaagacccttctccgagacggtaagcgggaaagtattgtctctactctgttcatcagccctggagatgtggaaaacgggcagagtatcgtatgcagggctactaacaaggccattcccggggggaaagaaaccagtgtcaccatcgacattcaacacccccctcttgttaacctctccgtggaaccacagcctgtgctcgaagacaatgtggtgactttccattgctcagccaaagcaaatcctgcagtgacccagtatcgttgggcaaaaagagggcagatcatcaaagaggctagcggggaggtgtacagaacgactgtggattatacatacttttcagagcccgtttcatgtgaagtaacaaatgctctgggatcaacaaacctgagtagaactgtcgacgtatactttgggcctcgaatgactactgagcctcagtccctccttgttgacctgggaagcgacgctatcttctcctgtgcttggacgggcaatccttctctgacgatagtgtggatgaagaggggaagcggtgtcgtcttgagcaacgagaagaccctgaccctcaaatctgtacggcaggaggacgccggcaagtatgtgtgccgagcggtagtaccgagagtgggagctggcgagcgagaggtgaccttaacggtcaacggcccacctattataagctcgacccagacgcagcacgccctgcacggtgagaaaggtcagattaaatgcttcattcgttccacacccccgcctgacaggatcgcctggagttggaaggaaaacgttctggaatcaggaacctctggacggtacacagtggagaccataagcacagaggagggcgtgatcagcaccttaaccattagtaacatagtgagagccgattttcagaccatctacaattgcaccgcatggaattcatttggctctgacacagaaatcataaggttgaaagaacaagggtccgagatgaaaagtggtgctggcctggaagctgaaagcgtccctatggctgtgattattggcgttgccgtgggggccggcgtggccttcctcgttctcatggctaccatcgtcgctttttgctgcgctcgcagtcagagatcaacaggaggaagatccggcatcagcggaagagggacagagaaaaaggctagactgagactcccacgtagggcatcgaagcaggaatgcaatgagcagggctcttag

SEQ ID NO: 61510 - DNA, 1803 bp, Artificial Sequence
  derived and/or modified sequence
atgaagccctttcagctcgatctcttgtttgtgtgtttctttctcttcagccaagaactggggttgcagaaaaggggctgttgcttagtgctggggtatatggctaaagacaaatttcgacgaatgaatgagggacaagtctactctttctcgcaacagccgcaggaccaggtggtcgtgtcaggccagccagtcaccctgctatgcgcaatacctgagtatgacggatttgtgttatggatcaaggacggactcgccctaggtgtgggacgcgatctcagcagttacccacagtatttggtggtcggcaaccatctttccggtgagcatcacctgaagatattacgcgcagaactgcaggatgacgctgtatacgagtgccaggcaattcaggctgccattaggagcagacccgctcggctcaccgttctggtgccccctgacgatccggtgatcctcggcggacccgtcatttctttacgagcgggagatcccttgaacttaacatgtcacgccgataatgcgaagcccgctgctagcataatttggctgcggaaaggagaggtgataaatggcgcaacctattcaaagactctgctgagggatggcaaacgggaaagcattgtgtcgaccctcttcatcagccccggagacgtcgaaaatggccaatctatcgtatgtcgggcaaccaataaggcgatcccaggcggtaaggagacaagcgtgaccattgacatccagcaccccccactggtcaacctgagcgtcgaaccccagcctgtgctggaggataatgttgtgacattccactgttcggccaaagcaaacccagccgtaactcagtatcgctgggctaaaagaggtcaaattatcaaagaagcatccggggaggtgtatagaacaactgtggattacacttatttcagtgaaccagtgagctgcgaggtgaccaacgccctgggcagcacaaacctgagtcggactgtcgacgtttattttggcccaagaatgactacggagccacagagcctcctcgtggatttaggaagtgatgccattttttcctgcgcctggaccggcaatccttctctgactatcgtgtggatgaagcgcggtagtggcgtcgtgctgtcaaacgagaaaacacttacactcaagagcgtcaggcaggaggatgcaggcaaatatgtctgccgggctgttgtgccacgggtcggagccggtgagcgggaggtcactctgactgtcaatggtccccctatcatctccagtacacagactcagcacgctctccacggtgagaaaggacagataaaatgcttcatacgttctaccccccctcccgataggatcgcctggagctggaaagaaaatgtactcgaaagtggaacctcggggaggtacacagtggaaacgatttctactgaagagggggtgatctcaaccttgactatctcgaatattgtgagagccgacttccaaacgatctacaactgcaccgcctggaattcgtttggaagcgatactgagattatcagattaaaagagcaagggtcagagatgaaatccggagctggtctcgaggctgagagcgtgcccatggccgttataattggtgtggcggttggggcaggggtcgctttcctcgtgctaatggccactatcgttgcattttgttgtgctcgctcccagagaagcactggcggtaggagcgggatcagcggcagaggtaccgaaaaaaaagctcgtctgcgcctcccgaggagagcctcgaagcaggagtgtaatgaacaaggatcctag

SEQ ID NO: 61511 - DNA, 1803 bp, Artificial Sequence
  derived and/or modified sequence
atgaagccttttcagctggacctgctctttgtgtgtttctttctgtttagtcaggagctgggtctgcagaaacgcggatgctgcttagtgctcggctacatggccaaggataagttcagacgcatgaatgaaggacaggtctactcctttagtcaacaaccacaggaccaggtcgtcgtcagcggtcagcccgtcaccctgctgtgcgccatcccagagtacgatgggtttgtcctgtggattaaggatggcctcgccctgggtgtgggtagagacctttcaagctaccctcagtaccttgtggtcggaaatcacctgtctggagaacatcacctaaagattctgcgggctgaactccaggacgacgcagtctatgagtgtcaagccatccaggccgctattcgtagccgaccagcacgcttaactgtgttagtgccccctgatgaccccgtaattctgggaggaccggtcatttccttacgtgctggggaccctttgaatctcacatgtcatgctgataacgcaaaacctgccgcttccattatctggctgaggaagggagaagttatcaatggagcaacatatagcaagacgctcctgagggatggaaagagggaaagcattgtatcaacactgttcatttcccctggcgatgtagaaaacggccagtctatcgtctgcagggctacaaacaaagcaatcccaggtggaaaagagacatccgtcaccatcgacattcaacaccctccacttgtgaatctgagcgtcgagccccaacccgtgctggaggacaacgtcgtgacattccattgtagcgcaaaggctaatcccgcagttacccagtaccgatgggccaagaggggccagatcatcaaggaagcctccggagaggtgtaccgtactacggtcgattatacatatttctccgagcctgtctcatgtgaagtcactaacgctcttggatcaaccaatctatccagaacagtggacgtgtattttgggcctcgcatgactactgagcctcagagtttgctggttgacctcggaagcgatgctatcttctcctgtgcatggacaggtaatccatcccttaccatcgtgtggatgaagcgaggaagcggggtcgtcctgtctaacgaaaaaacactcacactgaaaagtgttcgacaggaggacgcaggcaagtatgtgtgtcgggctgtggtaccacgtgtgggggcaggggagagagaagtaactttaacagtcaatggccctccaattattagcagtacacagactcagcatgccttacacggcgaaaaagggcaaatcaaatgtttcattagaagtactcccccccctgaccgtattgcctggagttggaaagaaaatgttctcgagtctggtaccagcggacgatatactgttgagactataagtactgaagaaggagtgatcagtacgctgactattagtaacatcgtgagagcggacttccaaaccatttacaactgtacagcatggaacagcttcggaagcgatactgaaatcatcagactcaaggaacagggcagcgaaatgaagagcggggctggtctggaggccgaaagcgttcccatggcggttatcattggggttgctgttggcgctggggtcgcctttttggtactgatggccactatcgttgccttctgctgcgcgcgaagccagcgcagtacaggcggtcgctcgggtatcagcgggcgtggaaccgaaaagaaagctagacttaggcttccccggcgcgcaagcaaacaggagtgtaacgagcagggaagttag

SEQ ID NO: 61512 - DNA, 1803 bp, Artificial Sequence
  derived and/or modified sequence
atgaagccctttcaactggatcttttgttcgtctgcttctttctgttcagccaagagctgggtttgcaaaagcggggctgttgtctggtgctgggatatatggccaaggataaatttcgaagaatgaatgaaggacaagtctactccttctcccaacagccccaggatcaagtggtggtatccggccagcccgtaacgctattatgtgcaattcctgagtacgatggatttgtcctctggatcaaggatggtctcgctttgggtgtgggtagagacctgagtagttatccccaatacttggtggtcggaaatcacctgtctggagaacatcacctaaagattctgcgggctgaactccaggacgacgcagtctatgagtgtcaagccatccaggccgctattcgtagccgaccagcacgcttaactgtgttagtgccccctgatgaccccgtaattctgggaggaccggtcatttccttacgtgctggggaccctttgaatctcacatgtcatgctgataacgcaaaacctgccgcttccattatctggctgaggaagggagaagttatcaatggagcaacatatagcaagacgctcctgagagatggtaaaagggagagcatcgtaagtacattgtttatctctccaggggacgtggaaaatggccaaagcatcgtatgtcgtgccactaataaagcaatacccggcggtaaagagacatcagtaacaatcgatatccagcacccacctctcgtcaacctctcagtggaacctcagcctgtcctggaggataacgttgtgacatttcactgttcagcaaaggccaatcctgccgtgactcaatacagatgggcgaagagggggcaaattattaaagaggcgtctggggaggtgtatagaacaactgtcgactacacttatttctctgagcctgtgtcatgtgaagtgaccaacgccctcggaagtacaaatctttccaggactgtcgatgtatactttggacctaggatgaccactgaaccacagtcgctgctggtcgacttgggaagcgatgctatcttttcatgtgcctggaccggaaatcctagcctgaccattgtttggatgaaaaggggtagcggagtcgtgttgagtaacgagaaaactctgacactgaaatctgtaagacaggaagacgccggaaagtatgtgtgccgggctgttgttccccgcgttggagcaggtgagcgcgaggttaccctcacagtgaacggaccgcctatcatctcctctactcagacacagcatgcacttcatggtgagaaagggcaaataaagtgcttcattcggtcaacacccccacccgaccgtatcgcttggagctggaaggagaatgtgctcgagagtgggacttcagggaggtacacagtggagaccatttctaccgaagagggagttataagcacactgacaatttctaacatagtaagggcagattttcaaactatctacaattgtacagcatggaattcatttggctctgataccgagatcatcagactgaaagagcagggatcagaaatgaaaagcggcgcaggccttgaggcagagtccgtgcccatggcggtgatcattggggtggccgtaggagctggggttgcctttctcgttctgatggcgacaatagtagctttttgttgtgctcgatctcaacgaagcacaggtggcagaagcgggattagtggacgaggaacagagaaaaaagcccgcctgcgattgcctcgaagggcatctaaacaggagtgcaacgagcaggggagttag

SEQ ID NO: 61513 - DNA, 1803 bp, Artificial Sequence
  derived and/or modified sequence
atgaagcccttccagctggacctgctgttcgtgtgcttcttcctgttcagccaggagctgggcctgcagaagagaggctgctgcctggtgctgggctacatggccaaggacaagttcagaagaatgaacgagggccaggtgtacagcttcagccagcagccccaggaccaggtggtggtgagcggccagcccgtgaccctgctgtgcgccatccccgagtacgacggcttcgtgctgtggatcaaggacggcctggccctgggcgtgggcagagacctgagcagctacccccagtacctggtggtgggcaaccacctgagcggcgagcaccacctgaagatcctgagagccgagctgcaggacgacgccgtgtacgagtgccaggccatccaggccgccatcagaagcagacccgccagactgaccgtgctggtgccccccgacgaccccgtgatcctgggcggccccgtgatcagcctgagagccggcgaccccctgaacctgacctgccacgccgacaacgccaagcccgccgccagcatcatctggctgagaaagggcgaggtgatcaacggcgccacctacagcaagaccctgctgagagacggcaagagagagagcatcgtgagcaccctgttcatcagccccggcgacgtggagaacggccagagcatcgtgtgcagagccaccaacaaggccatccccggcggcaaggagaccagcgtgaccatcgacatccagcacccccccctggtgaacctgagcgtggagccccagcccgtgctggaggacaacgtggtgaccttccactgcagcgccaaggccaaccccgccgtgacccagtacagatgggccaagagaggccagatcatcaaggaggccagcggcgaggtgtacagaaccaccgtggactacacctacttcagcgagcccgtgagctgcgaggtgaccaacgccctgggcagcaccaacctgagcagaaccgtggacgtgtacttcggccccagaatgaccaccgagccccagagcctgctggtggacctgggcagcgacgccatcttcagctgcgcctggaccggcaaccccagcctgaccatcgtgtggatgaagagaggcagcggcgtggtgctgagcaacgagaagaccctgaccctgaagagcgtgagacaggaggacgccggcaagtacgtgtgcagagccgtggtgcccagagtgggcgccggcgagagagaggtgaccctgaccgtgaacggcccccccatcatcagcagcacccagacccagcacgccctgcacggcgagaagggccagatcaagtgcttcatcagaagcacccccccccccgacagaatcgcctggagctggaaggagaacgtgctggagagcggcaccagcggcagatacaccgtggagaccatcagcaccgaggagggcgtgatcagcaccctgaccatcagcaacatcgtgagagccgacttccagaccatctacaactgcaccgcctggaacagcttcggcagcgacaccgagatcatcagactgaaggagcagggcagcgagatgaagagcggcgccggcctggaggccgagagcgtgcccatggccgtgatcatcggcgtggccgtgggcgccggcgtggccttcctggtgctgatggccaccatcgtggccttctgctgcgccagaagccagagaagcaccggcggcagaagcggcatcagcggcagaggcaccgagaagaaggccagactgagactgcccagaagagccagcaagcaggagtgcaacgagcagggcagctag

SEQ ID NO: 61514 - protein, 555 aa, Artificial Sequence
  derived and/or modified sequence
MPNKNKKEKESPKAGKSGKSSKEGQDTVESEGTSPEEPSSPKVPPPLLPELLVLIFGGLQGRDVPPADQEKLFIQKLRQCCVLFDFVSDPLSDLKWKEVKRAALSEMVEYITHNRNVITEPIYPEVVHMFAVNMFRTLPPSSNPTGAEFDPEEDEPTLEAAWPHLQLVYEFFLRFLESPDFQPNIAKKYIDQKFVLQLLELFDSEDPRERDFLKTTLHRIYGKFLGLRAYIRKQINNIFYRFIYETEHHNGIAELLEILGSIINGFALPLKEEHKIFLLKVLLPLHKVKSLSVYHPQLAYCVVQFLEKDSTLTEPVVMALLKYWPKTHSPKEVMFLNELEEILDVIEPSEFVKIMEPLFRQLAKCVSSPHFQVAERALYYWNNEYIMSLISDNAAKILPIMFPSLYRNSKTHWNKTIHGLIYNALKLFMEMNQKLFDDCTQQFKAEKLKEKLKMKEREEAWVKIENLAKANPQYTVYSQASTMSIPVAMETDGPLFEDVQMLRKTVKDEAHQAQKDPKKDRPLARRKSELPQDPHTKKALEAHCRADELASQDGR

SEQ ID NO: 61515 - protein, 553 aa, Artificial Sequence
  derived and/or modified sequence
NKNKKEKESPKAGKSGKSSKEGQDTVESEGTSPEEPSSPKVPPPLLPELLVLIFGGLQGRDVPPADQEKLFIQKLRQCCVLFDFVSDPLSDLKWKEVKRAALSEMVEYITHNRNVITEPIYPEVVHMFAVNMFRTLPPSSNPTGAEFDPEEDEPTLEAAWPHLQLVYEFFLRFLESPDFQPNIAKKYIDQKFVLQLLELFDSEDPRERDFLKTTLHRIYGKFLGLRAYIRKQINNIFYRFIYETEHHNGIAELLEILGSIINGFALPLKEEHKIFLLKVLLPLHKVKSLSVYHPQLAYCVVQFLEKDSTLTEPVVMALLKYWPKTHSPKEVMFLNELEEILDVIEPSEFVKIMEPLFRQLAKCVSSPHFQVAERALYYWNNEYIMSLISDNAAKILPIMFPSLYRNSKTHWNKTIHGLIYNALKLFMEMNQKLFDDCTQQFKAEKLKEKLKMKEREEAWVKIENLAKANPQYTVYSQASTMSIPVAMETDGPLFEDVQMLRKTVKDEAHQAQKDPKKDRPLARRKSELPQDPHTKKALEAHCRADELASQDGR

SEQ ID NO: 61516 - DNA, 1668 bp, Artificial Sequence
  derived and/or modified sequence
atgcctaataagaacaagaaggaaaaagaatcacccaaggctggcaagtccggaaaatcctccaaggagggacaggatacggtggagagcgaggggacctcgccagaggaacccagcagcccaaaagtgccaccgcctctgctgcctgagctgttagtgttgattttcgggggtctgcagggccgtgatgtgcccccagccgaccaggaaaaactgttcatccagaagctgcgccaatgctgcgtgctgtttgacttcgtttcagacccgctgagtgatctgaagtggaaagaggttaaaagagcagctctctccgaaatggtggagtatatcacccacaatagaaacgtcatcactgagcccatttacccagaggtggtgcacatgtttgccgttaacatgtttcggactcttcctcctagcagcaaccccacaggcgctgagttcgaccccgaagaggatgaaccaaccttggaggccgcctggcctcacctgcagcttgtgtacgagttttttctgcgcttcctcgaatcacctgatttccagcctaacattgctaagaagtacatcgaccagaagttcgtgcttcagctcctcgagctcttcgacagcgaagatccacgcgagcgggatttcctgaaaacaaccctgcacagaatctacggaaaattcctgggcctgcgtgcttatattcggaaacagatcaacaacatcttttaccggttcatctatgaaaccgagcatcacaatgggattgccgagttgttggagatccttggctcaatcattaatggattcgctttgcccctcaaagaggagcataagatctttctcttgaaggtgctgctgcccttgcataaggttaagtcactgagcgtctaccacccacagttggcttattgcgtggtgcagttcttagagaaggactccaccctgactgaaccagtggtcatggcgttactgaaatactggcctaaaactcatagcccaaaggaagttatgtttctgaatgaactggaggagattcttgatgtaatagagccttcggagtttgtgaaaatcatggaacccctcttcagacagctcgctaagtgcgtgagttccccccattttcaggtcgcggaacgtgccctatattattggaataatgagtatatcatgagcctaatatccgataatgcggccaagattctgcccattatgtttccttctctgtatcgaaattccaagacccactggaataaaaccattcatggcctgatatacaacgccctaaagctttttatggagatgaatcaaaaactttttgatgattgcacccaacagtttaaggcggaaaaactaaaggagaaactgaagatgaaagaaagggaagaggcgtgggtcaagatcgagaacctggcaaaagcaaacccccagtataccgtgtactcccaggcaagcaccatgagcatccctgttgctatggagactgacggccccctctttgaagatgtccagatgctgagaaagaccgtgaaagatgaggcccaccaagcgcagaaggatcccaagaaagaccgcccccttgctcgcagaaagtccgaactgccgcaggacccacacaccaagaaggcattggaagcccactgcagagcagacgaactggccagccaggacggcaggtag

SEQ ID NO: 61517 - DNA, 1662 bp, Artificial Sequence
  derived and/or modified sequence
aacaaaaataagaaagagaaagagagccccaaagctgggaagagcggcaagtctagtaaggaagggcaggacactgtagagtctgagggaacatctccagaggaaccatcgtctccgaaggtaccgccacctctgttgccagaactgcttgtgttgatctttggtggactgcagggaagagatgtccccccggcagaccaggagaagctgttcatacaaaaactccgtcagtgctgcgttctgtttgattttgtgtccgatccactcagcgatctcaaatggaaagaggtgaaacgggccgcactgagcgagatggtggagtacattacccacaaccgcaacgttattaccgaaccaatctaccccgaggtagtacacatgtttgcagtgaacatgttccgcactcttcccccctccagtaatcccacgggcgccgagttcgaccccgaagaagatgagcctacactagaagccgcatggccccatcttcagcttgtgtacgaatttttcctgcggttcctggagagtcctgattttcagcctaatatcgccaaaaagtacattgatcagaaattcgtgctgcagctcctcgagctgtttgacagcgaggatcctcgcgagcgcgactttctcaaaacaactctgcatcgaatctacggcaaattcctgggtttacgagcatacataagaaaacaaattaacaacatcttctaccggttcatctacgaaacagagcaccataacggcatcgcagagctgcttgaaatcctggggagcattatcaatggtttcgccttgcccttaaaagaggagcataagattttcctcctgaaggtcttactccctctgcacaaggtcaagagcctcagtgtgtaccacccacagttagcctactgtgtcgtccagtttctggaaaaagacagcactctcacagagcctgtcgtcatggcgctcctgaaatactggccaaaaacacactcgcccaaggaggtcatgttcctcaatgaactcgaagaaattctcgatgttatcgaacccagtgaattcgtaaaaatcatggagccactatttcgtcagttggccaagtgcgtgagtagtccccactttcaagtggccgagagggctctctattactggaacaacgagtacataatgtctctgattagtgacaacgcagctaaaatactcccaatcatgtttccatccctctaccgcaacagcaagactcattggaacaaaacaattcacggactaatctataacgcgctgaagctgttcatggagatgaatcagaagctgttcgatgattgtactcaacagttcaaggccgaaaaactcaaagagaagctgaagatgaaggaaagggaagaggcatgggtaaaaatagagaacctggcaaaagccaaccctcaatacactgtgtactcccaggctagtacaatgagcatcccggttgctatggagaccgacggtcctctgttcgaagacgtacaaatgctgagaaaaacagtcaaagatgaggcccatcaggcacaaaaagatcctaaaaaggaccgacctctggcgcgtagaaaatccgaactgccccaggatccccataccaagaaagcactcgaagcccactgtagagctgacgaactggcaagtcaggatggaagatag

SEQ ID NO: 61518 - DNA, 1668 bp, Artificial Sequence
  derived and/or modified sequence
atgcccaacaagaacaagaaggagaaggagagccccaaggccggcaagagcggcaagagcagcaaggagggccaggacacagtggagagcgagggcaccagccctgaggagcccagcagccccaaggtgcccccacccctgctgcctgagctgctggtgctgatctttggaggcctgcagggcagagatgtgcccccagctgaccaggagaagctgttcatccagaagctgcggcagtgctgcgtgctgtttgattttgtgtctgaccccctgagtgacctgaagtggaaggaggtgaagagagctgccctgtctgagatggtggagtacatcacccacaacagaaatgtcatcacagagcccatctacccagaggtggtgcacatgtttgctgtgaacatgttccgcaccctgccccccagcagcaaccccactggagctgagtttgatcctgaagaagatgagcccaccctggaggccgcctggccccacctgcagctggtgtatgagttcttcctgcgcttcctggagagcccagacttccagcccaacatcgccaagaagtacatcgaccagaagtttgtgctgcagctgctggagctgtttgacagcgaggacccccgggagcgggacttcctgaagaccaccctgcaccgcatctacggcaagttcctgggcctgcgggcctacatcaggaagcagatcaacaacatcttctaccgcttcatctatgaaacagagcaccacaacggcattgctgagctgctggagatcctgggcagcatcatcaatggatttgccctgcccctgaaggaggagcacaagatcttcctgctgaaggtgctgctgcccctgcacaaggtgaagagcctgtctgtgtaccacccccagctggcctactgtgtggtgcagttcctggagaaggacagcaccctgacagagcctgtggtgatggccctgctgaagtactggcccaagacccacagccccaaggaggtgatgttcctgaatgagctggaggagatcctggatgtgattgagcccagcgagtttgtgaagatcatggagcccctcttccggcagctggccaagtgtgtgagcagcccccacttccaggtggccgagcgggccctgtactactggaacaatgagtacatcatgagcctcatcagtgacaatgctgccaagatcctgcccatcatgttccccagcctgtacagaaacagcaagacccactggaacaagaccatccacggcctcatctacaatgccctgaagctgttcatggagatgaaccagaagctgtttgatgactgcacccagcagttcaaggccgagaagctgaaggagaagctgaagatgaaggagcgggaggaggcctgggtgaagattgagaacctggccaaggccaacccccagtacacagtgtacagccaggccagcaccatgagcatccctgtggccatggagacagatggccccctgtttgaagatgtgcagatgctgaggaagacagtgaaggatgaggcccaccaggcccagaaggaccccaagaaggaccggcccctggcccggaggaagtctgagctgccccaggacccccacaccaagaaggccctggaggcccactgcagagcagatgagctggccagccaggatggaagatag

SEQ ID NO: 61519 - DNA, 1662 bp, Artificial Sequence
  derived and/or modified sequence
aacaagaacaagaaggagaaggagagccccaaggccggcaagagcggcaagagcagcaaggagggccaggacacagtggagagcgagggcaccagccctgaggagcccagcagccccaaggtgcccccacccctgctgcctgagctgctggtgctgatctttggaggcctgcagggcagagatgtgcccccagctgaccaggagaagctgttcatccagaagctgcggcagtgctgcgtgctgtttgattttgtgtctgaccccctgagtgacctgaagtggaaggaggtgaagagagctgccctgtctgagatggtggagtacatcacccacaacagaaatgtcatcacagagcccatctacccagaggtggtgcacatgtttgctgtgaacatgttccgcaccctgccccccagcagcaaccccactggagctgagtttgatcctgaagaagatgagcccaccctggaggccgcctggccccacctgcagctggtgtatgagttcttcctgcgcttcctggagagcccagacttccagcccaacatcgccaagaagtacatcgaccagaagtttgtgctgcagctgctggagctgtttgacagcgaggacccccgggagcgggacttcctgaagaccaccctgcaccgcatctacggcaagttcctgggcctgcgggcctacatcaggaagcagatcaacaacatcttctaccgcttcatctatgaaacagagcaccacaacggcattgctgagctgctggagatcctgggcagcatcatcaatggatttgccctgcccctgaaggaggagcacaagatcttcctgctgaaggtgctgctgcccctgcacaaggtgaagagcctgtctgtgtaccacccccagctggcctactgtgtggtgcagttcctggagaaggacagcaccctgacagagcctgtggtgatggccctgctgaagtactggcccaagacccacagccccaaggaggtgatgttcctgaatgagctggaggagatcctggatgtgattgagcccagcgagtttgtgaagatcatggagcccctcttccggcagctggccaagtgtgtgagcagcccccacttccaggtggccgagcgggccctgtactactggaacaatgagtacatcatgagcctcatcagtgacaatgctgccaagatcctgcccatcatgttccccagcctgtacagaaacagcaagacccactggaacaagaccatccacggcctcatctacaatgccctgaagctgttcatggagatgaaccagaagctgtttgatgactgcacccagcagttcaaggccgagaagctgaaggagaagctgaagatgaaggagcgggaggaggcctgggtgaagattgagaacctggccaaggccaacccccagtacacagtgtacagccaggccagcaccatgagcatccctgtggccatggagacagatggccccctgtttgaagatgtgcagatgctgaggaagacagtgaaggatgaggcccaccaggcccagaaggaccccaagaaggaccggcccctggcccggaggaagtctgagctgccccaggacccccacaccaagaaggccctggaggcccactgcagagcagatgagctggccagccaggatggaagatag

SEQ ID NO: 61520 - DNA, 1668 bp, Artificial Sequence
  derived and/or modified sequence
atgcccaacaagaacaagaaggagaaggagagccccaaggccggcaagtccggtaaatcaagtaaagaggggcaggatactgtcgaatctgagggcacaagccccgaggagccctcctcgcccaaagtgccaccacctctgctcccagaactgcttgtcctgatctttggcggactgcagggccgcgacgtgccacccgccgatcaagagaaactgtttatccagaagcttcggcagtgctgcgttctgtttgattttgtgagcgaccccctcagtgatctgaaatggaaggaggtgaaacgggcggcactgagtgagatggtggagtatatcacacataatcgaaatgtaattacagaaccgatttatcctgaggttgtgcacatgtttgcggtgaatatgttccgaaccctgcccccgtccagcaaccccaccggtgccgagttcgatccagaggaggacgagccaactctcgaagcagcatggccccacttgcagctggtgtatgagttttttctccgctttctggaatccccagatttccagccgaatattgcaaagaagtacattgaccagaaatttgtgttacaactgttggagcttttcgatagcgaggatccacgcgaacgggattttctcaagactacgctccatcggatctacggaaagttccttggcttgcgcgcctacatcagaaaacagatcaataacatcttctacagatttatttatgaaacagaacatcacaacggtattgctgaacttctggaaatcttgggttctattatcaatggctttgctttgcctctgaaggaagagcacaagatatttctgctgaaagtgctgctgcctttgcacaaagtgaaatctctttccgtgtaccatccacaactggcctactgtgttgtgcagtttctcgaaaaggactccacactcactgaaccagtggtcatggcactgttgaaatactggccaaagacacactcccccaaggaggtaatgttccttaatgagctcgaagaaatcctggatgtaatcgagccctccgaattcgtgaaaattatggaacccctgtttcggcagcttgccaagtgcgtttccagcccacacttccaagtggcagagcgggctttatactactggaacaacgagtacattatgtccctgatcagtgacaatgccgcaaaaatcttgcccatcatgtttcccagtctgtatcgtaatagtaagacacactggaacaaaacaattcacggactcatatataacgccctcaagctcttcatggagatgaaccagaaattatttgacgattgcactcagcagtttaaagcggaaaaactaaaggagaaactgaaaatgaaggaacgcgaagaagcctgggtgaaaatcgaaaacctggcaaaagccaatccgcagtacaccgtttactcacaggcaagtactatgagtatcccagttgcgatggagacggatggtccgctgttcgaggacgttcaaatgttaagaaagacggtcaaggatgaggcccatcaggctcagaaggatcctaaaaaagaccggcctttggcccgccgaaagtcagagctgcctcaggacccacacaccaagaaggcactcgaggcacattgccgagctgacgaactggctagccaggatggacgctag

SEQ ID NO: 61521 - DNA, 1662 bp, Artificial Sequence
  derived and/or modified sequence
aacaagaacaagaaggagaaggagagccccaaggccggcaagagcggtaaatcctcaaaggagggccaggacaccgtagaaagcgaaggcacctcccctgaagagccaagttctccaaaagttcctcctcctttgctgcctgagctgctggtcctgattttcggcggacttcagggtcgtgatgttccacccgccgatcaggagaagctattcatccagaagctgaggcagtgctgcgttctctttgacttcgtctccgatccactaagtgatctcaaatggaaggaagtgaagagagcagccctgagcgaaatggtggagtacattactcacaatagaaacgtcatcacggagcccatctatcccgaagtggttcacatgttcgccgtgaatatgttccgcacccttcctccttcatccaaccccacaggagccgagttcgatccagaagaggatgaacccaccctggaggctgcttggcctcacctgcagctggtatacgaattcttcttgcgcttcctggaaagtcccgattttcagccaaacattgcgaagaagtacatcgaccagaagttcgtgctccagttgttggaactcttcgatagtgaagaccccagggagagagacttcctgaaaaccaccctccatcgaatttatgggaagttccttggtctccgcgcatacattaggaagcagattaacaacattttttatcggttcatttacgaaacagaacatcacaatggtatcgccgagctcctcgagatcctgggaagtattatcaatggcttcgcccttcctttaaaagaggaacacaaaatcttcctgctcaaagtgctcctccctctgcataaggtaaagtccctaagtgtgtaccatccgcaactggcttactgcgtggtccagttcctggagaaggatagcacgctcacagagccagtggtgatggctttgttgaagtactggccgaaaacacattctcctaaagaggtcatgttccttaacgaacttgaggagatcctagatgtgattgaaccatcggagttcgtaaaaataatggagccactctttaggcagttggctaagtgcgtgtcctcaccgcattttcaggtcgctgaacgagcgctgtattattggaacaatgaatacatcatgagtcttatctctgataatgcagccaagatcctccctataatgttccctagcctgtatcgcaatagcaagacacattggaacaaaactatccacggcctcatatacaatgccctgaaactgttcatggaaatgaatcagaagctgttcgacgactgcacccagcagtttaaggctgagaagctcaaggagaagctgaaaatgaaggagagggaagaagcgtgggtgaagatcgagaatctcgctaaagcgaatccccagtacactgtatattcccaggccagtactatgagcattccagtagctatggaaacagacgggccactttttgaagatgtgcagatgttgagaaagaccgtaaaggacgaagcacaccaagcgcagaaggatcccaagaaggacaggcctctggctcgcagaaagagtgaactacctcaggatccacacaccaagaaggcattagaggctcactgtcgtgccgacgagctcgcaagtcaggatggccgctag

SEQ ID NO: 61522 - DNA, 1668 bp, Artificial Sequence
  derived and/or modified sequence
atgccaaacaagaataagaaagagaaggagagccccaaagcaggaaaatccggtaagtccagtaaggaaggccaagacacagtggagagtgagggcacaagtcccgaagagcccagttcacctaaggtgccccctccactcctccccgagctcctagtgctcatatttggcggactccaggggagagatgtgccacctgcagatcaggagaaattgttcattcaaaagttgcggcagtgttgcgtactatttgactttgtctccgacccattgagtgacctcaagtggaaggaggtcaagcgcgctgccctttcagagatggtggagtatataacacataaccggaatgtgatcaccgagcccatctacccagaggtggtgcacatgttcgctgtgaatatgttccgtactcttcctccctcctctaatcccaccggagctgagtttgatcccgaagaggacgagcctaccttggaagccgcatggccacacctccaactggtctacgagttttttttgagattccttgagagcccagactttcagccaaatatcgccaaaaagtacatagatcagaaattcgtacttcagctgctggagctttttgacagtgaggacccaagagagagggacttcctgaaaacaaccctccacaggatctatggaaaattcctggggctgagggcatacattcggaaacaaatcaataatatattttatcgtttcatatacgaaactgaacaccacaatgggatcgccgaactcttagagatcctgggcagcatcataaacggctttgcactcccccttaaggaagaacacaaaattttcttactgaaggtgctcctgccactgcataaggttaagagcctgtccgtgtatcatccacagctagcctactgcgtcgtgcagtttcttgaaaaggacagtacactaactgaacctgtcgtgatggcattactcaaatattggcctaagactcacagccccaaggaggtgatgtttctcaacgaactggaggagatactggacgtcatcgaaccatccgagttcgtgaagatcatggaacctttatttaggcaacttgcaaagtgtgtgagcagtccccactttcaggtggccgagagagctttgtactactggaacaatgaatacattatgagcctcataagcgacaacgcagctaagattcttccgatcatgtttcctagtctctacaggaattccaagacacactggaacaaaaccatccatggccttatatataacgccctgaagctgtttatggagatgaaccagaagctgttcgatgactgcactcagcagttcaaggcagaaaaattgaaggaaaaactgaaaatgaaggaacgcgaggaagcatgggtgaaaatcgaaaacctggccaaggcgaacccccagtacaccgtgtacagccaggcctcaacgatgtccatccccgttgctatggaaactgacgggcctctgttcgaggatgtacagatgcttaggaagaccgttaaagacgaagcccaccaggcccagaaggatccaaagaaggataggcccctggcgcgaagaaagtcagagttaccccaggatccccacactaagaaagccctggaggcacattgcagagccgacgagctggccagtcaagatgggaggtag

SEQ ID NO: 61523 - DNA, 1662 bp, Artificial Sequence
  derived and/or modified sequence
aataaaaataaaaaagagaaggagtcacccaaagccggtaaatctggcaaaagctctaaagagggccaggacaccgtcgagagcgaaggtacttccccagaggaaccatcaagtcctaaggtaccccctcccctcctgcccgagttgctcgttctgattttcgggggtctacaggggcgagatgttcctcctgccgatcaggaaaagttgttcattcagaaacttagacagtgttgcgtcttattcgactttgtctccgatccactatctgacctgaagtggaaagaggtcaaacgagcggctttgagtgagatggtagagtatataacccacaatcggaatgtgattaccgaacctatttacccggaggtggtgcacatgtttgccgtaaacatgttccgcacccttcccccttctagtaaccctacaggtgctgagttcgatcccgaggaggatgagcccactctggaggctgcttggccacacctccagctcgtatatgagttcttcttgcggtttctcgagtctccggattttcagcccaatatcgctaagaagtatattgatcagaagtttgtgcttcagttgcttgagctgtttgatagtgaagatccacgcgagcgcgacttcttgaagaccacactacataggatttacgggaaattcctgggactgagggcctatatcagaaagcaaatcaacaatattttttaccgttttatctatgaaaccgagcaccataacggaatagcggaattgttggaaatcctcggttccattatcaacgggtttgcactccctcttaaagaagagcacaaaatttttttactaaaagtgctcctgcctttgcacaaggtcaaaagtctttctgtataccatccccagctcgcctactgtgtcgtgcagtttttggaaaaagactccacattaactgaacccgtcgtgatggcactgctaaaatactggcctaagactcactctccaaaagaagtcatgtttcttaacgagctggaagagatattagatgtgattgagcctagtgagtttgttaaaattatggaacctctgttccgacagctcgctaagtgtgtatcttccccccatttccaggtggcagaaagagcactgtattattggaacaacgaatatatcatgagtcttatttcagataacgccgctaagattctgcctataatgtttccaagcctctatagaaactccaagactcattggaacaaaacaatccacggtctcatttataatgctttgaagctgttcatggagatgaaccaaaaactgttcgacgactgcacacagcaattcaaggcggagaaactgaaagaaaaattgaagatgaaggaaagggaggaagcctgggtgaaaatcgagaacttagctaaagcgaacccgcagtacactgtttactcccaggcatcgaccatgtcaatccccgttgctatggagacagatggcccactctttgaagacgttcagatgctgcgcaagacagttaaagatgaagcacaccaagctcagaaggaccccaagaaggatcggcctcttgccagacgtaaaagtgaactcccacaggacccccacactaagaaagctctagaagcccactgtcgagcagacgagctggcatcccaggatggacgttag

SEQ ID NO: 61524 - DNA, 4481 bp, Artificial Sequence
  derived and/or modified sequence
gcggccgcgggggcgcgacggccggggcgggggcgctgctgctgcgggggcaggcggcggcaggggcggcggcggcggcggcggcccgctccagccatgccgaataaaaacaagaaggagaaagaatcaccaaaagcagggaagagtggaaaaagttcaaaagaaggacaagacacagtagaatcagagggaacaagtcctgaagaaccctcaagccctaaagtaccacctccacttcttcctgagttgctggttcttatttttggtgggcttcaaggaagagatgttcctcctgctgatcaagagaagctttttatccagaagttacgtcagtgttgcgtcctctttgactttgtttctgatccactaagtgacctaaagtggaaggaagtaaaacgagctgctttaagtgaaatggtagaatatatcacccataatcggaatgtgatcacagagcctatttacccagaagtagtccatatgtttgcagttaacatgtttcgaacattaccaccttcctccaatcctacgggagcggaatttgacccggaggaagatgaaccaacgttagaagcagcctggcctcatctacagcttgtttatgaatttttcttaagatttttagagtctccagatttccaacctaatatagcgaagaaatatattgatcagaagtttgtattgcagcttttagagctctttgacagtgaagatcctcgggagagagattttcttaaaaccacccttcacagaatctatgggaaattcctaggcttgagagcttacatcagaaaacagataaataatatattttataggtttatttatgaaacagagcatcataatggcatagcagagttactggaaatattgggaagtataattaatggatttgccttaccactaaaagaagagcacaagattttcttattgaaggtgttactacctttgcacaaagtgaaatctctgagtgtctaccatccccagctggcatactgtgtagtgcagtttttagaaaaggacagcaccctcacggaaccagtggtgatggcacttctcaaatactggccaaagactcacagtccaaaagaagtaatgttcttaaacgaattagaagagattttagatgtcattgaaccatcagaatttgtgaagatcatggaacccctcttccggcagttggccaaatgtgtctccagcccacacttccaggtggcagagcgagctctctattactggaataatgaatacatcatgagtttaatcagtgacaacgcagcgaagattctgcccatcatgtttccttccttgtaccgcaactcaaagacccattggaacaagacaatacatggcttgatatacaacgccctgaagctcttcatggagatgaaccaaaagctatttgatgactgtacacaacagttcaaagcagagaaactaaaagagaagctaaaaatgaaagaacgggaagaagcatgggttaaaatagaaaatctagccaaagccaatccccagtacacagtgtatagtcaagccagcaccatgagcattccggttgcaatggagacagatgggcctttatttgaagatgtgcagatgctgagaaagacagtgaaggacgaggctcatcaggcacagaaagatccgaagaaggaccgtcctcttgcacgccgcaagtccgagctgcctcaggacccccacaccaagaaagccttggaagctcactgcagggccgatgagctggcctcccaggacggccgctagcctccggggcgccgcgtcggggccgggcccgccagttcttttccggattctgtagaaaatacatacttcctgtgccataccaatcagttacactcaaagctttcttggaccccgttccgtaggcaataacgtgcgtccgcctcagcgcgagattaggagttcaaacaatggtgacttcccagagcccgctggcagagccgcgggttgacgacggtgtcctcgcagtgtcgccgccaccccagcgtagtccaagtcagactatttcacaaagtcagagcgataggaaagcaccctgcccttcatcttcatgttctcccaaatggaacttaggatcttttaacataggtggttctgtgataacatcagtgttttccaaatcaaaggaacgctttaaaaaataggacctattttttaagactttacagcctttgaaatggtttccacgtgattgttacgccagcagttctcgttttgtttgtttttcaatctcagtgaaatggctctttgctttcgagttctcacgcaacgtactgggcaaatgacaatcctcagccgctggtattttctaaggggtctcttcactttgatgagtgacatgaacaccgtgtctccttctcttgtgtgtacctaaagccatatttccaagtctgtggtactccaggattccaggagtaagcctgtagaagagatttattttaaaagagattgctctgaaatttatcttaaaagagcttgctctgtctaccttgacagaaattggagttttaaaattatgtgttaatatttttatttgcagatttcgtttccgtcaacttaaacattgttgcccttcaacaaggctcttgaattaataaaattatagtctctaagaattccacattttatggaaagttagagcaaaatcattttgagttaagccagttcttagcctaatgcaaactgcagcgcctttaagcataaagtaacacaacagcattgcacggggccggcactgccgctgccttcactgaaggctgcagtgctgttctgagagcttggaggaggcaccagcgaggatgacgtttagtggagctctttctgttgaaaagagctcacgttatcaacaccttgtaaggaaaatacagtgtctgagttttcatcggtcttcacatgctgctatatattccacagagttccttgcatgtactgagcttttgttttagatggaatagcacaaggagaaaaatctttaaacttagtgctttgtctattctttatttctctcagggtggccagtattttgacttatttatcctgcttgaaagctacttgagatgtgtactgctattctaaacacgtgatctagtttctttcatctctggcataagattatataacttaatgttaagtgtcttgaggcataaaagacaaaatgtggcttattttaggatctgttttttcatcgaggtctcgggtatcctttcaaagatagtgagaagcagacactgctccttgtgcagctctggtacctcctgcccactgctgtcacttcaagccactggcaatgcttctgtcctcgtgtcttggaggaaaatcacctggggggaggggacttcttgtggtaagagcaagtgcaggtatgaaatgcgaagattgccccagctaaaagtggacaagtccgctttgtgagatgaatacttcctgagaaacttgacaagtatctctccattttaccattatgaaaactatcattaaaaaaaacagtttagatgccttctccttttgagggaaaaagggtgctttttattgtataaagcagcgtcttatgtattttgatataccattgtttgaacttccgtctttagctgatagattctcaaatatccttgattttggatgttcagtatgtttgtgagagaggtttctgggaagactctctttttgccctcgggaaaaagcaaaatatcaatgtttgggtgactgtgtaaagctcagtgtgtaagaacatctttttgtctaggttttctttctgctctttattgaagacaaacactcaccaaaaagaaaaataaaagttttcagagaaactaattttctttggcaagagtattacttaatattttggcctcctaaagtttccctagttagtactcggactcctgtgctaattgtcagcttacatatcattgtatagagactgtttattctgtaccaaactgatttcaaaagtactacattgaaaataaaccggtgactgtttttcttcataaagttctgcgtttggcatcttcactctttccaaaatgtatctgtacatcagaaatgtcactattccaagtgtctttttagtgtggctttagtatggcttccttttaatattgtacatacattgtatctttgttttatggtaataagtaataaaaatgtagacttcatattttgtacaaaatgtcctatgtacagaataaaaaagttcatagaaacagcaaatataggtaagtggcacaattatttttctttagaaaatatctgtaactttatgcattagtgaaatgttaagtaccgacatattttttaacattttgtaattcaaaactttttgttttgacattgtttatgaagagaaacttcatacacttgccatttaatatgctcttttatctaattttcaaaaactctaaaaaacggtgtatcatatggactaaataaagaacatgtgaattttattgctcatcatg

SEQ ID NO: 61525 - DNA, 2013 bp, Artificial Sequence
  derived and/or modified sequence
aataaaaacaagaaggagaaagaatcaccaaaagcagggaagagtggaaaaagttcaaaagaaggacaagacacagtagaatcagagggaacaagtcctgaagaaccctcaagccctaaagtaccacctccacttcttcctgagttgctggttcttatttttggtgggcttcaaggaagagatgttcctcctgctgatcaagagaagctttttatccagaagttacgtcagtgttgcgtcctctttgactttgtttctgatccactaagtgacctaaagtggaaggaagtaaaacgagctgctttaagtgaaatggtagaatatatcacccataatcggaatgtgatcacagagcctatttacccagaagtagtccatatgtttgcagttaacatgtttcgaacattaccaccttcctccaatcctacgggagcggaatttgacccggaggaagatgaaccaacgttagaagcagcctggcctcatctacagcttgtttatgaatttttcttaagatttttagagtctccagatttccaacctaatatagcgaagaaatatattgatcagaagtttgtattgcagcttttagagctctttgacagtgaagatcctcgggagagagattttcttaaaaccacccttcacagaatctatgggaaattcctaggcttgagagcttacatcagaaaacagataaataatatattttataggtttatttatgaaacagagcatcataatggcatagcagagttactggaaatattgggaagtataattaatggatttgccttaccactaaaagaagagcacaagattttcttattgaaggtgttactacctttgcacaaagtgaaatctctgagtgtctaccatccccagctggcatactgtgtagtgcagtttttagaaaaggacagcaccctcacggaaccagtggtgatggcacttctcaaatactggccaaagactcacagtccaaaagaagtaatgttcttaaacgaattagaagagattttagatgtcattgaaccatcagaatttgtgaagatcatggaacccctcttccggcagttggccaaatgtgtctccagcccacacttccaggtggcagagcgagctctctattactggaataatgaatacatcatgagtttaatcagtgacaacgcagcgaagattctgcccatcatgtttccttccttgtaccgcaactcaaagacccattggaacaagacaatacatggcttgatatacaacgccctgaagctcttcatggagatgaaccaaaagctatttgatgactgtacacaacagttcaaagcagagaaactaaaagagaagctaaaaatgaaagaacgggaagaagcatgggttaaaatagaaaatctagccaaagccaatccccagtacacagtgtatagtcaagccagcaccatgagcattccggttgcaatggagacagatgggcctttatttgaagatgtgcagatgctgagaaagacagtgaaggacgaggctcatcaggcacagaaagatccgaagaaggaccgtcctcttgcacgccgcaagtccgagctgcctcaggacccccacaccaagaaagccttggaagctcactgcagggccgatgagctggcctcccaggacggccgctagcctccggggcgccgcgtcggggccgggcccgccagttcttttccggattctgtagaaaatacatacttcctgtgccataccaatcagttacactcaaagctttcttggaccccgttccgtaggcaataacgtgcgtccgcctcagcgcgagattaggagttcaaacaatggtgacttcccagagcccgctggcagagccgcgggttgacgacggtgtcctcgcagtgtcgccgccaccccagcgtagtccaagtcagactatttcacaaagtcagagcgataggaaagcaccctgcccttcatcttcatgttctcccaaatggaacttaggatcttttaacataggtggtt

SEQ ID NO: 61526 - DNA, 1668 bp, Artificial Sequence
  derived and/or modified sequence
atgcccaacaagaacaagaaggagaaggagagccccaaggccggcaagagcggcaagagcagcaaggagggccaggacaccgtggagagcgagggcaccagccccgaggagcccagcagccccaaggtgcccccccccctgctgcccgagctgctggtgctgatcttcggcggcctgcagggcagagacgtgccccccgccgaccaggagaagctgttcatccagaagctgagacagtgctgcgtgctgttcgacttcgtgagcgaccccctgagcgacctgaagtggaaggaggtgaagagagccgccctgagcgagatggtggagtacatcacccacaacagaaacgtgatcaccgagcccatctaccccgaggtggtgcacatgttcgccgtgaacatgttcagaaccctgccccccagcagcaaccccaccggcgccgagttcgaccccgaggaggacgagcccaccctggaggccgcctggccccacctgcagctggtgtacgagttcttcctgagattcctggagagccccgacttccagcccaacatcgccaagaagtacatcgaccagaagttcgtgctgcagctgctggagctgttcgacagcgaggaccccagagagagagacttcctgaagaccaccctgcacagaatctacggcaagttcctgggcctgagagcctacatcagaaagcagatcaacaacatcttctacagattcatctacgagaccgagcaccacaacggcatcgccgagctgctggagatcctgggcagcatcatcaacggcttcgccctgcccctgaaggaggagcacaagatcttcctgctgaaggtgctgctgcccctgcacaaggtgaagagcctgagcgtgtaccacccccagctggcctactgcgtggtgcagttcctggagaaggacagcaccctgaccgagcccgtggtgatggccctgctgaagtactggcccaagacccacagccccaaggaggtgatgttcctgaacgagctggaggagatcctggacgtgatcgagcccagcgagttcgtgaagatcatggagcccctgttcagacagctggccaagtgcgtgagcagcccccacttccaggtggccgagagagccctgtactactggaacaacgagtacatcatgagcctgatcagcgacaacgccgccaagatcctgcccatcatgttccccagcctgtacagaaacagcaagacccactggaacaagaccatccacggcctgatctacaacgccctgaagctgttcatggagatgaaccagaagctgttcgacgactgcacccagcagttcaaggccgagaagctgaaggagaagctgaagatgaaggagagagaggaggcctgggtgaagatcgagaacctggccaaggccaacccccagtacaccgtgtacagccaggccagcaccatgagcatccccgtggccatggagaccgacggccccctgttcgaggacgtgcagatgctgagaaagaccgtgaaggacgaggcccaccaggcccagaaggaccccaagaaggacagacccctggccagaagaaagagcgagctgccccaggacccccacaccaagaaggccctggaggcccactgcagagccgacgagctggccagccaggacggcagatag

SEQ ID NO: 61527 - DNA, 1662 bp, Artificial Sequence
  derived and/or modified sequence
aacaagaacaagaaggagaaggagagccccaaggccggcaagagcggcaagagcagcaaggagggccaggacaccgtggagagcgagggcaccagccccgaggagcccagcagccccaaggtgcccccccccctgctgcccgagctgctggtgctgatcttcggcggcctgcagggcagagacgtgccccccgccgaccaggagaagctgttcatccagaagctgagacagtgctgcgtgctgttcgacttcgtgagcgaccccctgagcgacctgaagtggaaggaggtgaagagagccgccctgagcgagatggtggagtacatcacccacaacagaaacgtgatcaccgagcccatctaccccgaggtggtgcacatgttcgccgtgaacatgttcagaaccctgccccccagcagcaaccccaccggcgccgagttcgaccccgaggaggacgagcccaccctggaggccgcctggccccacctgcagctggtgtacgagttcttcctgagattcctggagagccccgacttccagcccaacatcgccaagaagtacatcgaccagaagttcgtgctgcagctgctggagctgttcgacagcgaggaccccagagagagagacttcctgaagaccaccctgcacagaatctacggcaagttcctgggcctgagagcctacatcagaaagcagatcaacaacatcttctacagattcatctacgagaccgagcaccacaacggcatcgccgagctgctggagatcctgggcagcatcatcaacggcttcgccctgcccctgaaggaggagcacaagatcttcctgctgaaggtgctgctgcccctgcacaaggtgaagagcctgagcgtgtaccacccccagctggcctactgcgtggtgcagttcctggagaaggacagcaccctgaccgagcccgtggtgatggccctgctgaagtactggcccaagacccacagccccaaggaggtgatgttcctgaacgagctggaggagatcctggacgtgatcgagcccagcgagttcgtgaagatcatggagcccctgttcagacagctggccaagtgcgtgagcagcccccacttccaggtggccgagagagccctgtactactggaacaacgagtacatcatgagcctgatcagcgacaacgccgccaagatcctgcccatcatgttccccagcctgtacagaaacagcaagacccactggaacaagaccatccacggcctgatctacaacgccctgaagctgttcatggagatgaaccagaagctgttcgacgactgcacccagcagttcaaggccgagaagctgaaggagaagctgaagatgaaggagagagaggaggcctgggtgaagatcgagaacctggccaaggccaacccccagtacaccgtgtacagccaggccagcaccatgagcatccccgtggccatggagaccgacggccccctgttcgaggacgtgcagatgctgagaaagaccgtgaaggacgaggcccaccaggcccagaaggaccccaagaaggacagacccctggccagaagaaagagcgagctgccccaggacccccacaccaagaaggccctggaggcccactgcagagccgacgagctggccagccaggacggcagatag

SEQ ID NO: 61528 - protein, 540 aa, Artificial Sequence
  derived and/or modified sequence
MPNKNKKEKESPKAGKSGKSSKEGQDTVESEQISVRKNSLVAVPSTVSAKIKVPVSQPIVKKDKRQNSSRFSASNNRELQKLPSLKDVPPADQEKLFIQKLRQCCVLFDFVSDPLSDLKWKEVKRAALSEMVEYITHNRNVITEPIYPEVVHMFAVNMFRTLPPSSNPTGAEFDPEEDEPTLEAAWPHLQLVYEFFLRFLESPDFQPNIAKKYIDQKFVLQLLELFDSEDPRERDFLKTTLHRIYGKFLGLRAYIRKQINNIFYRFIYETEHHNGIAELLEILGSIINGFALPLKEEHKIFLLKVLLPLHKVKSLSVYHPQLAYCVVQFLEKDSTLTEPVVMALLKYWPKTHSPKEVMFLNELEEILDVIEPSEFVKIMEPLFRQLAKCVSSPHFQVAERALYYWNNEYIMSLISDNAAKILPIMFPSLYRNSKTHWNKTIHGLIYNALKLFMEMNQKLFDDCTQQFKAEKLKEKLKMKEREEAWVKIENLAKANPQAQKDPKKDRPLARRKSELPQDPHTKKALEAHCRADELASQDGR

SEQ ID NO: 61529 - DNA, 1623 bp, Artificial Sequence
  derived and/or modified sequence
atgcctaacaaaaataagaaggaaaaagagtcgcccaaggcaggaaagtccggaaaaagctccaaagaagggcaggacacagtggagagcgagcaaatcagcgtgaggaaaaacagcctggtggccgtccccagtaccgtgagcgctaaaattaaagtgccggtgagccagcccattgttaagaaagataaaagacagaactccagcagattctcagcctccaataatagagaactgcagaaactgccctcactgaaggatgtccccccagctgatcaggagaagttattcatacagaagctgaggcagtgctgtgttctgtttgactttgtatctgaccctctgtcagatttgaaatggaaggaagtgaagagagccgctctatctgaaatggttgagtatatcacacataaccgaaacgtgattactgaacccatctacccagaggtggtccacatgttcgccgtaaatatgttccgcacacttccccccagcagcaatcctacaggagcagaattcgatccagaagaagacgagcccaccctggaggcagcctggcctcaccttcagctggtgtatgaattctttctcaggttcctggagagccccgattttcaaccgaatatcgcaaagaagtatattgaccagaaattcgtgctgcagcttttggagctgttcgactctgaggacccacgcgagagggattttctcaagactaccctccacagaatctacgggaaatttttgggccttagagcttacatcaggaaacagatcaataatatcttctaccgctttatatacgagactgagcatcacaacggaattgcagaattgctcgaaatactagggtcgatcattaatgggttcgcccttccactgaaggaggagcacaaaattttcctgctgaaggtgctcctgcccttgcacaaggtgaagtcgctgagtgtatatcacccccagctagcatactgcgtcgtccagtttttagagaaggacagcacactgaccgagccagtagtcatggctctgttgaaatactggcccaaaacacattctccgaaggaggttatgttcctgaatgaactcgaagagatacttgatgtgattgagccatctgagttcgtaaagattatggaacctctcttcaggcagttggctaagtgcgtctcttctccccatttccaagtggccgaaagggctctgtactactggaataatgagtatattatgtccctgatctccgataacgcggctaaaatccttcctattatgttcccgtccttatatagaaacagcaaaacgcactggaataaaactatccatggcctaatctacaatgcgttgaagttatttatggaaatgaatcagaagttattcgatgattgcacacagcagttcaaggcagagaaactgaaagagaagctcaaaatgaaagaaagggaggaagcctgggtgaagatcgagaatttagctaaggccaaccctcaggcccagaaagaccccaagaaggatcgaccattggcccgccgtaagtcggagttgccacaggacccacatacaaaaaaagccctggaggcccattgtagagcagacgaattggccagtcaggacggtcgttag

SEQ ID NO: 61530 - DNA, 1623 bp, Artificial Sequence
  derived and/or modified sequence
atgcccaacaagaacaagaaggagaaggagagccccaaggccggcaagagcggcaagagcagcaaggagggccaggacacagtggagagcgagcagatctctgtgaggaagaacagcctggtggccgtgcccagcacagtgtctgccaagatcaaggtgcctgtgtcccagcccatcgtgaagaaggacaagaggcagaacagcagccgcttcagcgccagcaacaaccgggagctgcagaagctgcccagcctgaaggatgtgcccccagctgaccaggagaagctgttcatccagaagctgcggcagtgctgcgtgctgtttgattttgtgtctgaccccctgagtgacctgaagtggaaggaggtgaagagagctgccctgtctgagatggtggagtacatcacccacaacagaaatgtcatcacagagcccatctacccagaggtggtgcacatgtttgctgtgaacatgttccgcaccctgccccccagcagcaaccccactggagctgagtttgatcctgaagaagatgagcccaccctggaggccgcctggccccacctgcagctggtgtatgagttcttcctgcgcttcctggagagcccagacttccagcccaacatcgccaagaagtacatcgaccagaagtttgtgctgcagctgctggagctgtttgacagcgaggacccccgggagcgggacttcctgaagaccaccctgcaccgcatctacggcaagttcctgggcctgcgggcctacatcaggaagcagatcaacaacatcttctaccgcttcatctatgaaacagagcaccacaacggcattgctgagctgctggagatcctgggcagcatcatcaatggatttgccctgcccctgaaggaggagcacaagatcttcctgctgaaggtgctgctgcccctgcacaaggtgaagagcctgtctgtgtaccacccccagctggcctactgtgtggtgcagttcctggagaaggacagcaccctgacagagcctgtggtgatggccctgctgaagtactggcccaagacccacagccccaaggaggtgatgttcctgaatgagctggaggagatcctggatgtgattgagcccagcgagtttgtgaagatcatggagcccctcttccggcagctggccaagtgtgtgagcagcccccacttccaggtggccgagcgggccctgtactactggaacaatgagtacatcatgagcctcatcagtgacaatgctgccaagatcctgcccatcatgttccccagcctgtacagaaacagcaagacccactggaacaagaccatccacggcctcatctacaatgccctgaagctgttcatggagatgaaccagaagctgtttgatgactgcacccagcagttcaaggccgagaagctgaaggagaagctgaagatgaaggagcgggaggaggcctgggtgaagattgagaacctggccaaggccaacccccaggcccagaaggaccccaagaaggaccggcccctggcccggaggaagtctgagctgccccaggacccccacaccaagaaggccctggaggcccactgcagagcagatgagctggccagccaggacggccgctag

SEQ ID NO: 61531 - DNA, 1623 bp, Artificial Sequence
  derived and/or modified sequence
atgcccaacaagaacaagaaggagaaggagagccccaaggccggcaaaagtggtaagtccagcaaggagggccaggacactgtcgagtccgaacagataagcgtccgcaaaaattcactcgtggcagttcccagcacagtgagcgctaagattaaggtaccagttagccagccgattgtgaaaaaggacaaaagacagaatagcagccggttctccgcaagcaacaatagggagctccagaagttgccctccctgaaagacgtcccaccagccgatcaggagaagctgtttatacaaaagctgcgacagtgttgcgtgctctttgacttcgtgagcgaccctctcagcgatctgaagtggaaggaggtcaaaagagccgccttatctgagatggtcgagtacatcactcacaaccggaacgttatcactgagcctatttatcccgaggtagtgcacatgttcgcagtgaacatgttcaggacgctgcctccttccagtaatcccaccggcgcggagtttgatcccgaagaagacgaaccaacactggaagcagcctggccccatctgcaactcgtatacgagttttttttgcgatttttggaaagccccgactttcagcctaatattgcaaagaagtacattgaccagaaatttgtgttacagctgctggagctgtttgattctgaggatccccgcgaacgagacttcctgaaaaccaccttacatagaatttatggtaagttcctgggacttagggcatatatcaggaaacagattaacaatatcttctacaggttcatctatgaaacagagcaccacaacgggatcgctgagctgctggagattcttgggtccatcattaacggctttgctttgccgctaaaggaggagcacaagattttcctccttaaggtgttgctgcccctgcacaaagttaagtccctttctgtttaccacccgcagttagcatattgtgttgtccagttcctggaaaaggatagcacactcacagaacccgtggtaatggcgctgctgaagtactggcctaaaactcactctcccaaggaagttatgtttttgaacgagctggaagagatcctggatgtaatcgagccttcagagtttgtgaaaattatggaacctttattccgacagttagccaaatgcgtgtctagcccccattttcaggtcgcagaacgcgcactttactactggaacaatgaatacataatgagcctaattagtgacaacgcagccaagattctgcctataatgttcccttccttgtatcgcaactctaagactcactggaataagaccatacacggcttaatctacaatgcactgaagctgtttatggagatgaaccagaaactcttcgatgattgcacacaacagttcaaggcggagaaactgaaagagaaactgaaaatgaaggagagagaggaagcttgggtgaagatcgagaatctggccaaagcaaatccccaggctcaaaaagacccaaagaaggacaggcccctggccagacggaaatctgagcttcctcaggatccccatactaaaaaagcattggaagcacactgcagagcagatgagttggcctcccaggacggcagatag

SEQ ID NO: 61532 - DNA, 1623 bp, Artificial Sequence
  derived and/or modified sequence
atgcctaacaagaataagaaggagaaggaatcaccgaaagccggaaagtcagggaaatcatccaaagagggtcaggatactgtggaatccgagcagatatcagtgcggaagaacagtctggtcgctgttccatccactgtaagcgcgaagatcaaggtccccgtgtcccaacctattgtaaagaaggacaaacgacagaacagttctagatttagtgctagcaataatagggagctccagaagttgccttctctgaaagacgtgccgccagcggaccaggagaagctctttattcagaaactccgccagtgttgcgtgctgtttgatttcgttagcgacccactgtctgatttaaaatggaaggaagtgaagcgcgcagccctgagcgaaatggtggagtacatcacacataaccgtaatgtaattacagaacccatctatccagaggtcgtgcatatgttcgcagtgaacatgttccgtacactgccccctagttccaacccaaccggtgccgaattcgatcccgaagaagatgaaccaacgctggaggccgcatggccacacctgcaactggtatacgagttttttttgcgttttctagagagcccagatttccagccaaatattgccaaaaaatacattgatcagaagttcgtgcttcaacttctggagctgtttgactcagaggaccccagggagcgggatttcctgaaaacaacgctccatcggatttacggtaaattccttggcctcagggcctacatccggaagcaaattaacaatattttctacagatttatctacgaaaccgaacatcacaacggcattgcagaactgctcgagatcctggggtccatcatcaatggttttgcactgccactgaaagaggaacataaaattttcttgctcaaggttcttctgcccttacacaaagtcaagagcttatccgtgtaccacccacagctggcgtattgtgtggtgcagtttctcgaaaaggactctaccctgacagagccagtagtcatggctttgctgaagtattggccaaaaacccactctcctaaagaagtaatgttcctcaacgaactcgaagagatcctcgatgtcatagagccgagcgagtttgtgaagattatggaacctctcttccgccagctggccaagtgcgtaagtagccctcattttcaggttgcagagcgcgctctgtactattggaataacgaatacatcatgtctctgatctcagacaatgcagccaaaatcctgcccatcatgttcccaagcctctacaggaattctaagactcactggaacaagaccattcatggcctcatttataacgccctcaaacttttcatggagatgaaccaaaaactcttcgatgactgtacccagcaatttaaggctgaaaaactcaaggaaaaactgaaaatgaaagagcgggaagaggcttgggtgaaaatcgaaaatctcgctaaagcgaatccacaggcccagaaggaccctaaaaaagataggccgctggccagacggaagtccgaactgccacaggatccgcacaccaagaaggccctggaggctcactgtagagccgacgaactcgctagccaggacggccgttag

SEQ ID NO: 61533 - DNA, 4045 bp, Artificial Sequence
  derived and/or modified sequence
gctccagccatgccgaataaaaacaagaaggagaaagaatcaccaaaagcagggaagagtggaaaaagttcaaaagaaggacaagacacagtagaatcagagcaaatttccgtcaggaaaaacagccttgttgctgtcccgtctacagtatctgctaaaataaaagtaccagtctctcagcccatagtgaagaaagacaaacggcaaaattcttcaaggtttagcgcaagcaataatagagaacttcaaaaactaccatccttaaaagatgttcctcctgctgatcaagagaagctttttatccagaagttacgtcagtgttgcgtcctctttgactttgtttctgatccactaagtgacctaaagtggaaggaagtaaaacgagctgctttaagtgaaatggtagaatatatcacccataatcggaatgtgatcacagagcctatttacccagaagtagtccatatgtttgcagttaacatgtttcgaacattaccaccttcctccaatcctacgggagcggaatttgacccggaggaagatgaaccaacgttagaagcagcctggcctcatctacagcttgtttatgaatttttcttaagatttttagagtctccagatttccaacctaatatagcgaagaaatatattgatcagaagtttgtattgcagcttttagagctctttgacagtgaagatcctcgggagagagattttcttaaaaccacccttcacagaatctatgggaaattcctaggcttgagagcttacatcagaaaacagataaataatatattttataggtttatttatgaaacagagcatcataatggcatagcagagttactggaaatattgggaagtataattaatggatttgccttaccactaaaagaagagcacaagattttcttattgaaggtgttactacctttgcacaaagtgaaatctctgagtgtctaccatccccagctggcatactgtgtagtgcagtttttagaaaaggacagcaccctcacggaaccagtggtgatggcacttctcaaatactggccaaagactcacagtccaaaagaagtaatgttcttaaacgaattagaagagattttagatgtcattgaaccatcagaatttgtgaagatcatggaacccctcttccggcagttggccaaatgtgtctccagcccacacttccaggtggcagagcgagctctctattactggaataatgaatacatcatgagtttaatcagtgacaacgcagcgaagattctgcccatcatgtttccttccttgtaccgcaactcaaagacccattggaacaagacaatacatggcttgatatacaacgccctgaagctcttcatggagatgaaccaaaagctatttgatgactgtacacaacagttcaaagcagagaaactaaaagagaagctaaaaatgaaagaacgggaagaagcatgggttaaaatagaaaatctagccaaagccaatccccaggcacagaaagatccgaagaaggaccgtcctcttgcacgccgcaagtccgagctgcctcaggacccccacaccaagaaagccttggaagctcactgcagggccgatgagctggcctcccaggacggccgctagcctccggggcgccgcgtcggggccgggcccgccagttcttttccggattctgtagaaaatacatacttcctgtgccataccaatcagttacactcaaagctttcttggaccccgttccgtaggcaataacgtgcgtccgcctcagcgcgagattaggagttcaaacaatggtgacttcccagagcccgctggcagagccgcgggttgacgacggtgtcctcgcagtgtcgccgccaccccagcgtagtccaagtcagactatttcacaaagtcagagcgataggaaagcaccctgcccttcatcttcatgttctcccaaatggaacttaggatcttttaacataggtggttctgtgataacatcagtgttttccaaatcaaaggaacgctttaaaaaataggacctattttttaagactttacagcctttgaaatggtttccacgtgattgttacgccagcagttctcgttttgtttgtttttcaatctcagtgaaatggctctttgctttcgagttctcacgcaacgtactgggcaaatgacaatcctcagccgctggtattttctaaggggtctcttcactttgatgagtgacatgaacaccgtgtctccttctcttgtgtgtacctaaagccatatttccaagtctgtggtactccaggattccaggagtaagcctgtagaagagatttattttaaaagagattgctctgaaatttatcttaaaagagcttgctctgtctaccttgacagaaattggagttttaaaattatgtgttaatatttttatttgcagatttcgtttccgtcaacttaaacattgttgcccttcaacaaggctcttgaattaataaaattatagtctctaagaattccacattttatggaaagttagagcaaaatcattttgagttaagccagttcttagcctaatgcaaactgcagcgcctttaagcataaagtaacacaacagcattgcacggggccggcactgccgctgccttcactgaaggctgcagtgctgttctgagagcttggaggaggcaccagcgaggatgacgtttagtggagctctttctgttgaaaagagctcacgttatcaacaccttgtaaggaaaatacagtgtctgagttttcatcggtcttcacatgctgctatatattccacagagttccttgcatgtactgagcttttgttttagatggaatagcacaaggagaaaaatctttaaacttagtgctttgtctattctttatttctctcagggtggccagtattttgacttatttatcctgcttgaaagctacttgagatgtgtactgctattctaaacacgtgatctagtttctttcatctctggcataagattatataacttaatgttaagtgtcttgaggcataaaagacaaaatgtggcttattttaggatctgttttttcatcgaggtctcgggtatcctttcaaagatagtgagaagcagacactgctccttgtgcagctctggtacctcctgcccactgctgtcacttcaagccactggcaatgcttctgtcctcgtgtcttggaggaaaatcacctggggggaggggacttcttgtggtaagagcaagtgcaggtatgaaatgcgaagattgccccagctaaaagtggacaagtccgctttgtgagatgaatacttcctgagaaacttgacaagtatctctccattttaccattatgaaaactatcattaaaaaaaacagtttagatgccttctccttttgagggaaaaagggtgctttttattgtataaagcagcgtcttatgtattttgatataccattgtttgaacttccgtctttagctgatagattctcaaatatccttgattttggatgttcagtatgtttgtgagagaggtttctgggaagactctctttttgccctcgggaaaaagcaaaatatcaatgtttgggtgactgtgtaaagctcagtgtgtaagaacatctttttgtctaggttttctttctgctctttattgaagacaaacactcaccaaaaagaaaaataaaagttttcagagaaactaattttctttggcaagagtattacttaatattttggcctcctaaagtttccctagttagtactcggactcctgtgctaattgtcagcttacatatcattgtatagagactgtttattctgtaccaaactgatttcaaaagtactacattgaaaataaaccggtgactgtttttcttcataaagttctgcgtttggcatcttcactctttccaaaatgtatctgtacatcagaaatgtcactattccaagtgtctttttagtgtggctttagtatggcttccttttaatattgtacatacattgtatctttgttttatggtaataagtaataaaaatgtagacttc

SEQ ID NO: 61534 - DNA, 1623 bp, Artificial Sequence
  derived and/or modified sequence
atgcccaacaagaacaagaaggagaaggagagccccaaggccggcaagagcggcaagagcagcaaggagggccaggacaccgtggagagcgagcagatcagcgtgagaaagaacagcctggtggccgtgcccagcaccgtgagcgccaagatcaaggtgcccgtgagccagcccatcgtgaagaaggacaagagacagaacagcagcagattcagcgccagcaacaacagagagctgcagaagctgcccagcctgaaggacgtgccccccgccgaccaggagaagctgttcatccagaagctgagacagtgctgcgtgctgttcgacttcgtgagcgaccccctgagcgacctgaagtggaaggaggtgaagagagccgccctgagcgagatggtggagtacatcacccacaacagaaacgtgatcaccgagcccatctaccccgaggtggtgcacatgttcgccgtgaacatgttcagaaccctgccccccagcagcaaccccaccggcgccgagttcgaccccgaggaggacgagcccaccctggaggccgcctggccccacctgcagctggtgtacgagttcttcctgagattcctggagagccccgacttccagcccaacatcgccaagaagtacatcgaccagaagttcgtgctgcagctgctggagctgttcgacagcgaggaccccagagagagagacttcctgaagaccaccctgcacagaatctacggcaagttcctgggcctgagagcctacatcagaaagcagatcaacaacatcttctacagattcatctacgagaccgagcaccacaacggcatcgccgagctgctggagatcctgggcagcatcatcaacggcttcgccctgcccctgaaggaggagcacaagatcttcctgctgaaggtgctgctgcccctgcacaaggtgaagagcctgagcgtgtaccacccccagctggcctactgcgtggtgcagttcctggagaaggacagcaccctgaccgagcccgtggtgatggccctgctgaagtactggcccaagacccacagccccaaggaggtgatgttcctgaacgagctggaggagatcctggacgtgatcgagcccagcgagttcgtgaagatcatggagcccctgttcagacagctggccaagtgcgtgagcagcccccacttccaggtggccgagagagccctgtactactggaacaacgagtacatcatgagcctgatcagcgacaacgccgccaagatcctgcccatcatgttccccagcctgtacagaaacagcaagacccactggaacaagaccatccacggcctgatctacaacgccctgaagctgttcatggagatgaaccagaagctgttcgacgactgcacccagcagttcaaggccgagaagctgaaggagaagctgaagatgaaggagagagaggaggcctgggtgaagatcgagaacctggccaaggccaacccccaggcccagaaggaccccaagaaggacagacccctggccagaagaaagagcgagctgccccaggacccccacaccaagaaggccctggaggcccactgcagagccgacgagctggccagccaggacggcagatag

SEQ ID NO: 61535 - protein, 173 aa, Artificial Sequence
  derived and/or modified sequence
MYSFMGGGLFCAWVGTILLVVAMATDHWMQYRLSGSFAHQGLWRYCLGNKCYLQTDSIAYWNATRAFMILSALCAISGIIMGIMAFAHQPTFSRISRPFSAGIMFFSSTLFVVLALAIYTGVTVSFLGRRFGDWRFSWSYILGWVAVLMTFFAGIFYMCAYRVHECRRLSTPR

SEQ ID NO: 61536 - DNA, 522 bp, Artificial Sequence
  derived and/or modified sequence
atgtactcctttatgggcggcgggctgttctgcgcctgggtaggaacaatactcttggtggtcgccatggcaacggaccattggatgcagtatagactctctggctcctttgctcaccaaggtctgtggcgctactgcctcggcaataagtgctacctgcaaacagactccatcgcttactggaacgccaccagggctttcatgatactcagcgctctgtgcgcaatttcggggatcattatgggcataatggcattcgcccatcagcccactttctcccggatcagcagacctttctccgccggaatcatgttcttctcttctaccctgtttgttgtgctcgctctggccatttacactggggtgaccgtctcttttcttggcaggagatttggagattggagattcagctggtcatatatccttgggtgggtggccgtattaatgacgttttttgcgggcatattttatatgtgtgcttatcgagtgcacgagtgccggcgactgtcaacccctagatag

SEQ ID NO: 61537 - DNA, 522 bp, Artificial Sequence
  derived and/or modified sequence
atgtacagcttcatgggcggcggcctcttctgtgcctgggtgggcaccatcctgctggtggtggccatggccacagaccactggatgcagtaccgcctgagcggcagctttgcccaccagggcctgtggagatactgcctgggcaacaagtgctacctgcagacagacagcatcgcctactggaatgccacccgggccttcatgatcctgagcgccctgtgtgccatcagcggcatcatcatgggcatcatggcctttgcccaccagcccaccttcagccgcatcagccggcccttctctgctggcatcatgttcttcagcagcaccctgtttgtggtgctggccctggccatctacacaggagtgacagtgtccttcctgggcagaagatttggagactggaggttctcctggagctacatcctgggctgggtggccgtgctgatgaccttctttgctggcatcttctacatgtgtgcctacagagtgcatgaatgtagaaggctgagcaccccaagatag

SEQ ID NO: 61538 - DNA, 861 bp, Artificial Sequence
  derived and/or modified sequence
ggccgtggcagaaggagggctcgggcaggctctgccactcagatcaccatgtacagcttcatgggtggtggcctgttctgtgcctgggtggggaccatcctcctggtggtggccatggcaacagaccactggatgcagtaccggctgtcagggtccttcgcccaccagggcctgtggcggtactgcctgggcaacaagtgctacctgcagacagacagcatcgcatactggaatgccacccgggccttcatgatcctgtctgccctatgcgccatctccggcatcatcatgggcatcatggccttcgctcatcagcctaccttctcccgcatctcccggcccttctctgctggcatcatgtttttttcctcaacccttttcgtcgtgttggccttggccatctacactggagtcaccgtcagcttcctgggccgccgctttggggactggcgcttttcctggtcctacatcctgggctgggtggcagtgctcatgacgttcttcgcagggattttctacatgtgcgcctaccgggtgcatgaatgccggcgcctgtctacaccccgctgagcccaaatgtgtcccccaacttcatctggaagttaaagtgaggccactgaagaggaggaggagggtctagaggcctgaaatcctggttcctaggggaatgagggggctcagttctggactgtgggtttgtggggggaggctgactcctggtcctaggctggaaggaggaagaatagggcccatgggagggagctgagaagactcaagtccccgtctgcctggcaggttgttagaaaaatggactatccattagagcaactttctggggcctaataaaactgatgtgaaact

SEQ ID NO: 61539 - DNA, 522 bp, Artificial Sequence
  derived and/or modified sequence
atgtacagcttcatgggcggcggcctgttctgcgcctgggtgggcaccatcctgctcgtggtcgctatggctacagatcattggatgcagtacagactctctggatccttcgctcatcagggcttatggcgttattgcttgggcaataaatgttatctccagacggattctatcgcctattggaacgcaacaagagccttcatgatcctgagcgccctctgcgccatttcgggaattataatggggatcatggcctttgcacaccagcccaccttttcacgcatcagcagaccattcagtgcaggaattatgtttttctcttcaacgttgtttgtggtccttgcactagcaatttacaccggagtaactgtctccttcctgggaagacgtttcggggactggcgattcagttggtcatatatcttggggtgggtcgcggttctgatgaccttttttgccggtattttttacatgtgtgcctatagggtgcacgagtgtcggcgtcttagcaccccacgctag

SEQ ID NO: 61540 - DNA, 522 bp, Artificial Sequence
  derived and/or modified sequence
atgtatagcttcatggggggtggactcttttgtgcatgggtcggtaccatcctgctggtggtggccatggctaccgatcactggatgcagtatcggctgagcggctctttcgcacaccagggactctggaggtattgtctcggaaataagtgttatcttcagactgactctattgcttattggaatgccacacgggctttcatgatcctcagcgcactctgtgcgatctctgggataatcatgggaatcatggcattcgctcaccagccaactttcagcagaataagcagacccttctcagctggcatcatgttcttcagctccacactctttgtcgtgctcgctctagccatctatacaggcgtcacggtgagctttctcgggagaaggttcggtgattggcgtttctcttggtcttacatcctgggctgggtcgccgtgctaatgaccttcttcgccggaattttttacatgtgtgcctatcgcgtgcatgagtgtcgtcggctcagcacccctagatag

SEQ ID NO: 61541 - DNA, 522 bp, Artificial Sequence
  derived and/or modified sequence
atgtacagcttcatgggcggcggcctgttctgcgcctgggtgggcaccatcctgctggtggtggccatggccaccgaccactggatgcagtacagactgagcggcagcttcgcccaccagggcctgtggagatactgcctgggcaacaagtgctacctgcagaccgacagcatcgcctactggaacgccaccagagccttcatgatcctgagcgccctgtgcgccatcagcggcatcatcatgggcatcatggccttcgcccaccagcccaccttcagcagaatcagcagacccttcagcgccggcatcatgttcttcagcagcaccctgttcgtggtgctggccctggccatctacaccggcgtgaccgtgagcttcctgggcagaagattcggcgactggagattcagctggagctacatcctgggctgggtggccgtgctgatgaccttcttcgccggcatcttctacatgtgcgcctacagagtgcacgagtgcagaagactgagcacccccagatag

SEQ ID NO: 61542 - protein, 463 aa, Artificial Sequence
  derived and/or modified sequence
MHRSFLQARRSRNTTRPALLRLSDYLLTNYRKGVRPVRDWRKPTTVSIDVIVYAILNVDEKNQVLTTYIWYRQYWTDEFLQWNPEDFDNITKLSIPTDSIWVPDILINEFVDVGKSPNIPYVYIRHQGEVQNYKPLQVVTACSLDIYNFPFDVQNCSLTFTSWLHTIQDINISLWRLPEKVKSDRSVFMNQGEWELLGVLPYFREFSMESSNYYAEMKFYVVIRRRPLFYVVSLLLPSIFLMVMDIVGFYLPPNSGERVSFKITLLLGYSVFLIIVSDTLPATAIGTPLIGVYFVVCMALLVISLAETIFIVRLVHKQDLQQPVPAWLRHLVLERIAWLLCLREQSTSQRPPATSQATKTDDCSAMGNHCSHMGGPQDFEKSPRDRCSPPPPPREASLAVCGLLQELSSIRQFLEKRDEIREVARDWLRVGSVLDKLLFHIYLLAVLAYSITLVMLWSIWQYA

SEQ ID NO: 61543 - DNA, 1392 bp, Artificial Sequence
  derived and/or modified sequence
atgcacagaagcttcctgcaggccagaagaagcagaaacaccaccagacccgccctgctgagactgagcgactacctgctgaccaactacagaaagggcgtgagacccgtgagagactggagaaagcccaccaccgtgagcatcgacgtgatcgtgtacgccatcctgaacgtggacgagaagaaccaggtgctgaccacctacatctggtacagacagtactggaccgacgagttcctgcagtggaaccccgaggacttcgacaacatcaccaagctgagcatccccaccgacagcatctgggtgcccgacatcctgatcaacgagttcgtggacgtgggcaagagccccaacatcccctacgtgtacatcagacaccagggcgaggtgcagaactacaagcccctgcaggtggtgaccgcctgcagcctggacatctacaacttccccttcgacgtgcagaactgcagcctgaccttcaccagctggctgcacaccatccaggacatcaacatcagcctgtggagactgcccgagaaggtgaagagcgacagaagcgtgttcatgaaccagggcgagtgggagctgctgggcgtgctgccctacttcagagagttcagcatggagagcagcaactactacgccgagatgaagttctacgtggtgatcagaagaagacccctgttctacgtggtgagcctgctgctgcccagcatcttcctgatggtgatggacatcgtgggcttctacctgccccccaacagcggcgagagagtgagcttcaagatcaccctgctgctgggctacagcgtgttcctgatcatcgtgagcgacaccctgcccgccaccgccatcggcacccccctgatcggcgtgtacttcgtggtgtgcatggccctgctggtgatcagcctggccgagaccatcttcatcgtgagactggtgcacaagcaggacctgcagcagcccgtgcccgcctggctgagacacctggtgctggagagaatcgcctggctgctgtgcctgagagagcagagcaccagccagagaccccccgccaccagccaggccaccaagaccgacgactgcagcgccatgggcaaccactgcagccacatgggcggcccccaggacttcgagaagagccccagagacagatgcagccccccccccccccccagagaggccagcctggccgtgtgcggcctgctgcaggagctgagcagcatcagacagttcctggagaagagagacgagatcagagaggtggccagagactggctgagagtgggcagcgtgctggacaagctgctgttccacatctacctgctggccgtgctggcctacagcatcaccctggtgatgctgtggagcatctggcagtacgcctag

SEQ ID NO: 61544 - DNA, 669 bp, Artificial Sequence
  derived and/or modified sequence
atggtgatggacatcgtgggcttctacctgccccccaacagcggcgagagagtgagcttcaagatcaccctgctgctgggctacagcgtgttcctgatcatcgtgagcgacaccctgcccgccaccgccatcggcacccccctgatcggcgtgtacttcgtggtgtgcatggccctgctggtgatcagcctggccgagaccatcttcatcgtgagactggtgcacaagcaggacctgcagcagcccgtgcccgcctggctgagacacctggtgctggagagaatcgcctggctgctgtgcctgagagagcagagcaccagccagagaccccccgccaccagccaggccaccaagaccgacgactgcagcgccatgggcaaccactgcagccacatgggcggcccccaggacttcgagaagagccccagagacagatgcagccccccccccccccccagagaggccagcctggccgtgtgcggcctgctgcaggagctgagcagcatcagacagttcctggagaagagagacgagatcagagaggtggccagagactggctgagagtgggcagcgtgctggacaagctgctgttccacatctacctgctggccgtgctggcctacagcatcaccctggtgatgctgtggagcatctggcagtacgcctag

SEQ ID NO: 61545 - DNA, 1994 bp, Artificial Sequence
  derived and/or modified sequence
agctgtcttgtgccacttgctcttccaagccagatctctgctttcctgtcaatgaatgcataggtcctttctacaagccaggaggagccgaaacaccaccaggcccgctctgctgaggctgtcggattaccttttgaccaactacaggaagggtgtgcgccccgtgagggactggaggaagccaaccaccgtatccattgacgtcattgtctatgccatcctcaacgtggatgagaagaatcaggtgctgaccacctacatctggtaccggcagtactggactgatgagtttctccagtggaaccctgaggactttgacaacatcaccaagttgtccatccccacggacagcatctgggtcccggacattctcatcaatgagttcgtggatgtggggaagtctccaaatatcccgtacgtgtatattcggcatcaaggcgaagttcagaactacaagccccttcaggtggtgactgcctgtagcctcgacatctacaacttccccttcgatgtccagaactgctcgctgaccttcaccagttggctgcacaccatccaggacatcaacatctctttgtggcgcttgccagaaaaggtgaaatccgacaggagtgtcttcatgaaccagggagagtgggagttgctgggggtgctgccctactttcgggagttcagcatggaaagcagtaactactatgcagaaatgaagttctatgtggtcatccgccggcggcccctcttctatgtggtcagcctgctactgcccagcatcttcctcatggtcatggacatcgtgggcttctacctgccccccaacagtggcgagagggtctctttcaagattacactcctcctgggctactcggtcttcctgatcatcgtttctgacacgctgccggccactgccatcggcactcctctcattggtgtctactttgtggtgtgcatggctctgctggtgataagtttggccgagaccatcttcattgtgcggctggtgcacaagcaagacctgcagcagcccgtgcctgcttggctgcgtcacctggttctggagagaatcgcctggctactttgcctgagggagcagtcaacttcccagaggcccccagccacctcccaagccaccaagactgatgactgctcagccatgggaaaccactgcagccacatgggaggaccccaggacttcgagaagagcccgagggacagatgtagccctcccccaccacctcgggaggcctcgctggcggtgtgtgggctgctgcaggagctgtcctccatccggcaattcctggaaaagcgggatgagatccgagaggtggcccgagactggctgcgcgtgggctccgtgctggacaagctgctattccacatttacctgctagcggtgctggcctacagcatcaccctggttatgctctggtccatctggcagtacgcttgagtgggtacagcccagtggaggagggggtacagtcctggttaggtggggacagaggatttctgcttaggcccctcaggacccagggaatgccagggacattttcaagacacagacaaagtcccgtgccctgtttccaatgccaattcatctcagcaatcacaagccaaggtctgaacccttccaccaaaaactgggtgttcaaggcccttacacccttgtcccacccccagcagctcaccatggctttaaaacatgctgtcttagatcaggagaaactcgggcactccctaagtccactctagttgtggacttttccccattgaccctcacctgaataagggactttggaattctgcttctctttcacaactttgcttttaggttgaaggcaaaaccaactctctactacacaggcctgataactctgtacgaggcttctctaacccctagtgtcttttttttcttcacctcacttgtggcagcttccctgaacactcatcccccatcagatgatgggagtgggaagaataaaatgcagtgaaaccct

SEQ ID NO: 61546 - DNA, 1385 bp, Artificial Sequence
  derived and/or modified sequence
ctgagcactcggaggcactcctatgcttggaaagctcgctatgctgctgtgggtccagcaggcgctgctcgccttgctcctccccacactcctggcacagggagaagccaggaggagccgaaacaccaccaggcccgctctgctgaggctgtcggattaccttttgaccaactacaggaagggtgtgcgccccgtgagggactggaggaagccaaccaccgtatccattgacgtcattgtctatgccatcctcaacgtggatgagaagaatcaggtgctgaccacctacatctggtaccggcagtactggactgatgagtttctccagtggaaccctgaggactttgacaacatcaccaagttgtccatccccacggacagcatctgggtcccggacattctcatcaatgagttcgtggatgtggggaagtctccaaatatcccgtacgtgtatattcggcatcaaggcgaagttcagaactacaagccccttcaggtggtgactgcctgtagcctcgacatctacaacttccccttcgatgtccagaactgctcgctgaccttcaccagttggctgcacaccagtggtcatccgccggcggcccctcttctatgtggtcagcctgctactgcccagcatcttcctcatggtcatggacatcgtgggcttctacctgccccccaacagtggcgagagggtctctttcaagattacactcctcctgggctactcggtcttcctgatcatcgtttctgacacgctgccggccactgccatcggcactcctctcattggtgtctactttgtggtgtgcatggctctgctggtgataagtttggccgagaccatcttcattgtgcggctggtgcacaagcaagacctgcagcagcccgtgcctgcttggctgcgtcacctggttctggagagaatcgcctggctactttgcctgagggagcagtcaacttcccagaggcccccagccacctcccaagccaccaagactgatgactgctcagccatgggaaaccactgcagccacatgggaggaccccaggacttcgagaagagcccgagggacagatgtagccctcccccaccacctcgggaggcctcgctggcggtgtgtgggctgctgcaggagctgtcctccatccggcaattcctggaaaagcgggatgagatccgagaggtggcccgagactggctgcgcgtgggctccgtgctggacaagctgctattccacatttacctgctagcggtgctggcctacagcatcaccctggttatgctctggtccatctggcagtacgcttgagtgggtacagcccagtggaggagggggtacagtcctggttaggtggggacagaggatttctgcttaggc

SEQ ID NO: 61547 - DNA, 1392 bp, Artificial Sequence
  derived and/or modified sequence
atgcacaggagtttcctccaggcccggcgctctcgcaacaccacgagacctgccctgctgcggctgagcgattacctgttgacaaattaccgcaagggggtgcgccccgttcgcgactggcggaagccaacgacagtgtccatcgatgtgattgtgtatgcgatactcaacgtggacgagaagaatcaggtcctgactacctacatctggtaccggcagtattggactgacgagttcttgcagtggaacccagaggacttcgataacattaccaagctgtccatacccacagactctatttgggtgcccgatattttgattaacgagttcgtggacgtcggaaaatcgcccaatatcccatatgtttatatcaggcatcaaggggaggtacagaattacaagcctctgcaggtagtcacagcctgttcactcgacatatacaactttcctttcgatgtgcagaactgtagtcttacctttacttcctggcttcacactatccaggacataaacattagtctctggagattacccgaaaaggtcaagtcagaccgctcagtcttcatgaatcagggggagtgggaactcttaggcgtgcttccctatttcagggagttttccatggaatcgagcaattactacgctgaaatgaaattctatgtagttatcaggagacgacctctattttatgtcgtaagcctgctgctgccatccatctttctgatggtgatggacatcgtcggattctacctcccccccaactctggcgagcgagtgtcctttaaaattacattactccttggctacagcgtattcttgatcatcgtatcggacaccttacccgccacagccattgggacaccgcttattggagtctactttgtcgtatgcatggccctactagtaatcagtctggctgagacaatctttattgtaagattggtgcacaagcaagacttgcagcagcccgtgcccgcatggcttaggcacttagtgctggagaggatcgcttggttgctgtgcctccgggagcaaagcacttcccagcgcccccccgctacaagccaggcaactaaaactgacgattgctctgccatggggaatcactgttctcatatggggggcccacaggactttgaaaagtctcctcgcgatcgctgcagtccccctcctcccccccgggaagcttccttggctgtgtgcgggctgttgcaggagttgtcaagcataagacagttcctggaaaagcgcgatgaaatcagggaggtggcccgggattggctacgtgtcggcagcgtcttggataaactcctcttccacatctacctgttggcggtccttgcgtactcaattacactggtcatgctctggagcatttggcagtacgcttag

SEQ ID NO: 61548 - DNA, 669 bp, Artificial Sequence
  derived and/or modified sequence
atggtgatggatatcgtggggttttatctcccccccaactcaggagaaagggtgagctttaaaatcaccctgctgctgggctacagtgtgtttctgattattgtgtccgatacactcccagccaccgccattggtactccgctcattggggtgtatttcgtcgtatgcatggccctgcttgtgataagccttgccgaaacaattttcattgtgagactggttcataaacaagatcttcagcagccggttcccgcctggctcaggcatcttgtcctggaaaggattgcctggctgctgtgtctaagggaacagtctacctcccagagaccgcctgccacttctcaggctactaagaccgacgactgctcagcaatgggtaatcattgtagccacatggggggaccacaagacttcgaaaaatcccccagagaccgctgtagcccccctccaccgcctcgcgaggcttcactggctgtttgcggcctgctgcaggagctgtctagcatccggcagtttttggagaagagagatgagataagggaggtggcccgcgattggctgagggtggggtcagttctcgataaactgcttttccatatctacctgctagccgtgctggcatactccattacactagtaatgctgtggtccatttggcagtacgcgtag

SEQ ID NO: 61549 - DNA, 1392 bp, Artificial Sequence
  derived and/or modified sequence
atgcacaggagcttcctgcaggcccggcgcagcaggaacaccaccaggcctgccctgctgcggctgagtgactacctgctgaccaactacaggaagggcgtgcggcctgtgcgggactggaggaagcccaccaccgtgtccattgatgtgattgtgtatgccatcctgaatgtggatgagaagaaccaggtgctgaccacctacatctggtaccggcagtactggacagatgagttcctgcagtggaacccagaagattttgacaacatcaccaagctgagcatccccacagacagcatctgggtgcctgacatcctgatcaatgaatttgtggatgtgggcaagagccccaacatcccctacgtgtacatccgccaccagggcgaggtgcagaactacaagcccctgcaggtggtgacagcctgcagcctggacatctacaacttcccctttgatgtgcagaactgcagcctgaccttcacctcctggctgcacaccatccaggacatcaacatcagcctgtggaggctgcctgagaaggtgaagagtgacaggagcgtcttcatgaaccagggcgagtgggagctgctgggcgtgctgccctacttccgggagttctccatggagagcagcaactactatgcagagatgaagttctacgtggtgatcagaagaagacccctcttctacgtggtgtccctgctgctgcccagcatcttcctgatggtgatggacatcgtgggcttctacctgccccccaacagcggggagcgggtgtccttcaagatcaccctgctgctgggctacagcgtcttcctgatcatcgtgtctgacaccctgcctgccacagccatcggcacccccctcatcggcgtgtactttgtggtgtgcatggccctgctggtgatcagcctggccgagaccatcttcatcgtgcggctggtgcacaagcaggacctgcagcagcctgtgcctgcctggctgcggcacctggtgctggagcgcatcgcctggctgctgtgcctgcgggagcagagcaccagccagaggcccccagccaccagccaggccaccaagacagatgactgcagcgccatgggcaaccactgcagccacatgggcggcccccaggactttgagaagagcccccgggaccgctgcagccccccacctccaccccgggaggccagcctggccgtgtgtggcctgctgcaggagctgagcagcatccggcagttcctggagaagagagatgagatccgggaggtggcccgggactggctgcgggtgggctctgtgctggacaagctgctcttccacatctacctgctggccgtgctggcctacagcatcaccctggtgatgctgtggagcatctggcagtatgcctag

SEQ ID NO: 61550 - DNA, 669 bp, Artificial Sequence
  derived and/or modified sequence
atggtgatggacatcgtgggcttctacctgccccccaacagcggggagcgggtgtccttcaagatcaccctgctgctgggctacagcgtcttcctgatcatcgtgtctgacaccctgcctgccacagccatcggcacccccctgattggagtgtactttgtggtgtgcatggccctgctggtgatcagcctggccgagaccatcttcatcgtgcggctggtgcacaagcaggacctgcagcagcctgtgcctgcctggctgcggcacctggtgctggagagaattgcctggctgctgtgcctgcgggagcagagcaccagccagaggcccccagccaccagccaggccaccaagacagatgactgcagcgccatgggcaaccactgcagccacatgggcggcccccaggactttgagaagagcccccgggaccgctgcagccccccacctccaccccgggaggccagcctggccgtgtgtggcctgctgcaggagctgagcagcatccggcagttcctggagaagagagatgagatccgggaggtggcccgggactggctgcgggtgggctctgtgctggacaagctgctcttccacatctacctgctggccgtgctggcctacagcatcaccctggtgatgctgtggagcatctggcagtatgcctag

SEQ ID NO: 61551 - DNA, 1392 bp, Artificial Sequence
  derived and/or modified sequence
atgcaccggagcttcctgcaggcccggcggagccggaacaccacccgtcctgccctactgcgtctgtccgactacctactcactaactacagaaaaggcgttcgacctgttcgagattggaggaagccgacaactgtcagtatcgatgtgatagtatacgcgattctgaacgtagacgagaaaaaccaagtgttgaccacctacatctggtacaggcaatattggactgacgaattcctccagtggaaccccgaggacttcgataatatcactaaactgtcgatcccgacggactccatttgggtcccagatatcctaataaatgaattcgtggacgtgggaaagtcccccaacataccttatgtttacattagacatcagggcgaggtgcaaaactataaaccgctgcaggttgtcaccgcctgctccctagacatatacaatttcccttttgatgtgcagaactgcagcctaacatttaccagctggctccataccatccaggatattaacatttccctctggagactaccggaaaaagtaaaatcagataggagtgtttttatgaaccagggggagtgggagctcctcggagttctcccgtattttagagagtttagtatggagtcaagtaattactacgccgaaatgaaattttacgtggttattagacgcaggccactgttctacgtggtgtcccttctactgccatctatttttctgatggtcatggatatcgtgggattttaccttccccccaactccggagagagggtctcctttaagataacgcttcttttaggatatagcgtattcttgataatcgtgtccgatactttgcctgcaaccgctatcggtacgccactgatcggagtctatttcgtggtgtgcatggcgctgctggtgatcagtctggccgagaccatctttatagtccgcctcgtgcacaagcaggacctccaacagcctgtgcccgcatggcttcgtcacttagtgctggagcgaattgcgtggttactctgtctgcgtgagcagtctacaagccagaggccccctgccaccagtcaggccaccaaaactgacgattgtagcgcaatggggaaccattgttctcacatgggcggtccccaagatttcgaaaagagcccgcgggatcgctgtagccctccccccccaccacgagaagccagccttgcagtgtgtggcctgcttcaggaactttcgtcaatccgtcagttcttagaaaagcgtgacgagatccgggaggtcgccagagactggctcagggtcggctctgtactcgataaactgttatttcacatttacctgcttgccgtgcttgcctacagcatcaccctcgtcatgctctggtcaatatggcagtacgcgtag

SEQ ID NO: 61552 - DNA, 669 bp, Artificial Sequence
  derived and/or modified sequence
atggtgatggacatcgtgggcttctacctgccccccaacagcggcgaacgagtgtcctttaaaatcactctgttgttgggctattctgtcttcctgatcattgtcagtgatactctgcccgccactgccatcgggacccccttgatcggggtctactttgtggtgtgtatggccttattggtcatatcccttgccgagacaatttttattgttaggctggttcataagcaggacctgcaacagccagttcctgcttggcttagacatctcgttctggaaagaatcgcctggctgctctgtctccgcgaacagtccacttcacaacgcccacccgccacttcacaggccaccaaaactgatgattgctccgccatgggaaaccattgcagtcacatggggggcccacaggattttgaaaagtcacctcgtgaccggtgctctcctcctccacccccacgcgaagcttctctggcggtgtgtggacttctccaggagctttccagtatcagacagtttctggagaagcgggacgaaattcgagaagttgctcgcgattggctgagagtcggaagcgtgttagataagctactcttccacatttatctgctcgcggtactggcctacagcattacactggtaatgctgtggagtatctggcagtacgcatag

SEQ ID NO: 61553 - DNA, 1392 bp, Artificial Sequence
  derived and/or modified sequence
atgcatcggtcattcctccaggctcgaagatctcgcaacacaactaggcctgctttgcttcgtctgtcagactatctgctaaccaactatcggaaaggggttcggccagttagagactggagaaagccaaccacagtgtcgatcgatgtcattgtatacgccattctgaacgtggacgagaagaaccaggtcctaaccacctacatctggtatcgccagtactggaccgacgaatttctccagtggaaccccgaagacttcgataatattacgaagctctcaattcccacagacagcatctgggtgccagacatcctgattaacgaattcgtggatgtcgggaagtccccgaatatcccttatgtatacatcaggcaccagggcgaggttcagaactataagccccttcaggttgtgaccgcctgcagtctagatatctataatttcccgttcgacgtacagaactgctcgctgaccttcacttcatggctccacactatccaggatataaacatcagtctatggaggctccctgagaaggtgaagtcagacaggagtgtgtttatgaaccagggcgaatgggagctccttggtgtgctaccttactttcgggaatttagtatggaaagcagtaattactacgccgagatgaagttttacgtggtcatccgtcgcagacctctgttctacgtggtctctctccttctgccgtcaatctttctcatggtaatggatattgtgggcttttacttgccgcctaacagcggagagcgagtgtcatttaagatcactctgttgttggggtattcagtttttctaatcatcgtgtctgatacactgcccgctacagctattggcacgccattaatcggggtttacttcgtcgtctgtatggcactgctagtaattagcctggccgaaactatcttcatagttcggttagtgcacaaacaagatttacagcagcccgtacctgcctggctgagacatcttgtcctggagcggatagcttggttgctgtgtctccgggagcagagcaccagtcaacggcctccagcaactagtcaagctacaaagactgatgattgcagtgctatgggaaaccattgcagccatatgggaggaccacaggattttgagaaaagccctagagaccgttgcagcccgcctccaccaccgcgtgaagcaagtctggccgtatgtggcctgctgcaagagctctctagcatcagacaatttttagagaagagagacgagatcagggaggtggcgagagactggctccgcgtcggcagtgttctggataagctcctgttccatatctacttgctggcagtcctagcttatagcatcaccctggttatgctctggagcatctggcagtatgcctag

SEQ ID NO: 61554 - DNA, 669 bp, Artificial Sequence
  derived and/or modified sequence
atggtgatggatatagtcgggttctaccttcccccaaactctggggaacgtgtctcctttaaaatcactctgctccttggatacagtgtgtttctgatcatagtgtctgacaccctaccagctacggcaattggtacacctctgatcggagtttatttcgtggtgtgcatggcactcctagttatcagtctggcggaaaccatcttcatagtgaggttagtgcataagcaggacctgcagcaacctgttcccgcatggctacgtcatctggtgctcgagcgcatagcttggctgctctgtctcagagagcagagcacctcccagaggccgcctgccacatcacaagctacgaaaacagatgactgcagtgccatggggaatcattgttcccatatgggaggccctcaggacttcgagaagagtccccgagatcggtgttcaccacctccccctccgagagaggcttctctcgcggtgtgcgggctgcttcaagagctgtcgtctatccgccagtttttggaaaaacgcgatgaaattcgggaagtagctagagattggctgcgggtcggtagtgtgctcgataaactcctgtttcacatctaccttcttgcagtgctagcatactccatcaccctcgtgatgctgtggtcaatctggcaatatgcgtag

SEQ ID NO: 61555 - protein, 562 aa, Artificial Sequence
  derived and/or modified sequence
MCVCPGPRRIGIPVRSSSLPLFSDAMPAPTQLFFPLIRNCELSRIYGTACYCHHKHLCCSSSYIPQSRLRYTPHPAYATFCRPKENWWQYTQGRRYASTPQKFYLTPPQVNSILKANEYSFKVPEFDGKNVSSILGFDSNQLPANAPIEDRRSAATCLQTRGMLLGVFDGHAGCACSQAVSERLFYYIAVSLLPHETLLEIENAVESGRALLPILQWHKHPNDYFSKEASKLYFNSLRTYWQELIDLNTGESTDIDVKEALINAFKRLDNDISLEAQVGDPNSFLNYLVLRVAFSGATACVAHVDGVDLHVANTGDSRAMLGVQEEDGSWSAVTLSNDHNAQNERELERLKLEHPKSEAKSVVKQDRLLGLLMPFRAFGDVKFKWSIDLQKRVIESGPDQLNDNEYTKFIPPNYHTPPYLTAEPEVTYHRLRPQDKFLVLATDGLWETMHRQDVVRIVGEYLTGMHHQQPIAVGGYKVTLGQMHGLLTERRTKMSSVFEDQNAATHLIRHAVGNNEFGTVDHERLSKMLSLPEELARMYRDDITIIVVQFNSHVVGAYQNQE

SEQ ID NO: 61556 - DNA, 1689 bp, Artificial Sequence
  derived and/or modified sequence
atgtgcgtctgcccaggccctcgtcgtatcggcatccccgttagaagctcctcactgcctctgttcagcgatgctatgccagcccctacacagctgtttttcccactgatacgtaattgtgagctgtcaaggatttacggaaccgcctgttattgccaccataaacatctgtgctgttcgtcgagttacatccctcagtccaggcttcgatacaccccccatcccgcatatgccaccttctgtcgaccaaaggagaattggtggcagtacacacaggggaggagatacgcctccaccccgcagaagttttacctaacaccacctcaggtgaactccatcctcaaggccaacgagtatagctttaaggtccctgagtttgatggcaagaacgtaagctctattttgggtttcgattccaatcaactgccagcaaacgcccctatcgaggaccgcagaagtgccgcgacatgccttcagacccgcggcatgttgcttggggtcttcgacgggcacgctggctgcgcctgttcccaagctgtcagcgagcgactgttctattacattgctgtgagtctcctgccccacgagaccctgcttgagatagagaatgctgtcgaatccggacgcgctttgttgcccattctgcagtggcacaagcatcccaatgattacttttctaaggaagcatccaagctgtactttaactccctacgtacgtattggcaggagttaatcgaccttaacacaggtgagagtactgacattgacgtgaaagaagcactgattaacgccttcaaaaggctggataacgatatcagccttgaggcccaggtcggagatccgaattctttccttaactatcttgtcttacgtgtggcttttagcggtgctaccgcctgtgtggcccatgtggatggcgtggatttacacgtcgccaataccggagactctcgggccatgttgggagttcaagaggaagacgggtcctggtctgcagtgacgctgagcaacgatcacaatgctcagaatgaaagggaacttgaacgcctcaaactggaacacccgaaatctgaggcgaagagcgtggtgaaacaagacaggctgctgggtctgctgatgcccttcagggccttcggcgatgtcaaatttaagtggtccatcgatttgcaaaagcgtgtgatcgaatcaggcccagaccagctgaatgataatgagtataccaaattcataccccccaactatcacacgcccccctacttgactgcggagcccgaggtgacttaccatcgcctgcgaccccaagataagtttctggtcctggctaccgacggactttgggaaacaatgcaccgccaggatgtcgtgaggatcgtgggagaatacctgaccggcatgcaccaccagcagcctatcgccgtgggcgggtataaggtgactcttggccagatgcatggactgctcacggaacgcagaacgaaaatgagcagcgttttcgaagatcagaatgcagcaacacacttgatccgtcacgcagttggcaataacgagtttggcacagttgaccacgaacgtctctcgaaaatgctttctctgccagaggagctcgccaggatgtaccgggacgatatcacgatcatcgtggtgcagtttaattctcatgttgtgggcgcctaccagaaccaagagtag

SEQ ID NO: 61557 - DNA, 1689 bp, Artificial Sequence
  derived and/or modified sequence
atgtgtgtgtgccccggcccccggcgcatcggcatccctgtgcgcagcagcagcctgcccctcttcagtgatgccatgcctgcccccacccagctgttcttccccctcatccggaactgtgagctgagccgcatctacggcacagcctgctactgccaccacaagcacctgtgctgcagcagcagctacatcccccagagccggctgcgctacaccccccacccagcctatgccaccttctgccggcccaaggagaactggtggcagtacacccagggccgccgctatgccagcaccccccagaagttctacctgaccccaccccaggtgaacagcatcctgaaggccaatgagtacagcttcaaggtgcctgagtttgatggcaagaatgtgagcagcatcctgggctttgacagcaaccagctgcctgccaatgcccccattgaagatagaagatctgctgccacctgcctgcagacccggggcatgctgctgggcgtgtttgatggccacgccggctgtgcctgcagccaggccgtgtctgagcggctcttctactacatcgctgtgtccctgctgccccatgagaccctgctggagattgaaaatgctgtggagagcggccgggccctgctgcccatcctgcagtggcacaagcaccccaatgactacttcagcaaggaggccagcaagctgtacttcaacagcctgcggacctactggcaggagctgattgacctgaacacaggagagagcacagacattgatgtgaaggaggccctgatcaatgccttcaagaggctggacaatgacatcagcctggaggcccaggtgggggaccccaacagcttcctgaactacctggtgctgcgggtggccttcagcggggccacagcctgtgtggcccacgtggatggagtggacctgcacgtggccaacacaggagacagccgggccatgctgggcgtgcaggaggaggatggctcctggagcgctgtgaccctgagcaatgaccacaatgcccagaatgaaagagagctggagcggctgaagctggagcaccccaagtctgaggccaagtctgtggtgaagcaggaccggctgctgggcctgctgatgcccttccgggcctttggagatgtgaagttcaagtggagcattgacctgcagaagagggtcatcgagagcggccctgaccagctgaatgacaatgagtacaccaagttcatcccccccaactaccacaccccaccctacctgacagctgagcctgaggtgacctaccaccggctgcggccccaggacaagttcctggtgctggccacagatggcctgtgggagaccatgcaccggcaggatgtggtgagaattgtgggggagtacctgaccggcatgcaccaccagcagcccatcgctgtgggcggctacaaggtgaccctgggccagatgcacggcctgctgacagagaggaggaccaagatgagctctgtgtttgaggaccagaatgctgccacccacctgatcagacatgctgtgggcaacaatgaatttggaacagtggaccacgagcggctgagcaagatgctgagcctgcctgaggagctggccaggatgtacagagatgacatcaccatcatcgtggtgcagttcaacagccacgtggtgggcgcctaccagaaccaggagtag

SEQ ID NO: 61558 - DNA, 1689 bp, Artificial Sequence
  derived and/or modified sequence
atgtgcgtgtgccccggcccccggcggatcggcatccccgtgcggagctccagtctcccattgttctccgacgccatgcctgcccccacacaactcttttttcccctgatccgaaattgcgaattgtctcgaatttacggaactgcctgctattgccatcataagcatctctgctgttcctccagttacattcctcaaagccggttgcggtacacacctcaccccgcatacgccactttttgtagaccaaaggagaactggtggcaatatacccagggacggcgatacgccagtactccccagaagttttacctgacccccccgcaggttaactccattctgaaagccaatgaatacagctttaaagtacccgagtttgatggcaagaacgtcagctctatactgggatttgatagtaatcagctccccgcaaacgctcctattgaagaccgacgctccgccgccacctgccttcaaacccgtggaatgctcctgggcgtcttcgacggacacgctgggtgcgcttgctcacaggccgttagcgaaagactgttttattacattgccgtctccttgttgcctcacgagacgcttctggagattgaaaatgccgtcgagagcgggcgggccctgctcccaatcttacagtggcacaaacatccaaacgactacttttccaaggaggcctccaaactctattttaattctctgagaacgtattggcaagagctgatagacctcaacacaggggagtctactgacatcgatgtgaaggaggctttaattaacgcttttaaacgcttagacaatgatataagcctcgaagcccaggtgggtgatccaaattcctttctgaattacctggtcctgcgcgtggccttctctggcgccactgcttgcgtagcacacgttgatggggtggatctacatgtggcgaatacaggggatagccgggctatgctgggggttcaggaagaagatgggagctggtctgctgtgaccctctccaacgaccacaacgctcaaaacgaacgcgagctggagcgccttaaactggagcaccctaaatctgaggctaaatcagtcgttaagcaggatcgcctcttgggcctcctcatgccgtttcgggcattcggggacgtcaagtttaaatggtcgatagacctccagaagagggtcatcgagagcggccctgaccagctcaacgacaatgagtataccaagtttatacctcctaactatcacaccccgccctatttgaccgccgaacccgaagtgacttaccatcggctgcgcccccaggacaaatttctagtccttgctactgatggtctttgggaaacaatgcacaggcaagacgttgtgagaattgtcggagagtacctgacaggtatgcatcatcaacagcccatagccgtagggggttacaaggtgaccttaggccagatgcacggcctgctgaccgagagacgaacaaaaatgagcagtgtgtttgaggaccagaacgcagctacacaccttatccgccacgcagtaggcaacaatgagttcgggaccgtcgatcatgaaaggcttagtaagatgttatcacttcccgaagagctagctcggatgtaccgggatgatataactatcatagttgtccagtttaatagtcatgtcgtgggcgcgtatcagaatcaagagtag

SEQ ID NO: 61559 - DNA, 1689 bp, Artificial Sequence
  derived and/or modified sequence
atgtgtgtctgtccaggacccaggcggattggcatccctgtgagatccagctccttgccactgttctccgatgccatgccggctccaactcagctattcttccccttgattaggaattgcgagctgtcccgcatttatggcactgcctgttattgccaccacaaacacctgtgttgctcatcctcttatatacctcaatccagattgagatacacaccccatccggcttacgccaccttctgcaggccgaaagagaattggtggcagtatacccaaggtcggagatatgccagcactcctcaaaaattctatctaactcctcctcaagtaaattcaatcctgaaagcgaatgaatactcttttaaggtgcccgagtttgatggaaagaacgtatcttcaatcctcggctttgacagcaatcaactccccgcaaatgcccctatcgaggatcgcaggtccgctgctacgtgcctgcaaaccagggggatgcttttgggtgtgtttgacggacatgctgggtgtgcctgctcacaggctgtgagtgagaggctgttttattatatcgccgtgtcgctgctgccccatgagaccctgctagaaatcgagaatgcagtcgaatcagggagggccctccttcccatcctacagtggcacaaacaccctaatgactacttttccaaggaagcttctaagttgtactttaactctctgaggacgtattggcaggaacttatcgatctgaacaccggagaatcaaccgacattgacgtcaaggaagcactgattaacgcatttaagcgtctggataatgacatttccttagaggcccaagtgggcgatcctaacagttttctgaattaccttgtacttcgcgtcgcattctccggagccacagcctgtgtggcccacgtcgacggcgtcgacctgcatgtcgccaacactggtgactcccgagcaatgctgggagtgcaagaagaggatggctcctggtcggctgtgactttgtctaacgatcataatgcccagaatgaacgcgaactagaacggctgaagttagagcatcctaagagtgaagctaagtccgtggtgaagcaggatagactactcgggctgctcatgccctttcgggcatttggcgatgtgaaatttaaatggagcattgatttacagaagagagtgattgagagtggcccagaccaactgaatgataatgagtatacaaaatttatcccacctaattatcacacccctccatacctaacggccgagcccgaagtgacgtaccatagactgcgaccccaagataagttcttagtgctggctacggacggcctctgggaaactatgcaccgccaagacgtcgtgagaatcgtaggcgagtatcttactggaatgcaccatcaacagccgatagcggtgggaggatacaaggttaccctggggcaaatgcatgggctgcttacggagagaaggaccaaaatgtcttccgtgtttgaggaccaaaatgccgcaacccacctgatccggcacgccgttggcaacaacgagttcggtaccgtcgaccacgagagactttctaaaatgctatctctgcctgaggaactcgcccgtatgtatcgggacgatataaccataattgtggtacagtttaatagccatgtcgtcggggcttaccagaaccaggaatag

SEQ ID NO: 61560 - DNA, 4272 bp, Artificial Sequence
  derived and/or modified sequence
actcgtcactgcgcagccaatcggcaggcgggaagcactccggcccgaacgtgcgggcggggcagggtggcggccccgcacggtaggggagcagagtgggcaggccgggggtgagggctcgcgctccgggagctgcacggggctgcgtggaaagagcgccgagcggtggcgtcgttgtcgccccctcctcgtcgggaagaatcgtttggtctcctgccgtgcccggaatcccagtcagaagttccagcctgccactgttctctgatgccatgccagcaccaactcaactgttttttcctctcatccgtaactgtgaactgagcaggatctatggcactgcatgttactgccaccacaaacatctctgttgttcctcatcgtacattcctcagagtcgactgagatacacacctcatccagcatatgctaccttttgcaggccaaaggagaactggtggcagtacacccaaggaaggagatatgcttccacaccacagaaattttacctcacacctccacaagtcaatagcatccttaaagctaatgaatacagtttcaaagtgccagaatttgacggcaaaaatgtcagttctatccttggatttgacagcaatcagctgcctgcaaatgcacccattgaggaccggagaagtgcagcaacctgcttgcagaccagagggatgcttttgggggtttttgatggccatgcaggttgtgcttgttcccaggcagtcagtgaaagactcttttattatattgctgtctctttgttaccccatgagactttgctagagattgaaaatgcagtggagagcggccgggcactgctacccattctccagtggcacaagcaccccaatgattactttagtaaggaggcatccaaattgtactttaacagcttgaggacttactggcaagagcttatagacctcaacactggtgagtcgactgatattgatgttaaggaggctctaattaatgccttcaagaggcttgataatgacatctccttggaggcgcaagttggtgatcctaattcttttctcaactacctggtgcttcgagtggcattttctggagccactgcttgtgtggcccatgtggatggtgttgaccttcatgtggccaatactggcgatagcagagccatgctgggtgtgcaggaagaggacggctcatggtcagcagtcacgctgtctaatgaccacaatgctcaaaatgaaagagaactagaacggctgaaattggaacatccaaagagtgaggccaagagtgtcgtgaaacaggatcggctgcttggcttgctgatgccatttagggcatttggagatgtaaagttcaaatggagcattgaccttcaaaagagagtgatagaatctggcccagaccagttgaatgacaatgaatataccaagtttattcctcctaattatcacacacctccttatctcactgctgagccagaggtaacttaccaccgattaaggccacaggataagtttctggtgttggctactgatgggttgtgggagactatgcataggcaggatgtggttaggattgtgggtgagtacctaactggcatgcatcaccaacagccaatagctgttggtggctacaaggtgactctgggacagatgcatggccttttaacagaaaggagaaccaaaatgtcctcggtatttgaggatcagaacgcagcaacccatctcattcgccacgctgtgggcaacaacgagtttgggactgttgatcatgagcgcctctctaaaatgcttagtcttcctgaagagcttgctcgaatgtacagagatgacattacaatcattgtagttcagttcaattctcatgttgtaggggcgtatcaaaaccaagaatagtgagtggctctttcactggcaattctcaaatgatatacatttaaagggcagattttttaaaaagatactactataataaacatttccagttggtcattctaagcatttacccttttgatactctagctagtcaggtactccaaattgactttgcagcagggtggcagggtcaggagagtctggtcctgcctagctcagatttcatggcacctgcacttgaagcaagtcacttctttatcacaggtgtcttgaaacattagcttcttttaccaacctgagaaaattaggatgacctggcaaataagatcttgaataggccaaaagcaagtatcttgctgtgtgtagtctcttggttaaagtgaagaaacagtactgttcacacctttcttcactgagattccagtgtacatgagaacatatatttattgcatgattttctagatacacagtctatgcattattcatatacatttattttagcctaaagtggttttcaaatccagttcttcaagccataaatgaccaagatccaagcaatctgaatttgtttttgtgattatttgactggaatgcttcttaagtggaataactatactccgttatccacccgatttcctaatgtaattgaaagattttctattttgccacacacttggagacaataagggtttttagttttatctactcttctattgaagttaaagaaagaaaaaaagatttttttatttgtattaatgaaaagctttagtttaaaataaggagatccagaataaaaagaagagactgatctcttcaattattgtcatctgtagccaccagcacatcactcttatgtaatccccaaaggcttggcatgccgtaagtgtgtggtgggtagactgctgccggggaatcgtacttcttatttagtaatgataagacttttcattatttttggaattttaaagatgacataaataagtttaaatatcaatttggggagtaaggtttaatattgccatcgggtattgagacaggaggaagtttctgtttttctccatttagacataggtcaattaaaatatttgggtttaaaatgactaaatgctttaaacatattgtagcttaagatatatgtgttaagatatatacatgagaaactttaaaaggtaactactgtgcatgcctgatgcttaatagaatacttagtggcatcaaatgtttgcagcagtctccataattatattcagtcccttctaatactgtatcaatgtaaatgaaataaatatattcaaattggctttttgatatgcatcaagtggcattttgttcctgtgtttaatagtgatctgtatacagctgtgcacatattgtcatcacttattctagcatcactgttaaggctgtgattatgtttgatattcacctggattttaatacaagccaatatcagcttcccattgtgtaataacttgggtgtttaggagtcttttcacattttttggggatatgaactagatgttcaagaactccttctggactgtggatactgaatcagtgtactattggctgcagaatttgtttcaattgaaaatagactcaggaagattgctgctcagaatatcatataatgtttattttttgaggtgtttttgtttttatttgtgtgtttttttttttttaagtcagcttggaacttttttcctgggtagtatttgggagagggaaaggctgtactatatatttatttctaaatgttttgactgggcatttttcttttaatgaaatatgtggactgctctagcaaaccctattttcagctactatttgaatattcttgaacaccaccactgaagagtttcatatacaccaaataatgtctcatctctatagtacagggaatataaaattggtttcctgtggtcatgatcaagatagtagtattattacacaagaaacttggtctgcagtctggaagcttgtctgctctatagaaatgaaaatgcagcatgaagttgacattgtggaaatgaaagtaattgggtattagaaatctgaaagtactgtcatctaaaagcaattgtgattttattgtaattggttgtcactgttgtacggtgtctagaattaaagaatacatgtaaactttcatggtatttagcctttcttaaatttttttaaaatttaaactttctaacctatgtattcaacttctgtatttatatttaatcagtggttcatgttatataatacacccttaactagttaaatggaatgttggtatggtacagagtaccatattgctaagaaaactgtcttataaaagatgtatatgtgtgaagacatgaaagtttaatgtacagaatggttggagaaatgcctatggtgaattaaagcttcatatctgctt

SEQ ID NO: 61561 - DNA, 4358 bp, Artificial Sequence
  derived and/or modified sequence
agagtgggcaggccgggggtgagggctcgcgctccgggagctgcacggggctgcgtggaaagagcgccgagcggtggcgtcgttgtcgccccctcctcgtcgggaagaatcgtttggtctcctgccgtgcccggttcgtattccctactccctgccacgagccgccccgtccgggatcctccacccgtccaaagttgtgagggggcgccgggcgtgctcgcggatcggcggccgcgggcgtgcggagggctggacgagccctggagcgccaggagaatgtgtgtgtgtcccgggcccagacgaattggaatcccagtcagaagttccagcctgccactgttctctgatgccatgccagcaccaactcaactgttttttcctctcatccgtaactgtgaactgagcaggatctatggcactgcatgttactgccaccacaaacatctctgttgttcctcatcgtacattcctcagagtcgactgagatacacacctcatccagcatatgctaccttttgcaggccaaaggagaactggtggcagtacacccaaggaaggagatatgcttccacaccacagaaattttacctcacacctccacaagtcaatagcatccttaaagctaatgaatacagtttcaaagtgccagaatttgacggcaaaaatgtcagttctatccttggatttgacagcaatcagctgcctgcaaatgcacccattgaggaccggagaagtgcagcaacctgcttgcagaccagagggatgcttttgggggtttttgatggccatgcaggttgtgcttgttcccaggcagtcagtgaaagactcttttattatattgctgtctctttgttaccccatgagactttgctagagattgaaaatgcagtggagagcggccgggcactgctacccattctccagtggcacaagcaccccaatgattactttagtaaggaggcatccaaattgtactttaacagcttgaggacttactggcaagagcttatagacctcaacactggtgagtcgactgatattgatgttaaggaggctctaattaatgccttcaagaggcttgataatgacatctccttggaggcgcaagttggtgatcctaattcttttctcaactacctggtgcttcgagtggcattttctggagccactgcttgtgtggcccatgtggatggtgttgaccttcatgtggccaatactggcgatagcagagccatgctgggtgtgcaggaagaggacggctcatggtcagcagtcacgctgtctaatgaccacaatgctcaaaatgaaagagaactagaacggctgaaattggaacatccaaagagtgaggccaagagtgtcgtgaaacaggatcggctgcttggcttgctgatgccatttagggcatttggagatgtaaagttcaaatggagcattgaccttcaaaagagagtgatagaatctggcccagaccagttgaatgacaatgaatataccaagtttattcctcctaattatcacacacctccttatctcactgctgagccagaggtaacttaccaccgattaaggccacaggataagtttctggtgttggctactgatgggttgtgggagactatgcataggcaggatgtggttaggattgtgggtgagtacctaactggcatgcatcaccaacagccaatagctgttggtggctacaaggtgactctgggacagatgcatggccttttaacagaaaggagaaccaaaatgtcctcggtatttgaggatcagaacgcagcaacccatctcattcgccacgctgtgggcaacaacgagtttgggactgttgatcatgagcgcctctctaaaatgcttagtcttcctgaagagcttgctcgaatgtacagagatgacattacaatcattgtagttcagttcaattctcatgttgtaggggcgtatcaaaaccaagaatagtgagtggctctttcactggcaattctcaaatgatatacatttaaagggcagattttttaaaaagatactactataataaacatttccagttggtcattctaagcatttacccttttgatactctagctagtcaggtactccaaattgactttgcagcagggtggcagggtcaggagagtctggtcctgcctagctcagatttcatggcacctgcacttgaagcaagtcacttctttatcacaggtgtcttgaaacattagcttcttttaccaacctgagaaaattaggatgacctggcaaataagatcttgaataggccaaaagcaagtatcttgctgtgtgtagtctcttggttaaagtgaagaaacagtactgttcacacctttcttcactgagattccagtgtacatgagaacatatatttattgcatgattttctagatacacagtctatgcattattcatatacatttattttagcctaaagtggttttcaaatccagttcttcaagccataaatgaccaagatccaagcaatctgaatttgtttttgtgattatttgactggaatgcttcttaagtggaataactatactccgttatccacccgatttcctaatgtaattgaaagattttctattttgccacacacttggagacaataagggtttttagttttatctactcttctattgaagttaaagaaagaaaaaaagatttttttatttgtattaatgaaaagctttagtttaaaataaggagatccagaataaaaagaagagactgatctcttcaattattgtcatctgtagccaccagcacatcactcttatgtaatccccaaaggcttggcatgccgtaagtgtgtggtgggtagactgctgccggggaatcgtacttcttatttagtaatgataagacttttcattatttttggaattttaaagatgacataaataagtttaaatatcaatttggggagtaaggtttaatattgccatcgggtattgagacaggaggaagtttctgtttttctccatttagacataggtcaattaaaatatttgggtttaaaatgactaaatgctttaaacatattgtagcttaagatatatgtgttaagatatatacatgagaaactttaaaaggtaactactgtgcatgcctgatgcttaatagaatacttagtggcatcaaatgtttgcagcagtctccataattatattcagtcccttctaatactgtatcaatgtaaatgaaataaatatattcaaattggctttttgatatgcatcaagtggcattttgttcctgtgtttaatagtgatctgtatacagctgtgcacatattgtcatcacttattctagcatcactgttaaggctgtgattatgtttgatattcacctggattttaatacaagccaatatcagcttcccattgtgtaataacttgggtgtttaggagtcttttcacattttttggggatatgaactagatgttcaagaactccttctggactgtggatactgaatcagtgtactattggctgcagaatttgtttcaattgaaaatagactcaggaagattgctgctcagaatatcatataatgtttattttttgaggtgtttttgtttttatttgtgtgtttttttttttttaagtcagcttggaacttttttcctgggtagtatttgggagagggaaaggctgtactatatatttatttctaaatgttttgactgggcatttttcttttaatgaaatatgtggactgctctagcaaaccctattttcagctactatttgaatattcttgaacaccaccactgaagagtttcatatacaccaaataatgtctcatctctatagtacagggaatataaaattggtttcctgtggtcatgatcaagatagtagtattattacacaagaaacttggtctgcagtctggaagcttgtctgctctatagaaatgaaaatgcagcatgaagttgacattgtggaaatgaaagtaattgggtattagaaatctgaaagtactgtcatctaaaagcaattgtgattttattgtaattggttgtcactgttgtacggtgtctagaattaaagaatacatgtaaactttcatggtatttagcctttcttaaatttttttaaaatttaaactttctaacctatgtattcaacttctgtatttatatttaatcagtggttcatgttatataatacacccttaactagttaaatggaatgttggtatggtacagagtaccatattgctaagaaaactgtcttataaaagatgtatatgtgtgaagacatgaaagtttaatgtacagaatggttggagaaatgcctatggtgaattaaagcttcatatctgctttctg

SEQ ID NO: 61562 - DNA, 2140 bp, Artificial Sequence
  derived and/or modified sequence
attcaccgggctggagcgagacctcgcccctcctccgctcccgcctccccgccgccgcctcctctaatgagcatctctgccttgctttcaatgggccggtgctgctgtcgctgctgctgcccgcgcgggttgtggatgttgtcggctccgtgttgtgatgacaggagaatgtgtgtgtgtcccgggcccagacgaattggaatcccagtcagaagttccagcctgccactgttctctgatgccatgccagcaccaactcaactgttttttcctctcatccgtaactgtgaactgagcaggatctatggcactgcatgttactgccaccacaaacatctctgttgttcctcatcgtacattcctcagagtcgactgagatacacacctcatccagcatatgctaccttttgcaggccaaaggagaactggtggcagtacacccaaggaaggagatatgcttccacaccacagaaattttacctcacacctccacaagtcaatagcatccttaaagctaatgaatacagtttcaaagtgccagaatttgacggcaaaaatgtcagttctatccttggatttgacagcaatcagctgcctgcaaatgcacccattgaggaccggagaagtgcagcaacctgcttgcagaccagagggatgcttttgggggtttttgatggccatgcaggttgtgcttgttcccaggcagtcagtgaaagactcttttattatattgctgtctctttgttaccccatgagactttgctagagattgaaaatgcagtggagagcggccgggcactgctacccattctccagtggcacaagcaccccaatgattactttagtaaggaggcatccaaattgtactttaacagcttgaggacttactggcaagagcttatagacctcaacactggtgagtcgactgatattgatgttaaggaggctctaattaatgccttcaagaggcttgataatgacatctccttggaggcgcaagttggtgatcctaattcttttctcaactacctggtgcttcgagtggcattttctggagccactgcttgtgtggcccatgtggatggtgttgaccttcatgtggccaatactggcgatagcagagccatgctgggtgtgcaggaagaggacggctcatggtcagcagtcacgctgtctaatgaccacaatgctcaaaatgaaagagaactagaacggctgaaattggaacatccaaagagtgaggccaagagtgtcgtgaaacaggatcggctgcttggcttgctgatgccatttagggcatttggagatgtaaagttcaaatggagcattgaccttcaaaagagagtgatagaatctggcccagaccagttgaatgacaatgaatataccaagtttattcctcctaattatcacacacctccttatctcactgctgagccagaggtaacttaccaccgattaaggccacaggataagtttctggtgttggctactgatgggttgtgggagactatgcataggcaggatgtggttaggattgtgggtgagtacctaactggcatgcatcaccaacagccaatagctgttggtggctacaaggtgactctgggacagatgcatggccttttaacagaaaggagaaccaaaatgtcctcggtatttgaggatcagaacgcagcaacccatctcattcgccacgctgtgggcaacaacgagtttgggactgttgatcatgagcgcctctctaaaatgcttagtcttcctgaagagcttgctcgaatgtacagagatgacattacaatcattgtagttcagttcaattctcatgttgtaggggcgtatcaaaaccaagaatagtgagtggctctttcactggcaattctcaaatgatatacatttaaagggcagattttttaaaaagatactactataataaacatttccagttggtcattctaagcatttacccttttgatactctagctagtcaggtactccaaattgactttgcagcagggtggcagggtcaggagagtctggtcctgcctagctcagatttcatggcacctgcacttgaagcaagtcacttctttatcacaggtgtcttgaaacattagcttcttttaccaacctgagaaaa

SEQ ID NO: 61563 - DNA, 581 bp, Artificial Sequence
  derived and/or modified sequence
agagtgggcaggccgggggtgagggctcgcgctccgggagctgcacggggctgcgtggaaagagcgccgagcggtggcgtcgttgtcgccccctcctcgtcgggaagaatcgtttggtctcctgccgtgcccggttcgtattccctactccctgccacgagccgccccgtccgggatcctccacccgtccaaagttgtgagggggcgccgggcgtgctcgcggatcggcggccgcgggcgtgcggagggctggacgagccctggagcgccaggagaatgtgtgtgtgtcccgggcccagacgaattggaatcccagtcagaagttccagcctgccactgttctctgatgccatgccagcaccaactcaactgttttttcctctcatccgtaactgtgaactgagcaggatctatggcactgcatgttactgccaccacaaacatctctgttgttcctcatcgtacattcctcagagtcgactgagatacacacctcatccagcatatgctaccttttgcaggccaaaggagaactggtggcagtacacccaaggaaggagatatgcttccacaccacagaa

SEQ ID NO: 61564 - DNA, 596 bp, Artificial Sequence
  derived and/or modified sequence
aagaatcgtttggtctcctgccgtgcccggttcgtattccctactccctgccacgagccgccccgtccgggatcctccacccgtccaaagttgtgagggggcgccgggcgtgctcgcggatcggcggccgcgggcgtgcggagggctggacgagccctggagcgccaggaatcccagtcagaagttccagcctgccactgttctctgatgccatgccagcaccaactcaactgttttttcctctcatccgtaactgtgaactgagcaggatctatggcactgcatgttactgccaccacaaacatctctgttgttcctcatcgtacattcctcagagtcgactgagatacacacctcatccagcatatgctaccttttgcaggccaaaggagaactggtggcagtacacccaaggaaggagatatgcttccacaccacagaaattttacctcacacctccacaagtcaatagcatccttaaagctaatgaatacagtttcaaagtgccagaatttgacggcaaaaatgtcagttctatccttggatttgacagcaatcagctgcctgcaaatgcacccattgaggaccggagaagt

SEQ ID NO: 61565 - DNA, 341 bp, Artificial Sequence
  derived and/or modified sequence
ctcgtcactgcgcagccaatcggcaggcgggaagcactccggcccgaacgtgcgggcggggcagggtggcggccccgcacggaatcccagtcagaagttccagcctgccactgttctctgatgccatgccagcaccaactcaactgttttttcctctcatccgtaactgtgaactgagcaggatctatggcactgcatgttactgccaccacaaacatctctgttgttcctcatcgtacattcctcagagtcgactgagatacacacctcatccagcatatgctaccttttgcaggccaaaggagaactggtggcagtacacccaaggaaggagatatgct

SEQ ID NO: 61566 - DNA, 2554 bp, Artificial Sequence
  derived and/or modified sequence
acggtaggggagcagagtgggcaggccgggggtgagggctcgcgctccgggagctgcacggggctgcgtggaaagagcgccgagcggtggcgtcgttgtcgccccctcctcgtcgggaagaatcgtttggtctcctgccgtgcccggagaatgtgtgtgtgtcccgggcccagacgaattggaatcccagtcagaagttccagcctgccactgttctctgatgccatgccagcaccaactcaactgttttttcctctcatccgtaactgtgaactgagcaggatctatggcactgcatgttactgccaccacaaacatctctgttgttcctcatcgtacattcctcagagtcgactgagatacacacctcatccagcatatgctaccttttgcaggccaaaggagaactggtggcagtacacccaaggaaggagatatgcttccacaccacagaaattttacctcacacctccacaagtcaatagcatccttaaagctaatgaatacagtttcaaagtgccagaatttgacggcaaaaatgtcagttctatccttggatttgacagcaatcagctgcctgcaaatgcacccattgaggaccggagaagtgcagcaacctgcttgcagaccagagggatgcttttgggggtttttgatggccatgcaggttgtgcttgttcccaggcagtcagtgaaagactcttttattatattgctgtctctttgttaccccatgagactttgctagagattgaaaatgcagtggagagcggccgggcactgctacccattctccagtggcacaagcaccccaatgattactttagtaaggaggcatccaaattgtactttaacagcttgaggacttactggcaagagcttatagacctcaacactggtgagtcgactgatattgatgttaaggaggctctaattaatgccttcaagaggcttgataatgacatctccttggaggcgcaagttggtgatcctaattcttttctcaactacctggtgcttcgagtggcattttctggagccactgcttgtgtggcccatgtggatggtgttgaccttcatgtggccaatactggcgatagcagagccatgctgggtgtgcaggaagaggacggctcatggtcagcagtcacgctgtctaatgaccacaatgctcaaaatgaaagagaactagaacggctgaaattggaacatccaaagagtgaggccaagagtgtcgtgaaacaggatcggctgcttggcttgctgatgccatttagggcatttggagatgtaaagttcaaatggagcattgaccttcaaaagagagtgatagaatctggcccagaccagttgaatgacaatgaatataccaagtttattcctcctaattatcacacacctccttatctcactgctgagccagaggtaacttaccaccgattaaggccacaggataagtttctggtgttggctactgatgggttgtgggagactatgcataggcaggatgtggttaggattgtgggtgagtacctaactggcatgcatcaccaacagccaatagctgttggtggctacaaggtgactctgggacagatgcatggccttttaacagaaaggagaaccaaaatgtcctcggtatttgaggatcagaacgcagcaacccatctcattcgccacgctgtgggcaacaacgagtttgggactgttgatcatgagcgcctctctaaaatgcttagtcttcctgaagagcttgctcgaatgtacagagatgacattacaatcattgtagttcagttcaattctcatgttgtaggggcgtatcaaaaccaagaatagtgagtggctctttcactggcaattctcaaatgatatacatttaaagggcagattttttaaaaagatactactataataaacatttccagttggtcattctaagcatttacccttttgatactctagctagtcaggtactccaaattgactttgcagcagggtggcagggtcaggagagtctggtcctgcctagctcagatttcatggcacctgcacttgaagcaagtcacttctttatcacaggtgtcttgaaacattagcttcttttaccaacctgagaaaattaggatgacctggcaaataagatcttgaataggccaaaagcaagtatcttgctgtgtgtagtctcttggttaaagtgaagaaacagtactgttcacacctttcttcactgagattccagtgtacatgagaacatatatttattgcatgattttctagatacacagtctatgcattattcatatacatttattttagcctaaagtggttttcaaatccagttcttcaagccataaatgaccaagatccaagcaatctgaatttgtttttgtgattatttgactggaatgcttcttaagtggaataactatactccgttatccacccgatttcctaatgtaattgaaagattttctattttgccacacacttggagacaataagggtttttagttttatctactcttctattgaagttaaagaaagaaaaaaa

SEQ ID NO: 61567 - DNA, 544 bp, Artificial Sequence
  derived and/or modified sequence
aacatttgagcacatcttctggctcagtcatgtacacttaacctctggatgactttcaggaatcccagtcagaagttccagcctgccactgttctctgatgccatgccagcaccaactcaactgttttttcctctcatccgtaactgtgaactgagcaggatctatggcactgcatgttactgccaccacaaacatctctgttgttcctcatcgtacattcctcagagtcgactgagatacacacctcatccagcatatgctaccttttgcaggccaaaggagaactggtggcagtacacccaaggaaggagatatgcttccacaccacagaaattttacctcacacctccacaagtcaatagcatccttaaagctaatgaatacagtttcaaagtgccagaatttgacggcaaaaatgtcagttctatccttggatttgacagcaatcagctgcctgcaaatgcacccattgaggaccggagaagtgcagcaacctgcttgcagaccagagggatgcttttgggggtttttgatggccatgca

SEQ ID NO: 61568 - DNA, 1689 bp, Artificial Sequence
  derived and/or modified sequence
atgtgcgtgtgccccggccccagaagaatcggcatccccgtgagaagcagcagcctgcccctgttcagcgacgccatgcccgcccccacccagctgttcttccccctgatcagaaactgcgagctgagcagaatctacggcaccgcctgctactgccaccacaagcacctgtgctgcagcagcagctacatcccccagagcagactgagatacaccccccaccccgcctacgccaccttctgcagacccaaggagaactggtggcagtacacccagggcagaagatacgccagcaccccccagaagttctacctgacccccccccaggtgaacagcatcctgaaggccaacgagtacagcttcaaggtgcccgagttcgacggcaagaacgtgagcagcatcctgggcttcgacagcaaccagctgcccgccaacgcccccatcgaggacagaagaagcgccgccacctgcctgcagaccagaggcatgctgctgggcgtgttcgacggccacgccggctgcgcctgcagccaggccgtgagcgagagactgttctactacatcgccgtgagcctgctgccccacgagaccctgctggagatcgagaacgccgtggagagcggcagagccctgctgcccatcctgcagtggcacaagcaccccaacgactacttcagcaaggaggccagcaagctgtacttcaacagcctgagaacctactggcaggagctgatcgacctgaacaccggcgagagcaccgacatcgacgtgaaggaggccctgatcaacgccttcaagagactggacaacgacatcagcctggaggcccaggtgggcgaccccaacagcttcctgaactacctggtgctgagagtggccttcagcggcgccaccgcctgcgtggcccacgtggacggcgtggacctgcacgtggccaacaccggcgacagcagagccatgctgggcgtgcaggaggaggacggcagctggagcgccgtgaccctgagcaacgaccacaacgcccagaacgagagagagctggagagactgaagctggagcaccccaagagcgaggccaagagcgtggtgaagcaggacagactgctgggcctgctgatgcccttcagagccttcggcgacgtgaagttcaagtggagcatcgacctgcagaagagagtgatcgagagcggccccgaccagctgaacgacaacgagtacaccaagttcatcccccccaactaccacacccccccctacctgaccgccgagcccgaggtgacctaccacagactgagaccccaggacaagttcctggtgctggccaccgacggcctgtgggagaccatgcacagacaggacgtggtgagaatcgtgggcgagtacctgaccggcatgcaccaccagcagcccatcgccgtgggcggctacaaggtgaccctgggccagatgcacggcctgctgaccgagagaagaaccaagatgagcagcgtgttcgaggaccagaacgccgccacccacctgatcagacacgccgtgggcaacaacgagttcggcaccgtggaccacgagagactgagcaagatgctgagcctgcccgaggagctggccagaatgtacagagacgacatcaccatcatcgtggtgcagttcaacagccacgtggtgggcgcctaccagaaccaggagtag

SEQ ID NO: 61569 - protein, 125 aa, Artificial Sequence
  derived and/or modified sequence
MRTAIWKWHRGIYRDHYVLGSLTFLSPMQRAGTSNQWNMGKVMTLDSGDEVTFHKTWPTETGSPYRLEEVSSHVGKVFMARNYEFLAYEASKDRRQPLERMWTCNYNQQKDQSCNHKEITSTKAE

SEQ ID NO: 61570 - DNA, 378 bp, Artificial Sequence
  derived and/or modified sequence
atgcggacagccatttggaagtggcacaggggtatctacagagatcattatgtgctcggaagtttgacttttcttagtcccatgcagcgcgccgggactagcaatcagtggaacatggggaaagtgatgaccttggattctggtgacgaggttactttccataaaacatggccaacagagacgggctccccttatcgcctcgaggaggtatccagtcatgtggggaaggtcttcatggccaggaattacgaattcctcgcatatgaagccagcaaggaccggcgccagcccctggagcgaatgtggacttgtaactataaccagcagaaggaccaatcatgcaaccacaaggagatcacttccaccaaggctgaatag

SEQ ID NO: 61571 - DNA, 378 bp, Artificial Sequence
  derived and/or modified sequence
atgaggacagccatctggaagtggcaccggggcatctacagagaccactacgtgctgggcagcctgaccttcctgagccccatgcagagagctggcaccagcaaccagtggaacatgggcaaggtgatgaccctggacagcggagatgaggtgaccttccacaagacctggcccacagaaacaggcagcccctaccgcctggaggaggtgagcagccacgtgggcaaggtgttcatggccagaaattatgagttcctggcctatgaggccagcaaggaccggcggcagcccctggagaggatgtggacctgcaactacaaccagcagaaggaccagagctgcaaccacaaggagatcaccagcaccaaggccgagtag

SEQ ID NO: 61572 - DNA, 378 bp, Artificial Sequence
  derived and/or modified sequence
atgcggaccgccatctggaagtggcaccggggcatctaccgggaccactacgtgttggggtccctgaccttcctctcccccatgcagcgtgcaggtactagcaatcagtggaacatgggcaaagttatgactctggattctggggacgaagtaacatttcataagacctggcccaccgagactggtagtccatatcggttggaagaggtctccagccacgtaggtaaagtgttcatggctcggaactacgagtttctggcatacgaggccagtaaagaccggcggcagcccctggagaggatgtggacctgtaactacaaccagcagaaagaccagtcctgtaaccataaagagattacttcaactaaggccgagtag

SEQ ID NO: 61573 - DNA, 378 bp, Artificial Sequence
  derived and/or modified sequence
atgcggaccgccatatggaaatggcatagggggatttacagggaccactacgttctgggttccctgacttttctgtccccaatgcaacgagccggtacgtccaatcagtggaatatgggcaaggtgatgaccctcgatagcggggatgaggtgacttttcataagacttggccaaccgaaacggggagcccgtataggctcgaggaggtcagcagccacgtgggcaaggtctttatggctagaaactatgagttcctcgcatatgaagcatctaaggacaggaggcagccactcgaacgcatgtggacatgtaattataaccagcaaaaggaccagtcctgcaatcataaggaaattacctccacaaaggctgagtag

SEQ ID NO: 61574 - DNA, 823 bp, Artificial Sequence
  derived and/or modified sequence
ttagctgggaggacccaaaatgctggaaaagctgatgggtgctgattctctccagcttttcagggtataaaggaatctgaacacgactgatattttctttaatttttagatccagatatacattgggtaaaatctacttcataggttttcaaaggagcattcttctgagcaaatctgaaaactctctaaactctattgcaaaggagacagaagaaggaagagagacggtaacaaggaaagaaggatggaagagaaggcatgaggacggctatttggaaatggcacagaggcatttacagagatcattatgtccttgggtctcttaccttcctcagccctatgcagagagctgggacttctaaccaatggaacatgggaaaggtgatgacacttgactccggtgatgaggttacctttcacaagacctggccaactgagaccggatctccttacaggcttgaagaagtaagcagccatgttggaaaagtcttcatggcaagaaactatgagttccttgcctatgaggcctctaaggaccgcaggcagcctctagaacgaatgtggacctgcaactacaaccagcaaaaagaccagtcatgcaaccacaaggaaataacttctaccaaagctgaatgagtttggaagcagattcttcccagccaatccttctgatgacaatgtagtctggccaacatcttcactggactctgacggactctgtgtctgggacccagctgataacacgtggtgatgggattgtatttgcaactctctggtcagtaagtgataaaatgccatttctatgcacccacctggcctgtgt

SEQ ID NO: 61575 - DNA, 378 bp, Artificial Sequence
  derived and/or modified sequence
atgagaaccgccatctggaagtggcacagaggcatctacagagaccactacgtgctgggcagcctgaccttcctgagccccatgcagagagccggcaccagcaaccagtggaacatgggcaaggtgatgaccctggacagcggcgacgaggtgaccttccacaagacctggcccaccgagaccggcagcccctacagactggaggaggtgagcagccacgtgggcaaggtgttcatggccagaaactacgagttcctggcctacgaggccagcaaggacagaagacagcccctggagagaatgtggacctgcaactacaaccagcagaaggaccagagctgcaaccacaaggagatcaccagcaccaaggccgagtag

SEQ ID NO: 61576 - DNA, 249 bp, Artificial Sequence
  derived and/or modified sequence
atggctcagcggcatctccagcgatcactatgtccatgggtatcttacctcccacagccttatgcagagctcgaagaggtgtccagccatgttggcaaggtgtttatggctcgcaactacgagtttctagcgtacgaggctagcaaggataggcggcaaccactggagcgaatgtggacatgtaattacaaccagcagaaagaccagtcctgcaatcataaagagattactagcacaaaagcagagtag

SEQ ID NO: 61577 - DNA, 249 bp, Artificial Sequence
  derived and/or modified sequence
atggcccagaggcacctgcagaggagcctgtgcccctgggtgtcctacctgccccagccctatgcagagctggaggaggtgagcagccacgtgggcaaggtgttcatggccaggaactatgagttcctggcctatgaggccagcaaggaccggcggcagcccctggagaggatgtggacctgcaactacaaccagcagaaggaccagagctgcaaccacaaggagatcaccagcaccaaggccgagtag

SEQ ID NO: 61578 - DNA, 249 bp, Artificial Sequence
  derived and/or modified sequence
atggcccagcggcacctgcagcggagcctgtgcccctgggtgagctacctgccacagccctacgccgagctggaagaggtctcctcacacgttggcaaggtgtttatggcacggaactacgaattcctggcctacgaagcgagcaaagaccggcgccaacctctcgaaagaatgtggacttgtaattataatcagcaaaaggaccagagttgcaatcataaggaaattacatccacaaaggcggaatag

SEQ ID NO: 61579 - DNA, 249 bp, Artificial Sequence
  derived and/or modified sequence
atggcccagagacacctgcaacgcagtctctgcccctgggtcagctaccttccccagccttacgccgagctcgaagaggtcagtagccacgttgggaaagtcttcatggccaggaactacgagttcttagcatacgaagcctctaaagacaggcggcagcccctggaacgcatgtggacctgtaattataaccagcaaaaagaccagtcatgtaaccacaaagagataacatccacaaaagctgaatag

SEQ ID NO: 61580 - DNA, 249 bp, Artificial Sequence
  derived and/or modified sequence
atggcccagagacacctgcagagaagcctgtgcccctgggtgagctacctgccccagccctacgccgagctggaggaggtgagcagccacgtgggcaaggtgttcatggccagaaactacgagttcctggcctacgaggccagcaaggacagaagacagcccctggagagaatgtggacctgcaactacaaccagcagaaggaccagagctgcaaccacaaggagatcaccagcaccaaggccgagtag

SEQ ID NO: 61581 - protein, 438 aa, Artificial Sequence
  derived and/or modified sequence
MDVEIQDTPGKISISKRSILSGTVENIDYPHYCDLLRKMNMPFVKGLENRHNYGRFEKKCNPAFLKFHPYPPSVLPDYHLHDPYPPPYGPHYPLFPLRDDVTLGDSCSGFMSPGGDADLNPGIGRTIPTLVDFSDVKPQHRVPRPDTGFQTTIKRQKILSEELQQNRRWNSREVPDISIRARLGGWTSPLKVTPLQPHHEGRSLSHIFTFDEEATCTDEGEPLVQTNKKCNAKDSFYKSSTQKAYEDVPWDKMLPPKLVPEETTLEKTADPISQCFTLKRYKGVPAITQMVGELWDRFQTRSFLAPVKPINFVSSSSRSKYIPLYTGHVQSTNADDVDNPLGDIASLAKQRYSKPLYTNTSRAANIPGYTGKVHFTATHPANSNIPSTTPSPDSELHRVFQKEMAVDLFRHQAPLSRLVTTVRPYNPFNKKDKETIDY

SEQ ID NO: 61582 - DNA, 1317 bp, Artificial Sequence
  derived and/or modified sequence
atggacgtggagatccaggacacccccggcaagatcagcatcagcaagagaagcatcctgagcggcaccgtggagaacatcgactacccccactactgcgacctgctgagaaagatgaacatgcccttcgtgaagggcctggagaacagacacaactacggcagattcgagaagaagtgcaaccccgccttcctgaagttccacccctacccccccagcgtgctgcccgactaccacctgcacgacccctacccccccccctacggcccccactaccccctgttccccctgagagacgacgtgaccctgggcgacagctgcagcggcttcatgagccccggcggcgacgccgacctgaaccccggcatcggcagaaccatccccaccctggtggacttcagcgacgtgaagccccagcacagagtgcccagacccgacaccggcttccagaccaccatcaagagacagaagatcctgagcgaggagctgcagcagaacagaagatggaacagcagagaggtgcccgacatcagcatcagagccagactgggcggctggaccagccccctgaaggtgacccccctgcagccccaccacgagggcagaagcctgagccacatcttcaccttcgacgaggaggccacctgcaccgacgagggcgagcccctggtgcagaccaacaagaagtgcaacgccaaggacagcttctacaagagcagcacccagaaggcctacgaggacgtgccctgggacaagatgctgccccccaagctggtgcccgaggagaccaccctggagaagaccgccgaccccatcagccagtgcttcaccctgaagagatacaagggcgtgcccgccatcacccagatggtgggcgagctgtgggacagattccagaccagaagcttcctggcccccgtgaagcccatcaacttcgtgagcagcagcagcagaagcaagtacatccccctgtacaccggccacgtgcagagcaccaacgccgacgacgtggacaaccccctgggcgacatcgccagcctggccaagcagagatacagcaagcccctgtacaccaacaccagcagagccgccaacatccccggctacaccggcaaggtgcacttcaccgccacccaccccgccaacagcaacatccccagcaccacccccagccccgacagcgagctgcacagagtgttccagaaggagatggccgtggacctgttcagacaccaggcccccctgagcagactggtgaccaccgtgagaccctacaaccccttcaacaagaaggacaaggagaccatcgactactag

SEQ ID NO: 61583 - DNA, 2028 bp, Artificial Sequence
  derived and/or modified sequence
gaattatcagaaatactttatagttatcaaaaattctaaagaaaaaggccatggatgtagaaattcaggacacacctggaaagataagtatctctaaaaggtccatcctttcaggaactgttgagaatatagattacccacactattgtgatctcttaagaaaaatgaacatgccttttgtgaaaggtcttgagaacagacataactatggcaggtttgaaaagaaatgcaaccctgcttttcttaaatttcacccttatcccccttcagttttgccagactatcatttacatgatccttatcccccaccatatgggccacattatccattatttccacttcgggatgatgtgaccttaggtgattcctgttcagggtttatgagtcctggtggtgatgctgatttaaatcctggcattggcagaaccataccaaccctagtggattttagtgatgtgaaacctcaacatcgagttcccagaccagacacaggatttcaaacaacaataaaaaggcaaaaaattctatcagaagaactgcaacagaacaggagatggaattccagggaagtaccagacatttctatcagagcaagacttggaggttggacaagccctctgaaagttactcccttacaacctcatcatgaaggacgctcattaagtcacatatttacatttgatgaggaggcaacatgtacagatgaaggtgaaccacttgttcaaacaaacaagaaatgtaatgcaaaggactcattttacaagtcctctacacaaaaagcttatgaagatgttccttgggataagatgctaccaccaaaacttgttccagaagaaacaacattggaaaaaaccgctgaccccatctcacagtgttttactctgaaaagatataaaggggtgccagcaataactcagatggttggtgagctctgggacagatttcaaacaagatctttcttggcaccagtcaaaccaattaattttgtgagttcaagttctagaagtaaatatattcctctctatactggtcatgtgcagtctacaaatgctgatgatgttgacaaccccttgggagacatcgcatcgctagccaagcagcggtactctaagcctctttatacaaacacaagtcgtgctgcaaatattccaggatataccggcaaggttcatttcacagccacccacccagcaaattctaatattccatcaacaaccccatcaccagattcagaactgcaccgcgtcttccagaaagaaatggcagttgacctcttccgtcaccaggctcccctgtctcgactggtcacaactgtgagaccctacaaccctttcaacaagaaggacaaagaaaccatagactactagaggaggcggccctgcgcgggctgtccaggcctccgcctggggaaggcttgtgcggcggtgggaaataaaggctgcttctccgcgctgcgcagtgtggtgggttcggtgctgttctccgctggcctgcgcgtccctgcccagcccgcctctctcccccggcaggcggcgctcagctggacactgggcgcccgccagccgcggcgcagactcccaagccgccggcagcagggtagcagggcctgtgttgcagaagattcctctttagggttggaatattgggtctacctagaggtttcacatggcaccacttcagtgcagggattctagagcagagagcagaccatagattttagaatctcaaaggcagtctagtcaaaaatccgtatgctgtcagtgggaaccctgagctactgagaaagtgcgttcttcttttctagcaggggacatcacacaaggggacaacatctaccctctcttggcctgctccagtgtttccttcagagagaagtgttccccagtccccatgagggtcctgaagtctaagtcaggaccactttgggttagagtgtggcctgacccggccttgaccaaagagagcaccagctcgcagaatctctcaggggtgcatgtgggctgagggggagccctctggccttcggaa

SEQ ID NO: 61584 - DNA, 1317 bp, Artificial Sequence
  derived and/or modified sequence
atggacgtagagatacaagacacgccaggcaaaatcagcataagcaagaggtctatactgtctggcacagtggagaatatagactacccccactattgtgatttgttgcggaaaatgaatatgcccttcgtgaagggtctggaaaaccgccacaactatggccgcttcgagaagaagtgtaaccccgctttcttgaagttccacccttaccccccttcagtcctccccgattaccacctgcatgacccctaccccccaccatacggcccccactatccattgttcccacttcgcgatgatgtgaccttgggagactcctgctctggattcatgagccctggtggcgacgctgatctgaacccaggcataggccggactattcccaccctcgttgatttcagcgatgttaaaccacagcatagagtgccaagacctgacacgggttttcaaactactatcaagcgacaaaagatccttagcgaagagctgcagcaaaacagaagatggaactccagagaagtgcccgacatctctatccgcgcccggttgggaggttggacatcaccattgaaggtgactccgctccagccacaccacgagggacgaagtctgagccacatattcaccttcgacgaggaggccacttgtaccgatgagggagagcccttggttcagacgaacaaaaagtgcaacgccaaagactccttttacaaatctagcacgcagaaagcatacgaagatgtgccctgggacaagatgctaccgcctaaactagtacccgaagagactaccctagaaaaaaccgccgatcctatctcccagtgtttcacgctgaagcgctataaaggagtgcccgctatcacacagatggtaggcgagctttgggaccgcttccagacaaggtcattcctggcaccagtcaagccgataaacttcgtgtctagttcctcccgatctaagtacataccactctacactggacatgtccaatccactaatgctgacgatgtcgacaatcccttgggcgatattgcctccctagctaaacagcggtactctaagcccctctacacaaatacttcgcgcgccgccaatatccctggctacacgggcaaggtgcacttcacagcaacacatccagccaactcaaatattccctccacgaccccatcgcctgacagcgaactgcatcgtgtttttcaaaaagagatggcagtggacttgttccggcaccaagcaccactatcacggcttgttacaaccgtgagaccgtataacccctttaataaaaaggataaggaaacgatcgactactag

SEQ ID NO: 61585 - DNA, 1317 bp, Artificial Sequence
  derived and/or modified sequence
atggatgtggagatccaggacaccccaggcaagatcagcatcagcaagaggagcatcctgtctggaacagtggagaacatcgactacccccactactgtgacctgctgaggaagatgaacatgccctttgtgaagggcctggagaacagacacaactacggccgctttgagaagaagtgcaacccagccttcctgaagttccacccctacccaccttctgtgctgcctgactaccacctgcatgacccctaccccccaccctacggcccccactaccccctcttccccctgagagatgatgtgaccctgggggacagctgcagcggcttcatgagccctggaggagatgctgacctgaaccctggcattggaagaaccatccccaccctggtggacttcagtgatgtgaagccccagcaccgggtgcccaggccagacaccggcttccagaccaccatcaagaggcagaagatcctgtctgaggagctgcagcagaacagacgctggaacagccgggaggtgcctgacatcagcatccgggcccggctgggcggctggaccagccccctgaaggtgacccccctgcagccccaccacgagggccgcagcctgagccacatcttcacctttgatgaggaggccacctgcacagatgaaggagagcccctggtgcagaccaacaagaagtgcaatgccaaggacagcttctacaagagcagcacccagaaggcctatgaagatgtgccctgggacaagatgctgccccccaagctggtgcctgaggagaccaccctggagaagacagctgaccccatcagccagtgcttcaccctgaagcgctacaagggcgtgcctgccatcacccagatggtgggggagctgtgggaccgcttccagaccaggagcttcctggcccctgtgaagcccatcaactttgtgagcagcagcagccgcagcaagtacatccccctgtacacaggccacgtgcagagcaccaatgctgatgatgtggacaaccccctgggggacatcgccagcctggccaagcagcgctacagcaagcccctgtacaccaacaccagcagagctgccaacatccctggctacaccgggaaggtgcacttcaccgccacccacccagccaacagcaacatccccagcaccacccccagcccagacagcgagctgcacagggtcttccagaaggagatggctgtggacctcttccgccaccaggcccccctgagccggctggtgaccaccgtgcggccctacaaccccttcaacaagaaggacaaggagaccatcgactactag

SEQ ID NO: 61586 - DNA, 1317 bp, Artificial Sequence
  derived and/or modified sequence
atggacgtggagatccaggacacccccggcaagatcagcatcagcaaacgtagcatcctaagcggtactgtcgaaaatatcgattatccccactattgtgatctgcttcgcaaaatgaacatgcctttcgtgaaaggactggagaacaggcataattacgggagatttgaaaaaaagtgtaatcccgctttcctgaagtttcatccctacccgccctccgtcctgccagattatcacttgcacgatccataccccccaccatatgggccacattatccgctattcccgctgcgggacgacgtgaccctgggagactcctgctcaggcttcatgtctcctggcggcgacgcagacctgaatcctggtattggccgcactataccaaccttagttgacttttcagatgtcaagcctcaacatagagtaccacgcccagacactggttttcagaccacaataaaacggcaaaagattcttagtgaggaactgcaacagaaccgtcggtggaactcacgcgaggtgcccgacatcagcatccgcgcccgtctaggagggtggacctcccctctcaaggttaccccactgcaaccccatcacgaaggccggtctcttagccacatctttactttcgatgaagaggcaacatgtacggacgagggcgagccactcgtacagacgaataaaaagtgtaacgcaaaagattccttttacaaatctagtacccagaaagcttacgaagatgtcccctgggataaaatgctccctcctaaactggtgccagaagagaccacattggaaaaaaccgctgatcccatctcacagtgtttcaccctcaagcgatacaagggtgtgcccgctatcacacagatggtcggtgagttgtgggacagattccagaccagatcttttctcgccccagttaagccaatcaacttcgtgagctcctcctctagatcaaaatacatccctctgtacaccggtcacgttcagagcacaaatgcagacgacgtcgacaatcctctcggggatatcgccagccttgcgaagcagcgctacagtaagcccctttacacgaatacaagtcgtgcagcaaatattcctggatacactggcaaggtccactttactgcgacccaccccgctaatagcaacatcccctcaaccactccaagtccagacagtgagctgcatagggtgttccagaaagaaatggccgttgatctgtttcggcaccaggcccccctgagtcggctggtgaccaccgtgcgaccgtacaacccatttaataagaaagataaggaaaccatcgactactag

SEQ ID NO: 61587 - DNA, 1317 bp, Artificial Sequence
  derived and/or modified sequence
atggacgtggagatccaggatactcccggtaagatcagtattagcaaacgatctatcctctccggcacagtggaaaacatcgactatccacattattgcgatcttctgcgaaaaatgaatatgcccttcgtgaaaggcttggagaatcgtcataactatggtcgcttcgagaagaagtgtaaccctgcattcctcaagtttcatccttacccacctagcgtccttccggattaccatctgcacgatccttaccctcctccctacggaccccattatccactgttccctctgcgcgatgacgttactctgggagattcatgctctggctttatgtcccctggtggggatgccgatctgaacccaggcatcgggaggaccatccctactttggtggacttttccgatgtcaagccgcaacatcgtgtcccgaggcctgatactggcttccagaccaccatcaaaaggcaaaagattttgtctgaagaattacagcagaatcgcaggtggaattcccgggaagttccagatattagtatcagggctagattgggaggatggaccagtccactgaaggtgacacctctgcagccccaccacgaaggaaggtctctgtctcatatttttactttcgatgaggaagctacatgcactgatgagggggaacctctggtgcaaaccaataagaagtgcaacgccaaggattctttttataagagctcaactcagaaggcctacgaggatgtgccgtgggacaaaatgctgccccctaaattggtcccagaagaaaccactctggaaaaaaccgccgaccccatttcgcaatgcttcacactgaaaagatataagggagtgcccgcaatcacccaaatggtaggcgagctttgggataggtttcagacgaggtccttcctggcgccagtgaagcccattaactttgtgagctctagttccagaagcaaatatatcccactgtatacgggacacgtgcagtctaccaatgccgacgacgtcgataaccctctcggagatatagccagtctggcaaagcaacgatactcgaagccactgtacacaaatacgagccgcgcagccaatattcctggctataccgggaaggtgcacttcacggcgacccatcccgctaatagcaatattccttcaactacaccaagcccagattccgagctccaccgggtgtttcagaaggaaatggcagtcgatctttttaggcatcaagcaccgctctcaagactggtgaccactgtacggccttacaatcccttcaacaagaaggacaaagagacaatcgattactag

SEQ ID NO: 61588 - protein, 986 aa, Artificial Sequence
  derived and/or modified sequence
MSRIESLTRARIDRSRELASKTREKEKMKEAKDARYTNGHLFTTISVSGMTMCYACNKSITAKEALICPTCNVTIHNRCKDTLANCTKVKQKQQKAALLKNNTALQSVSLRSKTTIRERPSSAIYPSDSFRQSLLGSRRGRSSLSLAKSVSTTNIAGHFNDESPLGLRRILSQSTDSLNMRNRTLSVESLIDEAEVIYSELMSDFEMDEKDFAADSWSLAVDSSFLQQHKKEVMKQQDVIYELIQTELHHVRTLKIMTRLFRTGMLEELHLEPGVVQGLFPCVDELSDIHTRFLSQLLERRRQALCPGSTRNFVIHRLGDLLISQFSGPSAEQMCKTYSEFCSRHSKALKLYKELYARDKRFQQFIRKVTRPAVLKRHGVQECILLVTQRITKYPLLISRILQHSHGIEEERQDLTTALGLVKELLSNVDEGIYQLEKGARLQEIYNRMDPRAQTPVPGKGPFGREELLRRKLIHDGCLLWKTATGRFKDVLVLLMTDVLVFLQEKDQKYIFPTLDKPSVVSLQNLIVRDIANQEKGMFLISAAPPEMYEVHTASRDDRSTWIRVIQQSVRTCPSREDFPLIETEDEAYLRRIKMELQQKDRALVELLREKVGLFAEMTHFQAEEDGGSGMALPTLPRGLFRSESLESPRGERLLQDAIREVEGLKDLLVGPGVELLLTPREPALPLEPDSGGNTSPGVTANGEARTFNGSIELCRADSDSSQRDRNGNQLRSPQEEALQRLVNLYGLLHGLQAAVAQQDTLMEARFPEGPERREKLCRANSRDGEAGRAGAAPVAPEKQATELALLQRQHALLQEELRRCRRLGEERATEAGSLEARLRESEQARALLEREAEEARRQLAALGQTEPLPAEAPWARRPVDPRRRSLPAGDALYLSFNPPQPSRGTDRLDLPVTTRSVHRNFEDRERQELGSPEERLQDSSDPDTGSEEEGSSRLSPPHSPRDFTRMQDIPEETESRDGEAVASES

SEQ ID NO: 61589 - protein, 987 aa, Artificial Sequence
  derived and/or modified sequence
MCCCCGCCPLLAHLEQGSLRERTREKEKMKEAKDARYTNGHLFTTISVSGMTMCYACNKSITAKEALICPTCNVTIHNRCKDTLANCTKVKQKQQKAALLKNNTALQSVSLRSKTTIRERPSSAIYPSDSFRQSLLGSRRGRSSLSLAKSVSTTNIAGHFNDESPLGLRRILSQSTDSLNMRNRTLSVESLIDEAEVIYSELMSDFEMDEKDFAADSWSLAVDSSFLQQHKKEVMKQQDVIYELIQTELHHVRTLKIMTRLFRTGMLEELHLEPGVVQGLFPCVDELSDIHTRFLSQLLERRRQALCPGSTRNFVIHRLGDLLISQFSGPSAEQMCKTYSEFCSRHSKALKLYKELYARDKRFQQFIRKVTRPAVLKRHGVQECILLVTQRITKYPLLISRILQHSHGIEEERQDLTTALGLVKELLSNVDEGIYQLEKGARLQEIYNRMDPRAQTPVPGKGPFGREELLRRKLIHDGCLLWKTATGRFKDVLVLLMTDVLVFLQEKDQKYIFPTLDKPSVVSLQNLIVRDIANQEKGMFLISAAPPEMYEVHTASRDDRSTWIRVIQQSVRTCPSREDFPLIETEDEAYLRRIKMELQQKDRALVELLREKVGLFAEMTHFQAEEDGGSGMALPTLPRGLFRSESLESPRGERLLQDAIREVEGLKDLLVGPGVELLLTPREPALPLEPDSGGNTSPGVTANGEARTFNGSIELCRADSDSSQRDRNGNQLRSPQEEALQRLVNLYGLLHGLQAAVAQQDTLMEARFPEGPERREKLCRANSRDGEAGRAGAAPVAPEKQATELALLQRQHALLQEELRRCRRLGEERATEAGSLEARLRESEQARALLEREAEEARRQLAALGQTEPLPAEAPWARRPVDPRRRSLPAGDALYLSFNPPQPSRGTDRLDLPVTTRSVHRNFEDRERQELGSPEERLQDSSDPDTGSEEEGSSRLSPPHSPRDFTRMQDIPEETESRDGEAVASES

SEQ ID NO: 61590 - DNA, 2961 bp, Artificial Sequence
  derived and/or modified sequence
atgtcgaggatcgagtctctgactagagcccgcatagatcgaagtcgggagttggccagcaaaactcgcgaaaaggagaagatgaaggaagcaaaagacgccaggtacactaacggccacctgttcaccactattagtgtgagtggcatgaccatgtgctatgcgtgcaacaagtctattacagctaaagaggctctgatctgccccacatgtaacgtgactatccacaatcgatgtaaggacaccttggcaaattgcacgaaggtgaaacaaaagcagcaaaaggccgccctcctgaaaaacaatacagccctgcagtctgtctccctgcggtctaaaacaacgattagggagcggccatctagcgctatatacccttccgactccttccgacaatccctgctgggcagcaggagaggtaggtctagtttaagtctggcaaagagcgtgagcaccacaaatatagccggccacttcaacgacgaatctccactgggactccgacgcatcctctcacagagcaccgattcgcttaacatgaggaatcgcacactgagcgtggaatctttaatcgatgaagcagaagtcatctactcagagttaatgtccgactttgagatggacgaaaaggacttcgctgctgactcctggtctctggccgtcgactcctccttcctgcagcagcataagaaggaagtgatgaagcagcaggacgtgatctacgaacttattcagactgagctgcaccatgtacgtactctcaagatcatgaccaggttatttagaactggcatgctcgaggagctccatcttgaaccaggggtagtacagggtctgtttccatgcgttgatgaattgtcagacattcacacgcgttttttatcacaacttcttgagagacggagacaggcgttatgtcctggctccactcgcaactttgtgattcaccggctcggcgacctgctcatcagccagtttagcggaccatccgctgaacagatgtgcaaaacctatagcgaattctgcagcaggcactctaaagcgcttaagctgtataaagaactctacgcccgggacaaaaggtttcagcaatttatccggaaagtaacacgaccagccgtgctgaaacgacacggggtgcaggagtgcattctcctcgtcactcagaggatcacaaagtaccccttattaatctcacggatcctgcagcatagccacggaattgaagaagagcgccaagaccttaccactgccctgggccttgtcaaagaactgctgtccaacgtagatgaggggatctatcagctggagaagggggctaggctgcaggagatatacaataggatggacccaagggctcagaccccagtccccgggaaaggcccttttggtcgggaggaactcttaaggcgtaaactaatccatgatgggtgtctcctgtggaagaccgcaacaggacgtttcaaagacgtgcttgtgttgcttatgacagatgtcttagtgtttctgcaggaaaaagatcaaaagtacatcttcccaacactcgataagccgtccgtggtgagtctccagaatcttattgtgagagacattgccaatcaggagaagggcatgtttttaatttcggcggcccctccagagatgtacgaagttcacacagcttcgcgcgatgaccgcagcacctggatacgcgtcattcagcaatccgttaggacctgccccagcagggaagacttccctttgattgagactgaagatgaagcttatcttcgacgcatcaaaatggagctgcagcagaaggaccgtgcgctagtcgagctgctgcgcgagaaagtgggactattcgccgaaatgacacatttccaagctgaagaagatggaggctcagggatggcattgccgactctgccgcggggactctttcgcagcgagtctctggagagtcctaggggagaacgcctgctgcaggacgccatcagagaggtggaaggattgaaggatctgctcgtgggcccaggagtagagctgctcctgacccccagagagcctgctctgcctctggagccagattcaggcgggaatacttcacctggcgtgactgcaaacggtgaagcgaggacctttaatggatctattgaactttgcagggcagacagtgactctagtcagcgtgacagaaacggtaatcagttacgaagtcctcaggaagaggctctgcagagactggtgaatctatatggcctcctgcacggacttcaagccgcagtggcacagcaagataccctcatggaagcccggtttccagagggccccgagcggcgagagaagttgtgcagggcgaactcacgggacggcgaggccggaagggccggggctgctcctgtggcaccagaaaagcaggccacagagctggctttgctccagaggcagcatgctctcctgcaggaagaacttaggagatgccgccgcctaggcgaggagcgcgctaccgaggcagggtccctcgaggcaagactgcgcgagtccgagcaggcccgggccctgctggagcgtgaggccgaggaggccaggcgccagctggcggcgcttggccaaacggagccactgccggccgaggctccttgggctcggaggcctgtggaccctcgcaggagatcactgcctgccggcgatgctctctatctctcctttaaccctccacaaccttcgaggggcactgatagactggatctgccggtgactaccaggtccgtacacagaaactttgaagatcgcgagcgacaagagttagggtcaccagaggagcgactgcaagatagcagcgacccagacaccggttcagaagaagagggcagctcacggctgagtcccccgcattcccctagagatttcacgcgtatgcaggacattcccgaggagaccgaaagccgggacggcgaggccgtggcaagcgagtcttag

SEQ ID NO: 61591 - DNA, 2964 bp, Artificial Sequence
  derived and/or modified sequence
atgtgttgctgttgcggatgttgccctttactggctcacttagaacagggctccttacgtgagcgtaccagggagaaggaaaaaatgaaagaggctaaggatgccaggtataccaacggccacctatttacaacaattagcgtgtccggcatgactatgtgttacgcctgcaacaaatctataaccgctaaggaggccctcatttgcccaacttgcaatgttaccatccataaccgctgcaaagacaccctggctaattgcactaaagtgaaacagaagcagcagaaggctgctctgctaaaaaataacaccgctctgcaaagcgtctccttaagatctaagaccactatccgggaacgtcccagtagcgctatttaccctagcgactcctttcggcagagcctcctagggtcgagaagaggaaggtcttcgttatcgctggcaaaatctgtgtccacaacaaacatagcaggccactttaacgacgaaagccctctagggctgaggcgtattctatcccagagcacggacagtctgaatatgcggaatcgtacgctgtccgtggagagcctcatcgatgaggccgaggttatttattccgagctaatgtctgatttcgaaatggatgaaaaggatttcgccgccgacagttggtcactcgctgtggattcctcctttctgcagcagcacaaaaaggaggtgatgaagcagcaggacgtgatctatgagctcattcagacagaattgcatcatgtccgcactctcaagattatgacccgcctcttcagaactggcatgcttgaggagcttcacttagagcctggggtcgtgcagggtttgttcccctgcgtagatgagttgtccgatatccacacacgcttcctgagtcagctgctagagagacggcggcaagcgctttgcccgggatctacccgcaactttgtcattcaccgcctgggggacctgttaatatcacagtttagcggccctagtgctgagcagatgtgtaagacatatagcgagttttgttcacgtcactcaaaagccctgaagttgtacaaagaactgtacgcccgtgacaaaagatttcagcagtttatccgcaaggtcactagacctgctgtgctgaagcggcacggtgtgcaagagtgcatcctcttagtgacccagaggatcacaaagtatcctctactcatctcaaggatcctgcagcattcccacggaatagaggaagaacgccaggacctcaccaccgccctgggactcgtcaaagagctgttatctaacgtcgatgaaggtatctaccagttggaaaaaggggcgcgtttgcaggagatatacaatcggatggatcctagagcccagactcccgtgcctgggaaaggtccattcgggagagaagagcttttgcgccgcaagttgatacatgatgggtgcctgttgtggaagaccgctactggacggttcaaggatgttttggttttgcttatgactgatgttctcgtattcttacaagagaaggaccagaaatatattttccccacactggacaaaccctctgttgtgagtctgcagaatctgatcgtcagagatattgcgaatcaggaaaaaggtatgttccttatctcagccgcccccccagagatgtatgaggtccatacagctagcagagatgatcgttcaacctggattcgcgtaatacagcagtccgttcgtacttgcccctccagagaggatttccccctgatcgagactgaagatgaagcatatctgcggagaattaaaatggagcttcaacaaaaggacagagctcttgttgaacttctgcgcgagaaagtgggtctgtttgccgagatgactcactttcaggctgaagaggacggtgggagtggaatggctctgccaacattaccaaggggcctgtttcgttccgagtcgctggagtcaccacggggagagcgcttactccaagacgcaatccgagaggttgaaggactaaaagacttgctggtggggccgggggtcgagctgctgctgacacctcgggaacccgccttgccacttgagcctgattctggtgggaacacatcaccaggcgtgacagccaatggtgaggccaggactttcaacggttcaatcgagctgtgcagggccgattcggacagcagccagagagacaggaatggaaaccagctgcgttccccgcaagaggaagctttacaacgactggtcaatctttacggtctgctgcacggcctacaagcagctgtggcacagcaggacactctgatggaggcacgctttcctgaagggcccgagcggagagagaagctctgtcgcgccaatagtcgggacggcgaagcaggcagagccggcgccgctcccgtggcacctgagaagcaggcaacagaactcgccttgttgcaacgacagcacgctctcttacaggaggagctgcgccgctgcagaaggctcggcgaggagagggcgacggaggcaggatcgctggaggctagactccgcgagagcgagcaagctcgtgcacttctggagagggaggcagaagaagctcgaaggcaacttgccgctctgggacaaaccgagccccttcctgcggaagcaccttgggcccgcagacctgtggatcctcgaaggcgttcactgcccgctggcgacgccctatacctttctttcaatccacctcagccgagtcgaggcacagataggctggacctgcccgttacaacgcgaagtgtgcacagaaactttgaggatcgtgaaagacaggagctaggaagcccagaagaaaggctgcaggactcgtctgatcccgatactggcagcgaggaggaaggctcttcgcgactctcaccacctcattcccctcgcgactttacccgcatgcaggacattcccgaagaaactgagagtcgggacggagaggcggtagcctccgaatcctag

SEQ ID NO: 61592 - DNA, 2961 bp, Artificial Sequence
  derived and/or modified sequence
atgagccgcatcgagagcctgacccgggccagaattgacaggagccgggagctggccagcaagacccgggagaaggagaagatgaaggaggccaaggatgcccgctacaccaacggccacctgttcaccaccatctctgtgtctggcatgaccatgtgctacgcctgcaacaagagcatcacagccaaggaggccctgatctgccccacctgcaatgtgaccatccacaaccgctgcaaggacaccctggccaactgcaccaaggtgaagcagaagcagcagaaggccgccctgctgaagaacaacacagccctgcagagcgtgtccctgcggagcaagaccaccatccgggagcggcccagcagcgccatctaccccagcgacagcttccggcagagcctgctgggcagccggcggggccgcagcagcctgagcctggccaagtctgtgtccaccaccaacattgctggccacttcaatgatgagagccccctgggcctgcggcgcatcctgagccagagcacagacagcctgaacatgaggaacagaaccctgtctgtggagagcctgattgatgaggccgaggtgatctacagcgagctgatgtctgactttgagatggatgagaaggactttgctgctgacagctggagcctggccgtggacagcagcttcctgcagcagcacaagaaggaggtgatgaagcagcaggacgtcatctatgagctgatccagacagagctgcaccacgtgaggaccctgaagatcatgaccaggctcttcagaacaggcatgctggaggagctgcacctggagcccggggtggtgcagggcctcttcccctgtgtggatgagctgagtgacatccacacccgcttcctgagccagctgctggagcggcggcggcaggccctgtgccccggcagcaccaggaactttgtgatccaccggctgggggacctgctgatcagccagttcagcggccccagcgctgagcagatgtgcaagacctacagcgagttctgcagccgccacagcaaggccctgaagctgtacaaggagctgtatgcccgggacaagcgcttccagcagttcatcaggaaggtgaccaggcctgctgtgctgaagagacatggagtgcaggagtgcatcctgctggtgacccagaggatcaccaagtaccccctgctgatcagccgcatcctgcagcacagccacggcatcgaggaggagcggcaggacctgaccacagccctgggcctggtgaaggagctgctgagcaatgtggatgagggcatctaccagctggagaagggggcccggctgcaggagatctacaacaggatggacccccgggcccagacccctgtgcctgggaagggccccttcggccgggaggagctgctgcggaggaagctgattcatgatggctgcctgctgtggaagacagccaccggccgcttcaaggatgtgctggtgctgctgatgacagatgtgctggtgttcctgcaggagaaggaccagaagtacatcttccccaccctggacaagcccagcgtggtgtccctgcagaacctgattgtgcgggacatcgccaaccaggagaagggcatgttcctgatctctgctgcccctcctgagatgtatgaggtgcacacagccagcagagatgacaggagcacctggatccgggtcatccagcagagcgtgaggacctgccccagccgggaggacttccccctcatcgagacagaagatgaggcctacctgcggcgcatcaagatggagctgcagcagaaggaccgggccctggtggagctgctgcgggagaaggtgggcctgtttgctgagatgacccacttccaggccgaggaggatggcggcagcggcatggccctgcccaccctgccccggggcctcttccgctctgagagcctggagagccccagaggagagcggctgctgcaggatgccatccgggaggtggagggcctgaaggacctgctggtgggccctggggtggagctgctgctgaccccccgggagcccgccctgcccctggagccagattctgggggcaacaccagccctggggtgacagccaacggggaggcccggaccttcaacggcagcattgagctgtgcagagctgacagcgacagcagccagagggacagaaatggaaaccagctgcggagcccccaggaggaggccctgcagaggctggtgaacctgtatggcctgctgcacggcctgcaggccgctgtggcccagcaggacaccctgatggaggcccgcttccctgagggccctgagcggcgggagaagctgtgccgggccaacagcagagatggagaggccggccgggccggggccgcccctgtggcccctgagaagcaggccacagagctggccctgctgcagaggcagcacgccctgctgcaggaggagctgcggcgctgccggcggctgggggaggagcgggccacagaggccggcagcctggaggcccggctgcgggagagcgagcaggcccgggccctgctggagcgggaggccgaggaggcccggcggcagctggccgccctgggccagacagagcccctgcctgctgaggccccctgggcccggcggcctgtggacccccggcggcgcagcctgcctgctggagatgccctgtacctgtccttcaaccccccccagcccagccggggcacagaccggctggacctgcctgtgaccaccaggtctgtgcacaggaactttgaagatcgggagcggcaggagctgggcagccctgaggagcggctgcaggacagcagtgaccctgacaccggcagcgaggaggagggcagcagccggctgagccccccccacagcccccgggacttcaccaggatgcaggacatccctgaggagacagagagcagagatggagaggccgtggccagcgagagctag

SEQ ID NO: 61593 - DNA, 2964 bp, Artificial Sequence
  derived and/or modified sequence
atgtgctgctgctgcggctgctgccccctgctggcccacctggagcagggcagcctgcgggagaggacccgggagaaggagaagatgaaggaggccaaggatgcccgctacaccaacggccacctgttcaccaccatctctgtgtctggcatgaccatgtgctacgcctgcaacaagagcatcacagccaaggaggccctgatctgccccacctgcaatgtgaccatccacaaccgctgcaaggacaccctggccaactgcaccaaggtgaagcagaagcagcagaaggccgccctgctgaagaacaacacagccctgcagagcgtgtccctgcggagcaagaccaccatccgggagcggcccagcagcgccatctaccccagcgacagcttccggcagagcctgctgggcagcagaagaggccgcagcagcctgagcctggccaagtctgtgtccaccaccaacattgctggccacttcaatgatgagagccccctgggcctgcggcgcatcctgagccagagcacagacagcctgaacatgaggaacagaaccctgtctgtggagagcctgattgatgaagctgaggtgatctacagcgagctgatgtctgactttgagatggatgagaaggactttgctgctgacagctggagcctggccgtggacagcagcttcctgcagcagcacaagaaggaggtgatgaagcagcaggatgtgatctatgagctgatccagacagagctgcaccacgtgaggaccctgaagatcatgaccaggctcttcagaacaggcatgctggaggagctgcacctggagcccggggtggtgcagggcctcttcccctgtgtggatgagctgagtgacatccacacccgcttcctgagccagctgctggagcggcggcggcaggccctgtgccccggcagcaccaggaacttcgtcatccaccggctgggggacctgctgatcagccagttcagcggccccagcgctgagcagatgtgcaagacctacagcgagttctgcagccgccacagcaaggccctgaagctgtacaaggagctgtatgcccgggacaagcgcttccagcagttcatcaggaaggtgaccaggcctgctgtgctgaagagacatggagtgcaggagtgcatcctgctggtgacccagaggatcaccaagtaccccctgctgatcagccgcatcctgcagcacagccatggaattgaggaggagcggcaggacctgaccacagccctgggcctggtgaaggagctgctgagcaatgtggatgagggcatctaccagctggagaagggggcccggctgcaggagatctacaacaggatggacccccgggcccagacccctgtgcctgggaagggccccttcggccgggaggagctgctgcggaggaagctgattcatgatggctgcctgctgtggaagacagccaccggccgcttcaaggatgtgctggtgctgctgatgacagatgtgctggtgttcctgcaggagaaggaccagaagtacatcttccccaccctggacaagcccagcgtggtgtccctgcagaacctgattgtgcgggacatcgccaaccaggagaagggcatgttcctgatctctgctgcccctcctgagatgtatgaggtgcacacagccagcagagatgacaggagcacctggatccgggtcatccagcagagcgtgaggacctgccccagccgggaggacttccccctgattgaaacagaagatgaggcctacctgcggcgcatcaagatggagctgcagcagaaggaccgggccctggtggagctgctgcgggagaaggtgggcctgtttgctgagatgacccacttccaggccgaggaggatggcggcagcggcatggccctgcccaccctgccccggggcctcttccgctctgagagcctggagagccccagaggagagcggctgctgcaggatgccatccgggaggtggagggcctgaaggacctgctggtgggccctggggtggagctgctgctgaccccccgggagcccgccctgcccctggagccagacagcggcggcaacaccagccctggggtgacagccaatggagaggcccggaccttcaacggcagcattgagctgtgcagagctgacagcgacagcagccagagggacagaaatggaaaccagctgcggagcccccaggaggaggccctgcagaggctggtgaacctgtatggcctgctgcacggcctgcaggccgctgtggcccagcaggacaccctgatggaggcccgcttccctgagggccctgagcggcgggagaagctgtgccgggccaacagcagagatggagaggccggccgggccggggccgcccctgtggcccctgagaagcaggccacagagctggccctgctgcagaggcagcacgccctgctgcaggaggagctgcggcgctgccggcggctgggggaggagcgggccacagaagctggcagcctggaggcccggctgcgggagagcgagcaggcccgggccctgctggagcgggaggccgaggaggcccggcggcagctggccgccctgggccagacagagcccctgcctgctgaggccccctgggcccggcggcctgtggaccccaggagaagaagcctgcctgctggagatgccctgtacctgtccttcaaccccccccagcccagccggggcacagaccggctggacctgcctgtgaccaccaggtctgtgcacaggaactttgaggaccgggagcggcaggagctgggcagccctgaggagcggctgcaggacagcagtgaccctgacaccggcagcgaggaggagggcagcagccggctgagccccccccacagcccccgggacttcaccaggatgcaggacatccctgaggagacagagagcagagatggagaggccgtggccagcgagagctag

SEQ ID NO: 61594 - DNA, 2961 bp, Artificial Sequence
  derived and/or modified sequence
atgagccggatcgagagcctgacccgggcccggatcgaccggagcagagagctcgcttccaagactagagaaaaagaaaagatgaaggaagctaaggatgcccgatatacgaacggccacctctttaccactatctccgtgtctggcatgacgatgtgctacgcttgcaacaaaagtatcacagcaaaggaagctctgatctgccccacgtgcaatgttactatccacaaccgatgtaaggatactctagcaaactgcacaaaggtgaagcagaaacagcagaaagctgcgctcttgaagaataatactgcattacagagtgtctctctgcgaagtaaaacgaccattagggaacgaccttcatcagcgatttaccccagcgactcctttcggcagagcctgctgggctcgagacgaggaaggagttctttgtccctggccaaatctgtgtctaccacaaatatagcaggtcatttcaacgacgaatcgcctctaggactccggagaatcctcagtcagtctacggactcactcaacatgaggaacagaactctctcagtggaatcgctcattgacgaggccgaagtgatttacagcgaacttatgtctgattttgagatggatgagaaagatttcgccgctgatagttggtccctggcagtggactcttccttcctgcagcagcacaagaaggaggtcatgaagcagcaggacgtaatatatgagttgatccagaccgagctgcaccacgtgagaaccctcaaaatcatgactagactgttccggacaggtatgcttgaagagttacaccttgagcccggcgtagtgcagggtctgtttccatgcgtggacgaactctctgacattcacacccgattcctttctcagttactggagcggagacggcaggcgttgtgccctggatctacaagaaacttcgtgattcacagactgggggatctcctgatctcccagttctccggacctagtgccgagcaaatgtgcaagacttattcagaattttgctcccgccacagtaaggccctcaagctgtacaaagagttgtatgctcgcgacaaacgttttcagcagttcatcaggaaggtaacaagaccagccgtgttgaaacgccacggggttcaggaatgcatactgttggtgactcaaaggattaccaagtaccctctgctcattagccggatcctgcagcactcccatggtattgaggaggagcgccaagacctgacaacggcacttggcctcgtgaaggaactattgtctaacgtggacgaagggatatatcaattggagaagggggctagattacaagagatttacaatcggatggatccccgcgcacagacaccagtgccaggtaaaggaccctttggtcgtgaggaattgcttagacgcaaattaatacacgacggatgcctcctatggaaaactgcgaccggtcggttcaaggatgtcctggtgcttcttatgactgatgtgttggtctttctccaggagaaggatcagaaatacatttttccaacgcttgataagccaagcgttgttagtctgcagaacctgatagtcagagatatcgccaaccaggaaaaaggaatgttcttgatctccgccgcccctcccgaaatgtacgaggtgcacacagcgagcagagatgatcgcagcacctggattcgtgtgatccagcagagcgtgaggacgtgtccttctcgggaagactttcccttgatcgaaacggaggatgaagcttacctccgccgaatcaaaatggaactacagcagaaagaccgagctctcgtggaactgctgagagaaaaggtcggcttgttcgcggaaatgacccacttccaggcagaagaagacggaggcagcgggatggctctgccaacactgcctcggggcctgtttcgctcagagtctctagaaagtccccgcggtgagcggctgttgcaggacgcaatcagagaggttgaaggcctgaaagatctcctagtggggcccggagtggagctcctgctaactccacgcgaaccagctctccctctcgaacccgatagcgggggtaatacctctccaggagtgaccgcaaacggagaagcaagaacattcaatggttccatcgagctgtgtcgggccgactccgactcatcacaaagggatcgcaatggcaaccagctcaggtctccacaggaggaagcgctccagagactcgtaaatctgtatggtctcctgcacggtcttcaggccgcggtggcccagcaggatacccttatggaggctaggttcccggaaggtcctgaacgcagggagaagctgtgccgtgccaattcccgtgatggggaagcaggccgcgctggggctgcacctgtggcacccgagaagcaggccactgagctggctctgctacagcgtcagcacgcgctgctgcaggaggagctacggagatgtaggaggctgggggaagagcgagctaccgaagcaggttccctggaagcccgtctcagagaatccgaacaagctagagctctgctcgagcgtgaagcagaggaagcaagaaggcagttggcagccctgggccagacagaacctctacccgctgaggctccctgggctcggagaccagtcgaccctcggagacgctctctgcccgctggtgacgcactgtatctcagctttaatcctccgcagcccagccgcgggaccgatcggctagacctccctgttactacccgatctgtgcaccgtaactttgaggatcgagaacgtcaggaactaggttcccccgaggagcggctccaggatagttccgatcccgataccggctccgaggaggaaggatcatccagactctcacctccccactcacctcgggattttactcggatgcaggatatccctgaggagactgaaagccgggatggcgaagcagtcgcatctgaaagctag

SEQ ID NO: 61595 - DNA, 2964 bp, Artificial Sequence
  derived and/or modified sequence
atgtgctgctgctgcggctgctgccccctgctggcccacctggagcagggaagcctgagggaacgaaccagggaaaaggagaaaatgaaggaagctaaggatgcgcggtataccaacggacatctgtttactacgattagcgtgagtggaatgaccatgtgctatgcatgcaataaatcaattacagctaaggaagctctgatatgtcccacctgtaacgtcaccatccataatagatgtaaagacactctagctaattgcacaaaagtgaaacagaagcagcagaaagcagctctgctgaagaataataccgctctccagagcgtgagtctgcggtcaaagaccacaattagagaacggcccagcagcgccatctacccatctgattctttcaggcagtctctgctcgggagccgtcgaggtcgctcctcactgtcactcgctaaatccgtaagtacgaccaacattgccgggcattttaatgacgagtccccactgggactgcgtcgaattctatctcagagcaccgactctctgaacatgagaaaccgtacgctcagcgtagagagccttatagacgaggctgaagttatttattccgagctgatgtctgacttcgagatggatgaaaaggactttgcagccgactcctggtctctggccgttgacagcagttttctacagcagcacaaaaaagaagtaatgaagcaacaagatgtgatatacgaattgatccaaacggagctgcaccacgtgcggacactgaagattatgacccgcttattcaggactgggatgctagaagaactgcacttggaaccgggggttgttcagggcctgttcccatgtgttgacgaactctccgatatccatacacgatttctctcccagcttttagagagacgacggcaagccctgtgccctggctcgacaagaaactttgtgatccaccgcttgggcgaccttcttataagccaattttcagggcccagtgctgagcagatgtgtaaaacctactctgagttttgcagtaggcactctaaagctttaaagctgtataaagagctgtacgcccgagataagcgattccagcagttcatcagaaaagtgacaagacctgctgtgcttaagcggcatggcgtacaagagtgtattttactcgttacacagcgaattaccaaataccctctactgatttccagaattttgcagcactctcacggtatcgaggaagaaagacaggacttgactactgccctcggcctcgtgaaggagctgctatccaatgtggatgaaggaatatatcagctcgagaaaggggcccggctccaagagatctacaatcgaatggacccccgggcccagacacctgtgcctggcaagggtccctttggcagagaagaattgctccgccgtaagctcatccatgatggctgtctactatggaagacggctacagggcggttcaaggacgtgttggtgctgctgatgaccgatgtgctcgtgttccttcaagagaaggaccagaagtatattttccctactctggataaaccttcagtggtctccctgcaaaatctcattgtgcgcgatatcgcaaatcaggaaaagggaatgtttctgatctctgctgccccgcctgaaatgtatgaagtacatactgctagccgggatgatcggtcaacttggatcagagtgattcagcagagtgtcagaacgtgcccaagccgcgaagatttccccctcatcgagactgaggacgaggcctacttaaggcggatcaagatggaactgcagcaaaaagatagagctctggttgagctgctccgggaaaaggtgggcttgttcgccgagatgacacacttccaagccgaggaggacggcgggtctggcatggccctgcccacacttcctcgcggcctgttcagatccgagtccctagaaagccccagaggcgagagactactgcaggacgccatcagggaggtggagggcctaaaggatttgcttgtcgggcccggggtggagctcctcctcactccccgggagcccgccctcccattggagcccgactcaggagggaatacaagcccgggtgtgacagcgaatggggaggcaagaacattcaatggctcaattgagctctgtcgcgccgactccgactcgagccaacgggaccggaatggcaaccagctaaggtctccacaggaggaggccctccaacggttagtaaatttgtatgggctgctgcatgggttacaggccgccgttgcccagcaagacacactgatggaagcccgctttcccgaaggacccgagcgaagagagaaactctgccgagcaaattctcgggatggagaggctggacgggctggcgccgcacccgtagcccctgagaagcaggccactgagttggcactcctgcagaggcagcatgctttgttgcaggaggagctgcgcaggtgtagacgactcggagaggagcgagccacagaagcgggcagcctggaagcaaggttgcgcgaatcggaacaggcacgggcccttctcgagagagaagcagaggaggcacgaagacagctggccgcactgggccagacggagcctctgccagccgaggctccctgggcccgcaggcccgtggaccctaggcgaagatccctgcccgctggagacgccctatacctaagtttcaatccgcctcagccaagcagggggactgaccgactcgacctgccagtgaccactcggtctgtccataggaactttgaagaccgggagcgccaggaactgggcagcccagaggaacggctgcaggacagcagtgaccccgatactggctctgaggaggagggctccagtcgcctgtctcctccacacagcccccgtgattttacaagaatgcaagatattccggaagagactgaatcacgcgatggggaagcagtagcgtctgaatcatag

SEQ ID NO: 61596 - DNA, 2961 bp, Artificial Sequence
  derived and/or modified sequence
atgtcgagaatagaatctcttacccgggcaaggatcgaccggtcgagagagctagcctctaagacccgtgagaaagaaaagatgaaggaggcgaaggacgcacggtatactaacggtcacctcttcactacaatatctgtttctggaatgaccatgtgttacgcttgtaacaagtctattactgccaaggaggccctgatatgtccaacctgtaacgtcactatacacaaccgatgtaaggacactttagccaactgcaccaaggttaaacagaagcagcagaaggcagctttactgaaaaacaataccgcactgcagtccgtttctcttcggtctaagacaacgatccgggagagaccaagttcagctatttacccctcagatagcttcaggcagtcgctgctcggctccaggcgcggacgctcttctctgtcgctcgccaagtccgtatctacaaccaatatcgctggacattttaatgacgaaagtccactcgggctccgcagaattctctctcagtcgactgacagcctgaacatgaggaatcggaccctctctgtcgaatccctaatcgatgaagcagaggtaatttattcagagttgatgtcagacttcgagatggatgaaaaagatttcgccgctgactcatggtccttggcagtcgattcttccttcctgcagcagcacaaaaaagaggtgatgaagcagcaggatgtcatctacgagctcatccagactgagctccatcacgtccggactctcaagatcatgacccgccttttcaggacaggaatgctagaagagctacatctcgagcctggcgtagtgcaaggcctgtttccttgcgtggacgagttgtctgatattcacacacgcttccttagtcagttattagagagacgacgtcaggccctatgtccaggtagcacccgcaatttcgtgatccataggttgggcgatctgcttatctctcagttctcagggccttccgccgagcagatgtgcaagacctacagcgaattctgcagccgccacagcaaggccctgaagctgtacaaagagctatacgccagagacaagaggtttcaacaattcattcgaaaggtgacaaggccagccgtgctcaagcgacacggcgttcaggagtgtatccttttagtaactcaacgcattaccaagtacccgcttctcatctcaaggatcctccaacactctcacggcatcgaggaggaacgccaagacctgaccaccgccctcggtctggtaaaggaactgctgtcaaacgtggatgagggaatttaccaacttgaaaagggagcccgactgcaggagatttacaatagaatggacccgagggcccagaccccggtaccaggaaagggcccatttggccgtgaggagctgctgcgcaggaagctgattcatgatgggtgtcttctatggaaaaccgcaaccgggagatttaaggatgtactggtactgctgatgactgacgtattggtattcctccaggagaaagaccagaaatatatcttccccacgctggacaaaccaagtgtagtgtcgctccaaaatctgatagtgcgagacatcgccaatcaggaaaaagggatgtttctgatcagcgctgcccctcccgagatgtatgaggtccataccgcctcgagagacgacaggagtacatggatccgggttatccagcagagcgttcggacttgtcctagccgcgaggattttcctttgattgaaactgaagatgaggcttacctgcgacggattaaaatggagttgcagcagaaggacagggctctcgtcgaactcctgcgtgagaaagttggcctgtttgcagagatgacccatttccaggcagaggaggatgggggttccggcatggcccttcccactttacctaggggtctgtttcggtctgaaagcttggagtcccccaggggcgagcgtctgctgcaggatgcgatccgtgaagtcgaggggttgaaagacctgctcgttggtccgggagtggagctgctgttaacgcccagggaacctgccctcccactggagcccgactcagggggaaataccagtcccggtgttaccgctaacggcgaggcaagaacattcaatggctctatagagttatgtagagctgatagcgacagctcccaacgagaccgtaatggtaaccagctcaggagcccacaggaagaagctctgcaaaggttagtgaatctctacggactcctgcatggtttgcaggccgctgtggctcagcaggatacgttaatggaggccaggtttcctgaggggcctgagagacgcgaaaagctgtgcagggccaatagccgggatggcgaggcgggacgtgccggagccgctcccgttgcccctgagaagcaggctacggagttggctctcctccagcgtcagcatgccctcctccaggaagagttgcggaggtgtagacggctcggcgaagagagagccaccgaagccggatcactggaagcacgcctgcgggagagtgagcaggcaagggctctgctcgaaagagaagcggaggaagctcgacgacagctagccgctctgggtcagactgaaccacttcccgcagaagcaccttgggcccgaagacccgtggatccaagacggcgttcattgcccgcaggtgatgcgctgtatctgtcttttaatcctccccagcctagcaggggtaccgacagactggacttgcccgttacgaccaggtctgtgcacaggaacttcgaagaccgggagaggcaggagctcggatcgccagaagagcgtcttcaggattcaagcgacccagacaccggttcagaagaggaaggttcaagcaggctgtccccaccccatagtccgagggattttacaaggatgcaggatatccctgaggagaccgaaagtagggacggcgaggccgttgctagtgagagctag

SEQ ID NO: 61597 - DNA, 2964 bp, Artificial Sequence
  derived and/or modified sequence
atgtgttgctgctgcggctgttgtccattgctagcccacctagagcaaggtagcctgcgtgaacggacaagggagaaagagaagatgaaggaggcaaaagatgcacgttataccaacggccacttgtttaccacaatctccgtgtcggggatgacaatgtgctatgcttgcaacaaaagtatcacagccaaagaagctttgatatgtcccacctgcaatgtgactatccataatcgctgtaaggatactcttgccaactgtaccaaggtgaaacagaaacagcagaaggccgctctactgaaaaataatacagccctacaatctgtgtctttgcgcagcaaaactacaattagggagagaccttctagcgccatctacccgtctgactcttttcgacaaagcttgctcggctctagaagaggtcgctcatcactctcgcttgcaaagagtgtgtctaccaccaacatcgccggacacttcaatgacgaatctcctctgggccttagacggatcttgagccagtcaaccgacagccttaacatgagaaacagaacattgtcggtggagtcactgatcgatgaagctgaagtaatttattctgaacttatgtctgactttgagatggacgaaaaggacttcgccgctgacagctggtccctggccgtggacagttcgttcctacagcaacacaaaaaggaggtgatgaaacaacaagacgttatctacgagctgatccagaccgagctacatcacgtgagaacactgaagatcatgacgcgcttgttcagaacaggaatgctggaggagctgcacttggaaccgggagtcgtacagggactgtttccatgcgtggacgaactgtccgatattcatacccgcttcctctcccagttgctagagaggcgcagacaagcgctatgccccggatccacacgcaacttcgtgattcaccggctgggagatctgctcatttcccaattcagtggcccttcagccgagcagatgtgtaagacgtacagcgaattttgctctcgccactccaaggcccttaaactgtataaagagctctacgccagagacaagcgattccagcagtttatccgtaaagtcactagaccagccgtcctgaagcgtcacggggtgcaggaatgcattctgcttgtgactcagaggatcactaaatatcctcttcttatcagcaggattttgcagcacagtcacggtatcgaagaagagcgccaagacctcactaccgccctgggcctggtgaaggaacttctcagcaacgttgatgaagggatttaccagctcgagaagggagccagactgcaggaaatttataaccggatggatcctagagctcaaacacctgtgccaggtaaaggcccattcggacgagaggaactcctcagacgaaagctgattcatgacggctgtcttctttggaaaaccgctactggacggtttaaggatgtacttgtgctgttgatgacagacgtcctggtgttccttcaggagaaagatcagaaatacatctttcccaccctcgataagcccagtgtggtctctctgcagaacctgatcgtccgggatattgctaaccaggaaaagggaatgttcctcatatccgcagcaccaccagaaatgtacgaggtgcacactgcctcccgggacgaccgatcaacctggattagagtgatccagcagagcgtccgcacctgtccttccagagaggatttccctctgattgaaactgaagatgaggcctacctgagacggatcaaaatggaactgcagcagaaggatagggctttggtggagttgctgcgcgaaaaagtgggactctttgctgaaatgacccattttcaggccgaagaggacggtggctctggcatggctctgccaacattacccagaggactcttcagaagtgagtccctcgaatcacctaggggagaaagattgttgcaggatgctattagggaggtggaaggcctgaaagacttgctcgtgggccctggtgtggaactgttactgacccccagagaacccgctttacctctcgaacccgattccggcggtaatacgagccccggtgtgaccgccaacggagaagctcgaactttcaacggcagtattgagctttgtcgcgctgacagcgacagttcccagcgggaccgaaacgggaaccagctaaggagcccccaagaggaagccctgcagagacttgtcaacctgtacggtcttcttcatggactgcaggccgctgtggcccagcaggacactttgatggaggccaggttcccggaaggaccggagaggagggaaaagctgtgcagggcaaacagtcgcgatggtgaggcaggcagggcgggagctgcaccagtggctcctgaaaagcaggccacagaactggccctcctgcagagacagcatgctctgctccaggaagagctcagaaggtgtagacgtttgggcgaagagcgggcaaccgaagcaggtagtttggaggctaggctgcgagaaagcgaacaggccagggctctgttggaaagagaagccgaggaagccagaagacaactggctgctttgggacagaccgagccactacctgcggaggcaccgtgggctcgaaggccggtggatcccagaaggcgttccctgccggcaggagatgccttatatttgtccttcaacccaccacaaccgtctcggggaactgatagattggatttacccgtgacaacccggtccgttcatagaaattttgaagacagagagaggcaggagctgggcagtccagaggagaggctgcaggattcgtcggatcccgacactggctccgaagaggaaggctcttcacggctatccccccctcacagcccacgggactttactcgtatgcaggatattccagaagagacagaatctagagatggtgaagcagtagccagcgagtcttag

SEQ ID NO: 61598 - DNA, 4149 bp, Artificial Sequence
  derived and/or modified sequence
gagaccaacgcgtgcgggccgaacccctccccccgccttcccccaacaatacaggacgccggggtccgcgccgcgtcctccctggtccccccgtccgattatgtctcggatcgaatccctcacgcgggcgcggatcgaccggagcagagagctggcgagcaagacccgggaaaaggagaagatgaaggaagccaaggatgcccgctataccaatgggcacctcttcaccaccatttcagtttcaggcatgaccatgtgctatgcctgtaacaagagcatcacagccaaggaagccctcatctgcccaacctgcaatgtgactatccacaaccgctgtaaagacaccctcgccaactgtaccaaggtcaagcagaagcaacagaaagcggccctgctgaagaacaacaccgccttgcagtccgtttctcttcgaagtaagacaaccatccgggagcggccaagctcggccatctacccctccgacagcttccggcagtccctcctgggctcccgccgtggccgctcctccttgtctttagccaagagtgtttctaccaccaacattgctggacatttcaatgatgagtctcccctggggctgcgccggatcctctcacagtccacagactccctcaacatgcggaaccgaaccctatccgtggaatccctcattgacgaagcagaggtaatctacagtgagctgatgagtgactttgagatggatgagaaggactttgcagctgactcttggagtcttgctgtggacagcagcttcctgcagcagcataaaaaggaggtgatgaagcagcaagatgtcatctatgagctaatccagacagagctgcaccatgtgaggacactgaagatcatgacccgcctcttccgcacggggatgctggaagagctacacttggagccaggagtggtccagggcctgttcccctgcgtggacgagctcagtgacatccatacacgcttcctcagccagctattagaacgccgacgccaggccctgtgccctggcagcacccggaactttgtcatccatcgcttgggtgatctgctcatcagccagttctcaggtcctagtgcggagcagatgtgtaagacctactcggagttctgcagccgccacagcaaggccttaaagctctataaggagctgtacgcccgagacaaacgcttccagcaattcatccggaaagtgacccgccccgccgtgctcaagcggcacggggtacaggagtgcatcctgctggtgactcagcgcatcaccaagtacccgttactcatcagccgcatcctgcagcattcccacgggatcgaggaggagcgccaggacctgaccacagcactggggctagtgaaggagctgctgtccaatgtggacgagggtatttatcagctggagaaaggggcccgtctgcaggagatctacaaccgcatggaccctcgggcccaaaccccagtgcctggcaagggcccctttggccgagaggaacttctgaggcgcaaactcatccacgatggctgcctgctctggaagacagcgacggggcgcttcaaagatgtgctagtgctgctgatgacagatgtactggtgtttctccaggaaaaggaccagaagtacatctttcctaccctggacaagccttcagtggtatcgctgcagaatctaatcgtacgagacattgccaaccaggagaaagggatgtttctgatcagcgcagccccacctgagatgtacgaggtgcacacagcatcccgggatgaccggagcacctggatccgggtcattcagcagagcgtgcgcacatgcccatccagggaggacttccccctgattgagacagaggatgaggcttacctgcggcgaattaagatggagttgcagcagaaggaccgggcactggtggagctgctgcgagagaaggtcgggctgtttgctgagatgacccatttccaggccgaagaggatggtggcagtgggatggccctgcccaccctgcccaggggccttttccgctctgagtcccttgagtcccctcgtggcgagcggctgctgcaggatgccatccgtgaggtggagggtctgaaagacctgctggtggggccaggagtggaactgctcttgacaccccgagagccagccctgcccttggaaccagacagcggtggtaacacgagtcctggggtcactgccaatggtgaggccagaaccttcaatggctccattgaactctgcagagctgactcagactctagccagagggatcgaaatggaaatcagctgagatcaccgcaagaggaggcgttacagcgattggtcaatctctatggacttctacatggcctacaggcagctgtggcccagcaggacactctgatggaagcccggttccctgagggccctgagcggcgggagaagctgtgccgagccaactctcgggatggggaggctggcagggctggggctgcccctgtggcccctgaaaagcaggccacggaactggcattactgcagcggcaacatgcgctgctgcaggaggagctacggcgctgccggcggctaggtgaagaacgggcaaccgaagctggcagcctggaggcccggctccgggagagtgagcaggcccgggcactgctggagcgtgaggccgaagaggctcgaaggcagctggccgccctgggccagaccgagccactcccagctgaggccccctgggcccgcagacctgtggatcctcggcggcgcagcctccccgcaggcgatgccctgtacttgagtttcaaccccccacagcccagccgaggcactgaccgcctggatctacctgtcactactcgctctgtccatcgaaactttgaggaccgagagaggcaggaactggggagccccgaagagcggctgcaagacagcagtgaccctgacactggcagcgaggaggaaggtagcagccgtctgtctccgccccacagtccacgagactttaccagaatgcaggacatcccggaggagacggagagccgcgacggggaggctgtagcctccgagagctaagggggcccctcccccctgccccgtgccccactgaagaacattactgagggggctaaccttggggactccaatttgccaatgatgagggaacatttgaaagaactgcaaattgtccttgccagctcttgggatccttggatacctggggccatttaagaagctaggggaattaggccacaacaccccctgggacatccgaaagctacaccacagatgccagtggttcatgccttcttcccgcaactttaggaaaatttatttatttattgtttattagttatggggggagaggggagatttaaaggaccagggacatgggaaccaagccatagggatcagagggccttgtccttgaacactactggggtatattcaggctcatccacgcagctgctgggttcttgccctaacggccctcccctgcaacatccgtcttggaggagaggctgcagccacagcaccctactgccctttaaataaaggagggctgtgggcagggccatgtccctttctcctctcccctcaacctcttactgctgttctccctttctccgtccttcatggaagccctgggagataacctggcttcctggagttgatggaataaaggttggggtggccataatggtttgttgggggtgagggaaaaaacccacagggaccagaatgttttgttgttcttttgttttcttttttgtaccaaagtcaactgcacgtgttttatatttttaagagatcgtaggcaattagagatcgaagcctcctatctccacatctctgaagaagttgaggggtgggggagagaatgacttctgccttcatctgcagtaacggggggacctatactgacctcttccccagccatttagaaacaagttctagggtgggttggaaaatctccaagagccctgacctcatcttccacctcagcaaccatgacctgaaacctcagcgtgaatttgggggatttttcagtggaacccttgcccccaaatgtcgaccagcccccaaatgtcgaagaattttcttcttgccaattttgttgtttaaaaaaaaaattcagggaaaattaaaaacctggaactcca

SEQ ID NO: 61599 - DNA, 4073 bp, Artificial Sequence
  derived and/or modified sequence
gctgggcagtgcccatgctgggatgtgctgctgctgtggctgctgcccgctgctggcccacctagagcaggggtcacttcgagagaggacccgggaaaaggagaagatgaaggaagccaaggatgcccgctataccaatgggcacctcttcaccaccatttcagtttcaggcatgaccatgtgctatgcctgtaacaagagcatcacagccaaggaagccctcatctgcccaacctgcaatgtgactatccacaaccgctgtaaagacaccctcgccaactgtaccaaggtcaagcagaagcaacagaaagcggccctgctgaagaacaacaccgccttgcagtccgtttctcttcgaagtaagacaaccatccgggagcggccaagctcggccatctacccctccgacagcttccggcagtccctcctgggctcccgccgtggccgctcctccttgtctttagccaagagtgtttctaccaccaacattgctggacatttcaatgatgagtctcccctggggctgcgccggatcctctcacagtccacagactccctcaacatgcggaaccgaaccctatccgtggaatccctcattgacgaagcagaggtaatctacagtgagctgatgagtgactttgagatggatgagaaggactttgcagctgactcttggagtcttgctgtggacagcagcttcctgcagcagcataaaaaggaggtgatgaagcagcaagatgtcatctatgagctaatccagacagagctgcaccatgtgaggacactgaagatcatgacccgcctcttccgcacggggatgctggaagagctacacttggagccaggagtggtccagggcctgttcccctgcgtggacgagctcagtgacatccatacacgcttcctcagccagctattagaacgccgacgccaggccctgtgccctggcagcacccggaactttgtcatccatcgcttgggtgatctgctcatcagccagttctcaggtcctagtgcggagcagatgtgtaagacctactcggagttctgcagccgccacagcaaggccttaaagctctataaggagctgtacgcccgagacaaacgcttccagcaattcatccggaaagtgacccgccccgccgtgctcaagcggcacggggtacaggagtgcatcctgctggtgactcagcgcatcaccaagtacccgttactcatcagccgcatcctgcagcattcccacgggatcgaggaggagcgccaggacctgaccacagcactggggctagtgaaggagctgctgtccaatgtggacgagggtatttatcagctggagaaaggggcccgtctgcaggagatctacaaccgcatggaccctcgggcccaaaccccagtgcctggcaagggcccctttggccgagaggaacttctgaggcgcaaactcatccacgatggctgcctgctctggaagacagcgacggggcgcttcaaagatgtgctagtgctgctgatgacagatgtactggtgtttctccaggaaaaggaccagaagtacatctttcctaccctggacaagccttcagtggtatcgctgcagaatctaatcgtacgagacattgccaaccaggagaaagggatgtttctgatcagcgcagccccacctgagatgtacgaggtgcacacagcatcccgggatgaccggagcacctggatccgggtcattcagcagagcgtgcgcacatgcccatccagggaggacttccccctgattgagacagaggatgaggcttacctgcggcgaattaagatggagttgcagcagaaggaccgggcactggtggagctgctgcgagagaaggtcgggctgtttgctgagatgacccatttccaggccgaagaggatggtggcagtgggatggccctgcccaccctgcccaggggccttttccgctctgagtcccttgagtcccctcgtggcgagcggctgctgcaggatgccatccgtgaggtggagggtctgaaagacctgctggtggggccaggagtggaactgctcttgacaccccgagagccagccctgcccttggaaccagacagcggtggtaacacgagtcctggggtcactgccaatggtgaggccagaaccttcaatggctccattgaactctgcagagctgactcagactctagccagagggatcgaaatggaaatcagctgagatcaccgcaagaggaggcgttacagcgattggtcaatctctatggacttctacatggcctacaggcagctgtggcccagcaggacactctgatggaagcccggttccctgagggccctgagcggcgggagaagctgtgccgagccaactctcgggatggggaggctggcagggctggggctgcccctgtggcccctgaaaagcaggccacggaactggcattactgcagcggcaacatgcgctgctgcaggaggagctacggcgctgccggcggctaggtgaagaacgggcaaccgaagctggcagcctggaggcccggctccgggagagtgagcaggcccgggcactgctggagcgtgaggccgaagaggctcgaaggcagctggccgccctgggccagaccgagccactcccagctgaggccccctgggcccgcagacctgtggatcctcggcggcgcagcctccccgcaggcgatgccctgtacttgagtttcaaccccccacagcccagccgaggcactgaccgcctggatctacctgtcactactcgctctgtccatcgaaactttgaggaccgagagaggcaggaactggggagccccgaagagcggctgcaagacagcagtgaccctgacactggcagcgaggaggaaggtagcagccgtctgtctccgccccacagtccacgagactttaccagaatgcaggacatcccggaggagacggagagccgcgacggggaggctgtagcctccgagagctaagggggcccctcccccctgccccgtgccccactgaagaacattactgagggggctaaccttggggactccaatttgccaatgatgagggaacatttgaaagaactgcaaattgtccttgccagctcttgggatccttggatacctggggccatttaagaagctaggggaattaggccacaacaccccctgggacatccgaaagctacaccacagatgccagtggttcatgccttcttcccgcaactttaggaaaatttatttatttattgtttattagttatggggggagaggggagatttaaaggaccagggacatgggaaccaagccatagggatcagagggccttgtccttgaacactactggggtatattcaggctcatccacgcagctgctgggttcttgccctaacggccctcccctgcaacatccgtcttggaggagaggctgcagccacagcaccctactgccctttaaataaaggagggctgtgggcagggccatgtccctttctcctctcccctcaacctcttactgctgttctccctttctccgtccttcatggaagccctgggagataacctggcttcctggagttgatggaataaaggttggggtggccataatggtttgttgggggtgagggaaaaaacccacagggaccagaatgttttgttgttcttttgttttcttttttgtaccaaagtcaactgcacgtgttttatatttttaagagatcgtaggcaattagagatcgaagcctcctatctccacatctctgaagaagttgaggggtgggggagagaatgacttctgccttcatctgcagtaacggggggacctatactgacctcttccccagccatttagaaacaagttctagggtgggttggaaaatctccaagagccctgacctcatcttccacctcagcaaccatgacctgaaacctcagcgtgaatttgggggatttttcagtggaacccttgcccccaaatgtcgaccagcccccaaatgtcgaagaattttcttcttgccaattttgttgtttaaaaaaaaaattcagggaaaattaaaaacctggaactcc

SEQ ID NO: 61600 - DNA, 2961 bp, Artificial Sequence
  derived and/or modified sequence
atgagcagaatcgagagcctgaccagagccagaatcgacagaagcagagagctggccagcaagaccagagagaaggagaagatgaaggaggccaaggacgccagatacaccaacggccacctgttcaccaccatcagcgtgagcggcatgaccatgtgctacgcctgcaacaagagcatcaccgccaaggaggccctgatctgccccacctgcaacgtgaccatccacaacagatgcaaggacaccctggccaactgcaccaaggtgaagcagaagcagcagaaggccgccctgctgaagaacaacaccgccctgcagagcgtgagcctgagaagcaagaccaccatcagagagagacccagcagcgccatctaccccagcgacagcttcagacagagcctgctgggcagcagaagaggcagaagcagcctgagcctggccaagagcgtgagcaccaccaacatcgccggccacttcaacgacgagagccccctgggcctgagaagaatcctgagccagagcaccgacagcctgaacatgagaaacagaaccctgagcgtggagagcctgatcgacgaggccgaggtgatctacagcgagctgatgagcgacttcgagatggacgagaaggacttcgccgccgacagctggagcctggccgtggacagcagcttcctgcagcagcacaagaaggaggtgatgaagcagcaggacgtgatctacgagctgatccagaccgagctgcaccacgtgagaaccctgaagatcatgaccagactgttcagaaccggcatgctggaggagctgcacctggagcccggcgtggtgcagggcctgttcccctgcgtggacgagctgagcgacatccacaccagattcctgagccagctgctggagagaagaagacaggccctgtgccccggcagcaccagaaacttcgtgatccacagactgggcgacctgctgatcagccagttcagcggccccagcgccgagcagatgtgcaagacctacagcgagttctgcagcagacacagcaaggccctgaagctgtacaaggagctgtacgccagagacaagagattccagcagttcatcagaaaggtgaccagacccgccgtgctgaagagacacggcgtgcaggagtgcatcctgctggtgacccagagaatcaccaagtaccccctgctgatcagcagaatcctgcagcacagccacggcatcgaggaggagagacaggacctgaccaccgccctgggcctggtgaaggagctgctgagcaacgtggacgagggcatctaccagctggagaagggcgccagactgcaggagatctacaacagaatggaccccagagcccagacccccgtgcccggcaagggccccttcggcagagaggagctgctgagaagaaagctgatccacgacggctgcctgctgtggaagaccgccaccggcagattcaaggacgtgctggtgctgctgatgaccgacgtgctggtgttcctgcaggagaaggaccagaagtacatcttccccaccctggacaagcccagcgtggtgagcctgcagaacctgatcgtgagagacatcgccaaccaggagaagggcatgttcctgatcagcgccgccccccccgagatgtacgaggtgcacaccgccagcagagacgacagaagcacctggatcagagtgatccagcagagcgtgagaacctgccccagcagagaggacttccccctgatcgagaccgaggacgaggcctacctgagaagaatcaagatggagctgcagcagaaggacagagccctggtggagctgctgagagagaaggtgggcctgttcgccgagatgacccacttccaggccgaggaggacggcggcagcggcatggccctgcccaccctgcccagaggcctgttcagaagcgagagcctggagagccccagaggcgagagactgctgcaggacgccatcagagaggtggagggcctgaaggacctgctggtgggccccggcgtggagctgctgctgacccccagagagcccgccctgcccctggagcccgacagcggcggcaacaccagccccggcgtgaccgccaacggcgaggccagaaccttcaacggcagcatcgagctgtgcagagccgacagcgacagcagccagagagacagaaacggcaaccagctgagaagcccccaggaggaggccctgcagagactggtgaacctgtacggcctgctgcacggcctgcaggccgccgtggcccagcaggacaccctgatggaggccagattccccgagggccccgagagaagagagaagctgtgcagagccaacagcagagacggcgaggccggcagagccggcgccgcccccgtggcccccgagaagcaggccaccgagctggccctgctgcagagacagcacgccctgctgcaggaggagctgagaagatgcagaagactgggcgaggagagagccaccgaggccggcagcctggaggccagactgagagagagcgagcaggccagagccctgctggagagagaggccgaggaggccagaagacagctggccgccctgggccagaccgagcccctgcccgccgaggccccctgggccagaagacccgtggaccccagaagaagaagcctgcccgccggcgacgccctgtacctgagcttcaaccccccccagcccagcagaggcaccgacagactggacctgcccgtgaccaccagaagcgtgcacagaaacttcgaggacagagagagacaggagctgggcagccccgaggagagactgcaggacagcagcgaccccgacaccggcagcgaggaggagggcagcagcagactgagccccccccacagccccagagacttcaccagaatgcaggacatccccgaggagaccgagagcagagacggcgaggccgtggccagcgagagctag

SEQ ID NO: 61601 - DNA, 2964 bp, Artificial Sequence
  derived and/or modified sequence
atgtgctgctgctgcggctgctgccccctgctggcccacctggagcagggcagcctgagagagagaaccagagagaaggagaagatgaaggaggccaaggacgccagatacaccaacggccacctgttcaccaccatcagcgtgagcggcatgaccatgtgctacgcctgcaacaagagcatcaccgccaaggaggccctgatctgccccacctgcaacgtgaccatccacaacagatgcaaggacaccctggccaactgcaccaaggtgaagcagaagcagcagaaggccgccctgctgaagaacaacaccgccctgcagagcgtgagcctgagaagcaagaccaccatcagagagagacccagcagcgccatctaccccagcgacagcttcagacagagcctgctgggcagcagaagaggcagaagcagcctgagcctggccaagagcgtgagcaccaccaacatcgccggccacttcaacgacgagagccccctgggcctgagaagaatcctgagccagagcaccgacagcctgaacatgagaaacagaaccctgagcgtggagagcctgatcgacgaggccgaggtgatctacagcgagctgatgagcgacttcgagatggacgagaaggacttcgccgccgacagctggagcctggccgtggacagcagcttcctgcagcagcacaagaaggaggtgatgaagcagcaggacgtgatctacgagctgatccagaccgagctgcaccacgtgagaaccctgaagatcatgaccagactgttcagaaccggcatgctggaggagctgcacctggagcccggcgtggtgcagggcctgttcccctgcgtggacgagctgagcgacatccacaccagattcctgagccagctgctggagagaagaagacaggccctgtgccccggcagcaccagaaacttcgtgatccacagactgggcgacctgctgatcagccagttcagcggccccagcgccgagcagatgtgcaagacctacagcgagttctgcagcagacacagcaaggccctgaagctgtacaaggagctgtacgccagagacaagagattccagcagttcatcagaaaggtgaccagacccgccgtgctgaagagacacggcgtgcaggagtgcatcctgctggtgacccagagaatcaccaagtaccccctgctgatcagcagaatcctgcagcacagccacggcatcgaggaggagagacaggacctgaccaccgccctgggcctggtgaaggagctgctgagcaacgtggacgagggcatctaccagctggagaagggcgccagactgcaggagatctacaacagaatggaccccagagcccagacccccgtgcccggcaagggccccttcggcagagaggagctgctgagaagaaagctgatccacgacggctgcctgctgtggaagaccgccaccggcagattcaaggacgtgctggtgctgctgatgaccgacgtgctggtgttcctgcaggagaaggaccagaagtacatcttccccaccctggacaagcccagcgtggtgagcctgcagaacctgatcgtgagagacatcgccaaccaggagaagggcatgttcctgatcagcgccgccccccccgagatgtacgaggtgcacaccgccagcagagacgacagaagcacctggatcagagtgatccagcagagcgtgagaacctgccccagcagagaggacttccccctgatcgagaccgaggacgaggcctacctgagaagaatcaagatggagctgcagcagaaggacagagccctggtggagctgctgagagagaaggtgggcctgttcgccgagatgacccacttccaggccgaggaggacggcggcagcggcatggccctgcccaccctgcccagaggcctgttcagaagcgagagcctggagagccccagaggcgagagactgctgcaggacgccatcagagaggtggagggcctgaaggacctgctggtgggccccggcgtggagctgctgctgacccccagagagcccgccctgcccctggagcccgacagcggcggcaacaccagccccggcgtgaccgccaacggcgaggccagaaccttcaacggcagcatcgagctgtgcagagccgacagcgacagcagccagagagacagaaacggcaaccagctgagaagcccccaggaggaggccctgcagagactggtgaacctgtacggcctgctgcacggcctgcaggccgccgtggcccagcaggacaccctgatggaggccagattccccgagggccccgagagaagagagaagctgtgcagagccaacagcagagacggcgaggccggcagagccggcgccgcccccgtggcccccgagaagcaggccaccgagctggccctgctgcagagacagcacgccctgctgcaggaggagctgagaagatgcagaagactgggcgaggagagagccaccgaggccggcagcctggaggccagactgagagagagcgagcaggccagagccctgctggagagagaggccgaggaggccagaagacagctggccgccctgggccagaccgagcccctgcccgccgaggccccctgggccagaagacccgtggaccccagaagaagaagcctgcccgccggcgacgccctgtacctgagcttcaaccccccccagcccagcagaggcaccgacagactggacctgcccgtgaccaccagaagcgtgcacagaaacttcgaggacagagagagacaggagctgggcagccccgaggagagactgcaggacagcagcgaccccgacaccggcagcgaggaggagggcagcagcagactgagccccccccacagccccagagacttcaccagaatgcaggacatccccgaggagaccgagagcagagacggcgaggccgtggccagcgagagctag

SEQ ID NO: 61602 - protein, 985 aa, Artificial Sequence
  derived and/or modified sequence
MSRIESLTRARIDRSRELASKTREKEKMKEAKDARYTNGHLFTTISVSGMTMCYACNKSITAKEALICPTCNVTIHNRCKDTLANCTKVKQKQQKAALLKNNTALQSVSLRSKTTIRERPSSAIYPSDSFRQSLLGSRRGRSSLSLAKSVSTTNIAGHFNDESPLGLRRILSQSTDSLNMRNRTLSVESLIDEEVIYSELMSDFEMDEKDFAADSWSLAVDSSFLQQHKKEVMKQQDVIYELIQTELHHVRTLKIMTRLFRTGMLEELHLEPGVVQGLFPCVDELSDIHTRFLSQLLERRRQALCPGSTRNFVIHRLGDLLISQFSGPSAEQMCKTYSEFCSRHSKALKLYKELYARDKRFQQFIRKVTRPAVLKRHGVQECILLVTQRITKYPLLISRILQHSHGIEEERQDLTTALGLVKELLSNVDEGIYQLEKGARLQEIYNRMDPRAQTPVPGKGPFGREELLRRKLIHDGCLLWKTATGRFKDVLVLLMTDVLVFLQEKDQKYIFPTLDKPSVVSLQNLIVRDIANQEKGMFLISAAPPEMYEVHTASRDDRSTWIRVIQQSVRTCPSREDFPLIETEDEAYLRRIKMELQQKDRALVELLREKVGLFAEMTHFQAEEDGGSGMALPTLPRGLFRSESLESPRGERLLQDAIREVEGLKDLLVGPGVELLLTPREPALPLEPDSGGNTSPGVTANGEARTFNGSIELCRADSDSSQRDRNGNQLRSPQEEALQRLVNLYGLLHGLQAAVAQQDTLMEARFPEGPERREKLCRANSRDGEAGRAGAAPVAPEKQATELALLQRQHALLQEELRRCRRLGEERATEAGSLEARLRESEQARALLEREAEEARRQLAALGQTEPLPAEAPWARRPVDPRRRSLPAGDALYLSFNPPQPSRGTDRLDLPVTTRSVHRNFEDRERQELGSPEERLQDSSDPDTGSEEEGSSRLSPPHSPRDFTRMQDIPEETESRDGEAVASES

SEQ ID NO: 61603 - DNA, 2958 bp, Artificial Sequence
  derived and/or modified sequence
atgagccggatcgagagccttacacgcgcgcgcattgaccgaagccgggagttagcctcaaaaacgagagagaaagaaaagatgaaagaggccaaagacgccaggtacaccaatggccatctcttcacaactatttccgtctcaggcatgacgatgtgctatgcctgcaacaagtccataacagctaaggaagcattgatctgtcccacgtgcaatgtcaccatccataacagatgcaaagacacactggcgaattgtaccaaggtgaagcagaagcaacaaaaagccgccttattgaagaataatacagctctgcagagtgtgagcctccgttcaaagaccacaataagggagagacccagttctgccatctatccctctgattccttcagacagtccttactgggttcccgtcggggaaggagctctctgtctctagccaagtccgtgagtaccacaaacatagcaggtcactttaacgacgagtccccccttggattaaggcgcattctctcgcagagcactgattctttgaacatgcgcaaccggacccttagtgtcgagtccctgatagatgaagaagtcatttacagtgagctgatgtccgattttgagatggatgaaaaggatttcgccgcagactcctggtccttggcagtggactcttccttcctgcagcaacataagaaagaagtgatgaaacaacaggacgttatctatgaactaatccagaccgagctgcaccatgttagaactcttaagatcatgacccgtctctttcggaccggcatgcttgaggaattgcaccttgagccgggggtcgtccaggggttatttccctgtgtggacgaactgagtgacatccacactcggttcctctcccagttgctggagagacgcaggcaagcattgtgccccggatcaaccaggaacttcgtgattcatagactcggtgatctgctcatctctcagttctcgggcccctctgctgagcagatgtgtaaaacctattccgagttttgctcacgtcatagcaaagcactcaagctctacaaggaactgtatgcaagagataagcggttccaacagtttatacggaaggtgactcgacccgcggttctgaagcggcacggagtgcaggagtgtattctccttgtaacccaacggatcactaagtatcccctcctgatcagtagaattcttcagcattctcatggcatcgaggaggagagacaggatttgactactgctctcggactcgtaaaggagcttttgtccaatgtggacgagggaatttatcagttggagaagggcgcaaggctacaggagatctataatagaatggatccccgggcgcaaaccccagtgcctgggaagggtccatttgggagggaggagctgctgcggaggaaacttattcacgatggctgtttactgtggaagactgccactgggagattcaaggacgttctggttcttttgatgacagacgtccttgtattcttgcaggaaaaagatcagaaatacatttttcccacactggataagccttctgtcgtgtccctgcaaaacctgattgtgcgggacatcgccaaccaggagaagggaatgtttcttatcagcgccgccccacccgagatgtacgaggtgcacactgcctctagggatgataggagcacctggatcagagtcatccagcagtccgtcaggacatgcccaagccgggaagacttcccactgatcgaaacagaggacgaggcttatctgagaagaattaagatggagctgcaacagaaagatcgagcactggtagagctgctccgcgagaaggtgggtttgtttgcggagatgacgcacttccaggcagaagaagacggcggttctggtatggccctgccaaccctgccgcgtggcctttttcgttccgagtcccttgagtctccccggggagagagactgttgcaggacgctattagggaagtagagggattaaaggacctgctggttgggccaggggtggagctactcctcacgccgcgagaaccagccctgccccttgagccggattccggaggaaacacaagccccggagttaccgccaatggagaggcacgaactttcaatggtagcattgaactctgccgggccgactcagactcaagccagagggaccgaaacggcaatcagctgcggagtccacaagaagaggccctgcaaaggctcgtgaacctgtacgggctcctccacggcctccaggccgcggtggctcagcaggacaccctgatggaggccaggttccctgaaggcccagaaagacgcgaaaaattgtgtcgcgctaactctagagacggagaagccggccgcgccggagccgcccctgttgcccccgaaaaacaggccacagagctcgcgctcctccagcggcaacacgcccttctccaggaagaactccgaaggtgtaggcgcctgggcgaagagagagccactgaggccggcagtctggaggcccgcctgagagagtccgaacaagccagagctctccttgaacgtgaggctgaggaggccagaaggcagttggctgccctgggacagacagagcctctgccagccgaggctccatgggcccggcggccagtggacccccgccgccgttctttacctgcaggagacgccctgtacctgtcttttaacccaccccagccttctaggggcacagatcgtctggatcttcccgttacaacccgatctgtccatcgaaactttgaagacagggagcgtcaggagttggggagtccagaagaaagactgcaggattccagcgaccctgataccggatccgaagaggagggcagttcaagacttagcccccctcactctcctagggactttactagaatgcaggacatcccagaggagaccgaatccagagatggagaagcagttgccagcgagtcctag

SEQ ID NO: 61604 - DNA, 2877 bp, Artificial Sequence
  derived and/or modified sequence
atgaaagaagctaaggatgcccgttacaccaacggtcacctgttcactactatcagcgtgagcggaatgactatgtgttatgcttgtaacaagtccattacagcgaaggaggctttaatctgtcccacctgtaacgtgactatccataaccgatgtaaggacacacttgccaattgtactaaggttaaacagaaacagcaaaaagcagcactgctgaagaacaacacggcactgcagagtgtgagcctgcggagcaagacgaccattcgggagcgtccctctagcgcaatctacccaagtgactctttccggcagtccctgctcggttcgagacgcggccgctcatcactgtccctggccaagagtgtgagcacaactaatatcgccggacacttcaatgacgaaagcccactcggactaaggagaatcctgtcccagagtaccgattcgttgaacatgcggaatcggacgttgtcagtggaatccctcattgatgaggaagtaatctattcagagctgatgtcagattttgagatggatgaaaaggactttgccgcggactcctggagcctggcagtagactcatcgtttcttcagcagcacaagaaggaagtgatgaagcagcaggacgtgatttacgaattaatccaaacagagttgcatcatgtacgcacacttaaaatcatgacgcggctgtttagaacagggatgctggaggaactgcatttagaacctggggtagtgcagggactcttcccctgtgtggacgaactcagtgacatccacaccaggtttctgtcccagctgctggaacggagaagacaggccctctgccccggctctactagaaactttgtcatccatcgcctgggcgaccttcttatctcccagttttcaggcccgagtgctgagcagatgtgcaagacctatagtgagttctgcagtcggcattccaaggctctcaaactttacaaggaattatatgctcgtgataaacggtttcagcagttcataagaaaagtcacacgtccggccgtgctgaaacgccacggggtccaagagtgtatccttctggttactcagagaatcactaaatatcctctgcttattagcagaattttacagcactcccacgggattgaggaagagaggcaagacctgaccaccgccctcgggctcgtgaaggagttgttgtcgaatgtggacgaagggatctatcaattggagaagggcgcccggctgcaggaaatctacaatcggatggatccacgcgcacagacaccagttcctgggaagggtccgttcggcagagaagaactgctccgaagaaagctgatccacgacggttgtctattgtggaaaactgcaacgggtagattcaaggatgtgctcgtcctgctcatgaccgacgtcctggttttcctgcaagagaaagaccaaaagtacatttttcctacacttgataagccatccgtggtttcactgcaaaacctgatcgtgcgggatattgccaatcaggagaaggggatgttcctgatttccgctgccccccctgagatgtacgaagtgcacaccgcctctagggatgacagatcaacctggataagggtaattcagcagtccgtgaggacttgtccatccagggaggacttcccactcattgagactgaagacgaggcctacttgcgccgaattaaaatggaattacagcagaaagacagagcgctggttgaattgctaagggagaaggtgggcttgttcgctgagatgacccacttccaggctgaggaggatgggggcagcggcatggctctaccaactctcccccgtgggctcttcaggtccgaatcgctggaatctccacgtggagagaggctcctacaggacgccatcagagaagtggaaggcttaaaagatttgctcgtaggccctggtgttgagctgctcctaactccacgggaaccggcacttcccctggagcctgatagcggggggaatacctccccaggcgtcacggcaaacggcgaggcccgaactttcaacggctccatcgaactgtgcagggcagatagtgactcttctcaaagggatcggaacgggaaccagctccgctccccacaggaggaggcccttcagcgcctcgtgaacctgtacggccttctgcatggactacaggccgccgtcgcgcaacaagatacgttaatggaggctcggttcccagagggcccagaaaggagggagaagttgtgcagagcgaacagcagagacggggaggcagggagagccggggcagcgccggtcgccccggagaagcaggctacagaactggcattgctgcagagacagcatgccttgctgcaggaggagctacgtaggtgcaggcgcctcggcgaggagagggctacagaggctgggtctttagaagcgcgtctgcgggaatcagaacaagcaagggccctcctcgaaagggaggccgaggaggcccgacgacagttagcggccctgggtcagaccgagccgctgccagccgaggctccatgggcaaggcgccctgtcgaccctcgcagaagaagtctgccagcaggtgatgctctttacctctcatttaatcctccccaacctagccggggcacagataggttggacctgcccgtaactactagatctgtccatcgcaatttcgaagaccgagaacggcaggagcttggatcgccagaggaacggctacaggacagttctgatcccgacacagggagtgaagaagaaggtagctcccggctctcaccgccacactctcctcgcgacttcaccaggatgcaagatatccccgaggaaacggagtcccgagatggagaggctgttgcaagcgaaagttag

SEQ ID NO: 61605 - DNA, 2877 bp, Artificial Sequence
  derived and/or modified sequence
atgaaagaggcaaaggatgctcggtacacgaacgggcatttgtttacgactatttcagtttccgggatgacaatgtgctatgcctgcaacaaatcaatcaccgccaaggaagctctgatctgtccaacctgtaacgtgactatacataacaggtgcaaggacactctggccaactgtacaaaggtgaaacaaaagcaacagaaagcagcactgttgaaaaataataccgccctgcagagtgtatccctgcggagcaagacgacaattagggaacgacccagctccgctatctacccctcggattccttcaggcagagtttactgggttcgcgaaggggcagatcatctttgtcactggccaaatctgtttcaaccactaatatcgcagggcacttcaacgatgagtctccgctggggctcagacgaatcttgtcgcagtccaccgattctctcaacatgaggaaccggacactgtcagtcgaaagcctgatagacgaggaagttatctactccgaactgatgagcgatttcgagatggacgaaaaagacttcgccgctgacagttggtccttggctgtggattcatccttcctgcaacagcataagaaagaggtaatgaaacaacaggacgtgatttatgagctaatacaaaccgagttgcatcatgtgagaactctgaagatcatgactagactgttccgtaccggcatgctggaggagctgcaccttgagcctggcgtggtccagggtttatttccctgtgtggatgaactgtccgatatccacaccaggtttctgagccagctgcttgagagacgccgccaagcactctgtccggggtctacacggaactttgtaatccataggctcggtgatctcctgatatctcagtttagcggaccatctgctgagcagatgtgtaagacttattcggaattctgtagccggcatagcaaggctctgaaattgtacaaggagttatacgctcgggataaacggttccaacagttcatccggaaagttactcgtccggcggtcctcaagagacatggagtgcaggagtgcattctcctcgtcacccagaggattacgaagtacccactcttaattagcaggatactgcagcattctcacggtatagaggaagaaagacaggacttaacaactgcgctggggttggttaaagagctactgagtaatgttgacgaaggtatttatcagctcgagaaaggtgcaaggctgcaggagatctacaacaggatggaccctcgtgctcagacaccggtgccagggaagggcccatttggtcgcgaagagctcctccgcaggaagctgattcatgatggatgccttctgtggaagactgccacgggccgtttcaaggatgtgctggtgctgctaatgaccgacgttctcgtgttcctgcaagaaaaggatcagaaatacatctttccaacactcgacaagccctccgtggtgagcctgcagaatctgattgtgcgagacatagcaaatcaggaaaagggtatgtttctgatttctgcagccccacctgaaatgtacgaggtgcacacagctagtagagacgatagaagtacctggatacgcgtgattcaacagagcgtccggacatgcccatctagggaggactttcctctgattgagactgaggacgaagcttacctacgtcgaattaagatggagctgcagcaaaaggatagagcactggtggagctcctccgcgagaaggtcgggctgtttgcggaaatgacccactttcaagcggaggaggatggggggagtgggatggcacttcctaccctgcccaggggactcttccgttctgaaagcctggagtctcccaggggagagcgactgctgcaggatgccatcagagaggttgaaggactgaaggaccttttggtgggtcctggagtcgagctccttctcacccctagagagcccgctctccccctggagcctgattctgggggtaatactagtcccggcgtgactgccaatggggaggcgagaacctttaatggttccatagaactttgccgcgcggactccgatagcagccaacgcgacaggaacggaaatcagctgagaagtccccaggaagaagcgcttcagagactggttaatttgtatggtctgctgcatggactacaggccgctgtggcacagcaagacacactgatggaggcgcggtttccagagggccccgagcggagggagaagctgtgcagggccaacagtagagatggagaggctggccgcgccggagcagcccctgttgcccccgagaagcaagccaccgagttggcgttactgcagagacaacacgcgctgctgcaggaggagctgcggcgctgccggcgacttggagaggaacgcgccacagaagccgggagtctggaggcgagattacgagagagtgagcaggccagagctctgttagaacgggaggccgaggaggcccgtcgccagctggccgccctgggacagactgaaccccttccagccgaggccccatgggcccggagaccagtggatccgcggcgtagaagtctacccgccggggatgccctctacctgtccttcaaccctccccaaccttcaagggggaccgataggttggatttacctgtgacaacccgcagcgtgcaccgtaactttgaggaccgggaacgacaggagctgggttctcccgaggagcgtctgcaagattcttccgaccccgatacagggtccgaggaggagggcagctctagacttagtccaccacactcaccccgcgatttcacacggatgcaggatatccccgaggaaaccgaatctcgagatggcgaggccgtagcgtcagagtcctag

SEQ ID NO: 61606 - DNA, 2958 bp, Artificial Sequence
  derived and/or modified sequence
atgagccgcatcgagagcctgacccgggccagaattgacaggagccgggagctggccagcaagacccgggagaaggagaagatgaaggaggccaaggatgcccgctacaccaacggccacctgttcaccaccatctctgtgtctggcatgaccatgtgctacgcctgcaacaagagcatcacagccaaggaggccctgatctgccccacctgcaatgtgaccatccacaaccgctgcaaggacaccctggccaactgcaccaaggtgaagcagaagcagcagaaggccgccctgctgaagaacaacacagccctgcagagcgtgtccctgcggagcaagaccaccatccgggagcggcccagcagcgccatctaccccagcgacagcttccggcagagcctgctgggcagccggcggggccgcagcagcctgagcctggccaagtctgtgtccaccaccaacattgctggccacttcaatgatgagagccccctgggcctgcggcgcatcctgagccagagcacagacagcctgaacatgaggaacagaaccctgtctgtggagagcctgattgatgaggaggtgatctacagcgagctgatgtctgactttgagatggatgagaaggactttgctgctgacagctggagcctggccgtggacagcagcttcctgcagcagcacaagaaggaggtgatgaagcagcaggatgtgatctatgagctgatccagacagagctgcaccacgtgaggaccctgaagatcatgaccaggctcttcagaacaggcatgctggaggagctgcacctggagcccggggtggtgcagggcctcttcccctgtgtggatgagctgagtgacatccacacccgcttcctgagccagctgctggagcggcggcggcaggccctgtgccccggcagcaccaggaacttcgtcatccaccggctgggggacctgctgatcagccagttcagcggccccagcgctgagcagatgtgcaagacctacagcgagttctgcagccgccacagcaaggccctgaagctgtacaaggagctgtatgcccgggacaagcgcttccagcagttcatcaggaaggtgaccaggcctgctgtgctgaagagacatggagtgcaggagtgcatcctgctggtgacccagaggatcaccaagtaccccctgctgatcagccgcatcctgcagcacagccatggaattgaggaggagcggcaggacctgaccacagccctgggcctggtgaaggagctgctgagcaatgtggatgagggcatctaccagctggagaagggggcccggctgcaggagatctacaacaggatggacccccgggcccagacccctgtgcctgggaagggccccttcggccgggaggagctgctgcggaggaagctgattcatgatggctgcctgctgtggaagacagccaccggccgcttcaaggatgtgctggtgctgctgatgacagatgtgctggtgttcctgcaggagaaggaccagaagtacatcttccccaccctggacaagcccagcgtggtgtccctgcagaacctgattgtgcgggacatcgccaaccaggagaagggcatgttcctgatctctgctgcccctcctgagatgtatgaggtgcacacagccagcagagatgacaggagcacctggatccgggtcatccagcagagcgtgaggacctgccccagccgggaggacttccccctgattgaaacagaagatgaggcctacctgcggcgcatcaagatggagctgcagcagaaggaccgggccctggtggagctgctgcgggagaaggtgggcctgtttgctgagatgacccacttccaggccgaggaggatggcggcagcggcatggccctgcccaccctgccccggggcctcttccgctctgagagcctggagagccccagaggagagcggctgctgcaggatgccatccgggaggtggagggcctgaaggacctgctggtgggccctggggtggagctgctgctgaccccccgggagcccgccctgcccctggagccagacagcggcggcaacaccagccctggggtgacagccaatggagaggcccggaccttcaacggcagcattgagctgtgcagagctgacagcgacagcagccagagggacagaaatggaaaccagctgcggagcccccaggaggaggccctgcagaggctggtgaacctgtatggcctgctgcacggcctgcaggccgctgtggcccagcaggacaccctgatggaggcccgcttccctgagggccctgagcggcgggagaagctgtgccgggccaacagcagagatggagaggccggccgggccggggccgcccctgtggcccctgagaagcaggccacagagctggccctgctgcagaggcagcacgccctgctgcaggaggagctgcggcgctgccggcggctgggggaggagcgggccacagaagctggcagcctggaggcccggctgcgggagagcgagcaggcccgggccctgctggagcgggaggccgaggaggcccggcggcagctggccgccctgggccagacagagcccctgcctgctgaggccccctgggcccggcggcctgtggaccccaggagaagaagcctgcctgctggagatgccctgtacctgtccttcaaccccccccagcccagccggggcacagaccggctggacctgcctgtgaccaccaggtctgtgcacaggaactttgaggaccgggagcggcaggagctgggcagccctgaggagcggctgcaggacagcagtgaccctgacaccggcagcgaggaggagggcagcagccggctgagccccccccacagcccccgggacttcaccaggatgcaggacatccctgaggagacagagagcagagatggagaggccgtggccagcgagagctag

SEQ ID NO: 61607 - DNA, 2877 bp, Artificial Sequence
  derived and/or modified sequence
atgaaggaggccaaggatgcccgctacaccaacggccacctgttcaccaccatctctgtgtctggcatgaccatgtgctacgcctgcaacaagagcatcacagccaaggaggccctgatctgccccacctgcaatgtgaccatccacaaccgctgcaaggacaccctggccaactgcaccaaggtgaagcagaagcagcagaaggccgccctgctgaagaacaacacagccctgcagagcgtgtccctgcggagcaagaccaccatccgggagcggcccagcagcgccatctaccccagcgacagcttccggcagagcctgctgggcagcagaagaggccgcagcagcctgagcctggccaagtctgtgtccaccaccaacattgctggccacttcaatgatgagagccccctgggcctgcggcgcatcctgagccagagcacagacagcctgaacatgaggaacagaaccctgtctgtggagagcctgattgatgaggaggtgatctacagcgagctgatgtctgactttgagatggatgagaaggactttgctgctgacagctggagcctggccgtggacagcagcttcctgcagcagcacaagaaggaggtgatgaagcagcaggacgtcatctatgagctgatccagacagagctgcaccacgtgaggaccctgaagatcatgaccaggctcttcagaacaggcatgctggaggagctgcacctggagcccggggtggtgcagggcctcttcccctgtgtggatgagctgagtgacatccacacccgcttcctgagccagctgctggagcggcggcggcaggccctgtgccccggcagcaccaggaactttgtgatccaccggctgggggacctgctgatcagccagttcagcggccccagcgctgagcagatgtgcaagacctacagcgagttctgcagccgccacagcaaggccctgaagctgtacaaggagctgtatgcccgggacaagcgcttccagcagttcatcaggaaggtgaccaggcctgctgtgctgaagagacatggagtgcaggagtgcatcctgctggtgacccagaggatcaccaagtaccccctgctgatcagccgcatcctgcagcacagccacggcatcgaggaggagcggcaggacctgaccacagccctgggcctggtgaaggagctgctgagcaatgtggatgagggcatctaccagctggagaagggggcccggctgcaggagatctacaacaggatggacccccgggcccagacccctgtgcctgggaagggccccttcggccgggaggagctgctgcggaggaagctgattcatgatggctgcctgctgtggaagacagccaccggccgcttcaaggatgtgctggtgctgctgatgacagatgtgctggtgttcctgcaggagaaggaccagaagtacatcttccccaccctggacaagcccagcgtggtgtccctgcagaacctgattgtgcgggacatcgccaaccaggagaagggcatgttcctgatctctgctgcccctcctgagatgtatgaggtgcacacagccagcagagatgacaggagcacctggatccgggtcatccagcagagcgtgaggacctgccccagccgggaggacttccccctcatcgagacagaagatgaggcctacctgcggcgcatcaagatggagctgcagcagaaggaccgggccctggtggagctgctgcgggagaaggtgggcctgtttgctgagatgacccacttccaggccgaggaggatggcggcagcggcatggccctgcccaccctgccccggggcctcttccgctctgagagcctggagagccccagaggagagcggctgctgcaggatgccatccgggaggtggagggcctgaaggacctgctggtgggccctggggtggagctgctgctgaccccccgggagcccgccctgcccctggagccagattctgggggcaacaccagccctggggtgacagccaacggggaggcccggaccttcaacggcagcattgagctgtgcagagctgacagcgacagcagccagagggacagaaatggaaaccagctgcggagcccccaggaggaggccctgcagaggctggtgaacctgtatggcctgctgcacggcctgcaggccgctgtggcccagcaggacaccctgatggaggcccgcttccctgagggccctgagcggcgggagaagctgtgccgggccaacagcagagatggagaggccggccgggccggggccgcccctgtggcccctgagaagcaggccacagagctggccctgctgcagaggcagcacgccctgctgcaggaggagctgcggcgctgccggcggctgggggaggagcgggccacagaggccggcagcctggaggcccggctgcgggagagcgagcaggcccgggccctgctggagcgggaggccgaggaggcccggcggcagctggccgccctgggccagacagagcccctgcctgctgaggccccctgggcccggcggcctgtggacccccggcggcgcagcctgcctgctggagatgccctgtacctgtccttcaaccccccccagcccagccggggcacagaccggctggacctgcctgtgaccaccaggtctgtgcacaggaactttgaagatcgggagcggcaggagctgggcagccctgaggagcggctgcaggacagcagtgaccctgacaccggcagcgaggaggagggcagcagccggctgagccccccccacagcccccgggacttcaccaggatgcaggacatccctgaggagacagagagcagagatggagaggccgtggccagcgagagctag

SEQ ID NO: 61608 - DNA, 2958 bp, Artificial Sequence
  derived and/or modified sequence
atgagccggatcgagagcctgacccgggcccggatcgaccggagccgcgagcttgcctcaaagaccagggagaaggaaaaaatgaaggaggctaaggacgcgcgatacaccaacggtcacctgttcacaaccatctcagtgtccgggatgacaatgtgttatgcttgtaataaaagtatcacggccaaggaggccctgatctgtcctacttgcaatgtgactattcacaaccgctgcaaagacaccctagccaactgcacaaaagtgaagcagaaacagcagaaggccgcccttctcaagaataacactgccctacagagcgtgtcacttaggagcaagaccacaattagggagaggcccagctccgctatttatcctagtgactcttttcgtcaatctctgcttgggtcacgccgggggaggagctctttgtcactcgcgaagtcagtcagcacaacgaatatcgccgggcactttaatgacgaatctcctttgggcctacgaagaattctatcccagagtaccgacagcctcaatatgcgaaaccggactctcagcgtcgagtccctgattgatgaagaagtaatctatagcgagcttatgtccgatttcgaaatggacgagaaggactttgccgcagacagctggagtctcgccgtcgactctagcttcctgcaacaacataaaaaagaggtgatgaagcagcaggatgttatctacgaactgatccagacggagcttcaccatgtccgaacactaaaaattatgactagattatttcgcaccggcatgctagaggagctgcacctcgagcccggagtggtacaagggctgttcccatgtgttgacgagctttctgacatccatacaaggttcctgtctcaactactggagcggcgccgtcaagccttgtgtcctggatcaacgcgtaattttgttatccaccgtctgggggacctattaatcagtcagttttccgggccatcggccgaacagatgtgcaagacatatagcgagttctgtagtcgacactcgaaggccctcaagctctataaagagctgtatgctcgcgataaaaggttccagcagttcattaggaaagtgacaaggcccgccgtcttgaaacggcatggcgtacaggaatgtattcttctggtaacacagaggattacgaagtatcctttgctaataagccggatcctgcagcactctcatggtattgaagaggagcgccaggatctgactaccgccctaggattggtgaaagagctgctttccaatgttgacgagggaatctaccaacttgagaaaggtgccaggctgcaagaaatttacaaccgaatggaccccagagcacagaccccagtccctgggaaaggaccattcgggagagaggagctgctacgtagaaagttaattcacgatggatgcctactctggaaaacagccaccggccgcttcaaggacgtgctggtgctcctgatgactgacgtgctagtgtttttgcaggaaaaagaccaaaaatacatcttccccactctggacaagccgtcagtggtgagtcttcaaaacttgattgtcagagatatcgctaatcaggagaagggaatgttcctaatttcagccgccccacctgaaatgtacgaagtgcataccgccagtagggacgacagaagtacttggataagggtgatccaacagtctgtgcggacatgtccctctagggaggacttccctctgattgagacagaggacgaagcatacctgcggaggatcaagatggagctgcagcaaaaagatagggctctggtggaacttttgagagaaaaggttgggttgtttgccgagatgacccatttccaggccgaggaggacggagggagtgggatggccctgccgacacttcccaggggattgttccggtcggagagcctcgaaagtcccagaggcgaaagactgctgcaagacgccatccgagaagtggagggcctaaaggatcttctggtcggtcctggcgtcgagctacttctgacccctcgggagccagcactccctctagaacctgatagtggcgggaatacttcccctggggtaacagccaatggtgaggccagaacatttaacggttctatcgagctgtgtcgcgccgattcggattcttcccagcgggacagaaacggcaaccagctgcgttcgccacaggaggaagctctccaacgactagtcaatctgtatggtcttctccatggcctgcaggcagccgtggcacagcaggacacactgatggaagcacgcttcccagagggtcctgaaaggagggagaaactatgccgggccaacagccgggatggagaggccggtagggccggagccgccccagtagctccagagaagcaggccaccgagttggcactgctccagaggcagcatgccctgctgcaggaagagttgcgcagatgtagaagactgggcgaagagagggcaactgaggcaggatccctggaagctcgactcagagaaagtgagcaggctagagcccttttggaaagggaagctgaagaggctcggaggcagctagctgccctcgggcagacggaaccactgcccgccgaagccccatgggcccgtcggcctgtggatccacgccgcaggtcactccccgccggcgatgctctgtacttaagctttaacccacctcagcctagtaggggaactgaccgcctggacctccctgtcacgacgcgcagcgttcacaggaacttcgaagaccgggaacggcaagaactgggaagtccagaagaacgactgcaagatagtagtgacccggatacggggtcagaagaagaggggagcagccggctatcgcccccgcatagcccccgagacttcacccgcatgcaagacatacccgaggagactgagtcacgcgacggagaagctgtcgccagtgaaagctag

SEQ ID NO: 61609 - DNA, 2877 bp, Artificial Sequence
  derived and/or modified sequence
atgaaggaggccaaggacgcccggtacaccaacggccacctgttcactaccatctccgtgtctgggatgacaatgtgctacgcgtgtaataagtcaatcaccgcaaaggaggccttaatatgtcccacctgtaacgtaaccatacacaatcggtgtaaagacacactagccaattgcaccaaagttaaacagaagcaacagaaagccgctcttctgaagaataacactgcgctccagtcagtctctttgaggagtaagacaacgatcagggaacgcccttcgtctgccatttatccatcggacagcttccggcaatccctcttaggatcccggcggggccgctcgtctctgtccctcgccaaatcagtgtcaactacgaatatagctggtcattttaacgacgagagccctctgggattacgaagaatcctgtctcagagtacggattctttgaatatgaggaaccgcacactcagcgtggagtctttgatcgacgaagaggtcatctactcggagctgatgagtgatttcgagatggacgaaaaggacttcgctgcggactcctggtctctcgctgtggattcctcatttctacagcagcataagaaggaggtcatgaaacagcaggacgtgatctatgagcttatccagaccgagttgcaccacgtgaggactctcaaaattatgactagactctttcgaaccggaatgttagaagaacttcatctcgagcctggagtcgtccaaggcttgtttccctgcgtggacgaactgtctgatatccatactcgcttcctctcccagctgctagagcgcaggcgtcaggctctttgccccggctctacaagaaatttcgtgatccatcgcctgggcgatttacttattagccaattctcagggccttccgccgagcagatgtgtaagacttactctgagttttgctcaagacattctaaagccttgaagctgtacaaagaactgtacgctagagacaagcgttttcagcaatttataaggaaagttacacgacctgcggtactcaaaaggcacggggttcaggaatgcattctccttgtaacacagcggatcacaaaatatccattgctgatctcgcgcattctacagcacagtcacggcattgaggaggagcgccaggacttaacaacagcccttggtctggtgaaagagctgctgtcgaatgtggacgaaggcatttatcaactggagaagggggcacggttgcaagaaatctataacaggatggacccccgggcgcagactccagttcccggcaaggggccctttggtagagaagagctgctccgccgaaagctgatacatgatggctgcctcctttggaagacggctaccgggagatttaaggatgtcttagtgctattgatgacagacgttctggtcttccttcaggaaaaagaccaaaaatatattttccccacactagacaaaccttccgttgtgtctcttcagaatctaattgtccgggacattgccaaccaggaaaaaggcatgttcctgatttcagcagccccccccgaaatgtacgaggtacataccgcctctagagacgaccgcagcacttggattcgggtaattcagcagagtgtgcggacttgccctagtagagaggactttccgctcatcgaaacagaggatgaggcctacctgagaaggataaaaatggagctgcagcagaaggaccgggccctcgtggaactgcttcgggagaaggtcggactatttgctgagatgacacacttccaggcagaagaagacgggggctcagggatggccttaccaactctcccacgggggttatttagatctgagtcactagaatccccgaggggagaacggttgttacaagatgcaatacgagaggtggaggggttgaaggacctactggtgggccctggcgtagagctcctgctgacaccaagggagccggcccttcccctggagcccgactcgggcggtaacaccagccccggagtcactgctaatggagaagcccgaacatttaacgggtctattgagttgtgtagggccgacagcgattcttcccagcgggaccggaatggaaatcagcttaggtctcctcaggaagaagccctgcagagactggtcaacctgtatggattgctccacggactgcaagccgccgttgcccaacaagacactttgatggaagcccggtttcccgagggcccagaacgacgggagaagctgtgtcgcgctaactccagagacggggaggccggcagagctggagctgctccagtagctcctgagaaacaggcaacggagctcgcccttctgcagaggcagcacgctttgctacaggaagagttgcggcgttgtcgacggctgggcgaggaacgggctaccgaggccggtagcctggaggcccggttgcgggagtctgagcaggccagggcactgctggaacgggaagccgaagaagccagacgccagctcgctgccctggggcaaacagagcctctgccagcagaggccccgtgggctcgccggcccgtggacccccgccgccgctcactgcctgcaggcgatgctttgtatctttccttcaacccaccccagccctctagagggaccgatcggcttgatcttcctgtgacaacaagatccgtacaccggaactttgaggatcgcgagaggcaggaactcggcagccctgaagagcggctacaggacagctcagatcccgatacaggatcagaggaggagggctcaagcaggctgtcccctccccattccccccgcgactttacccgtatgcaagatattccagaagagaccgagtcaagggacggggaagccgtggcctctgaaagttag

SEQ ID NO: 61610 - DNA, 2877 bp, Artificial Sequence
  derived and/or modified sequence
atgaaggaggccaaggacgcccggtacaccaacggccacctgttcaccaccatttcagtgagcggtatgactatgtgctatgcatgtaataaaagcataactgcaaaagaggctttgatttgtcctacttgcaatgtcaccattcataatcggtgtaaggacacgctggcaaattgtaccaaggtgaagcagaagcaacagaaggcagctcttctgaagaacaataccgccctccagtcagtgtctctccggtctaagactacgatccgcgagcgcccaagcagcgctatttatccatctgatagttttaggcagagcctattggggagtcgtagaggtagaagctccctgtccctggcgaaatcagtctctaccacaaatattgctggccactttaacgatgagtcccctctgggattacggcggattctgtcccagtctaccgactcactgaacatgcgaaaccggactctgtctgttgaatcccttattgacgaagaggttatttacagcgaactcatgtcagactttgagatggatgagaaagattttgcggctgacagctggagtctggcagtggattcttcatttctgcagcagcacaagaaggaggtaatgaagcagcaagatgtcatatacgaacttatccagaccgaactccatcatgtgcgcactttgaaaatcatgaccaggctgtttaggaccggtatgctggaggaacttcacctagagccaggggttgtacaggggttgtttccctgtgtagacgagctgtctgatattcatacaagatttctcagccagctgctcgaacggagacggcaggctctgtgccctggatccactcgaaattttgtgatacaccgtctgggtgacctgttgattagccagttttctggccctagtgctgaacagatgtgtaagacctattctgagttttgcagccgacacagtaaagctctgaaactatataaggagctttatgctcgcgataagcgcttccaacaatttatcagaaaggtgacaaggcccgccgtgttgaagagacatggggtccaagagtgcatcctcctggtgacacagaggataactaaataccccctactgatcagtcggattctgcaacactcgcatggaatcgaagaggagcgacaagacctaaccaccgcgcttggccttgtgaaagagcttctctccaatgtagatgaaggtatttaccaattggagaagggcgcgcgactccaagagatttacaaccgcatggatcctcgggcccagactccagtgcccggaaaaggcccgttcggcagagaggagctccttaggaggaagctgatacacgatggctgcttgctctggaaaactgctaccggtaggttcaaggacgtgctggtgctgctgatgacagacgtactggtgttcttgcaagagaaggaccaaaagtatattttcccaaccctggacaaaccttctgtggtctccctgcaaaatctgatcgttagagacatcgccaatcaagagaagggtatgttcttaatttctgcggcccccccagagatgtacgaggtacataccgcatcccgagatgacagaagtacatggatacgtgtgatccagcaatcagttaggacatgcccgtctagggaggattttccactgatagagactgaggacgaagcttacctgcggcgcatcaaaatggagctgcagcaaaaagacagagcactggtggaactgctgagggagaaagtcggactgtttgcagagatgacccactttcaggcagaggaagatggtggttcgggcatggctcttcctacattgcctagggggctgttccgaagcgagtcattggaaagccccagaggcgagcgcttacttcaggacgcaattagggaagtggaggggctgaaggatcttcttgtcggccccggcgttgaacttttactcacgcctagggagccagccctgccactggaaccagactcaggtggaaacacatctccgggcgtgacggccaacggtgaagccaggacctttaatggcagcatagagctatgtcgggccgacagcgactcctcccagcgggataggaatggcaatcagctccgatctcctcaggaggaggccctgcagcgtcttgttaacctgtatggcctgttgcacggactccaagccgccgtcgcccagcaggatactcttatggaagcccggttccctgaaggacccgagagaagagaaaaactttgtagagctaactcacgcgacggagaggctggacgggccggcgccgcccccgtcgcccctgagaagcaagcgactgagctggccctgttgcagcgtcaacacgcccttctccaagaggaactgcgccgctgtaggcggctcggggaggagcgggccactgaagcgggttccctggaggctaggctgagggagtcagaacaggccagggctttactggaacgcgaagcggaggaggcgaggcgacagcttgccgccctaggccagactgagcccttacccgccgaagcgccgtgggcaagacgacctgtcgacccacgccggcgaagtctgcccgccggcgatgctctgtacttgagcttcaatccacctcagccttccagaggtacagaccgcctggacttgcctgtgacaacgagaagcgtgcaccggaactttgaagaccgcgaacggcaagaactgggatccccagaagagagactgcaggatagtagcgacccagacacaggtagtgaagaagagggcagctcaagactaagtcccccgcattccccaagagacttcacccggatgcaggatatacctgaagaaactgaaagtcgcgatggtgaggctgtggcttctgagagttag

SEQ ID NO: 61611 - DNA, 2958 bp, Artificial Sequence
  derived and/or modified sequence
atgtctaggatcgagtcgctcacccgggcaaggatcgataggtctcgtgaattggcttctaaaacccgcgagaaagagaagatgaaagaagcgaaggacgctcggtacacgaacgggcacctgttcactaccatttccgtcagtggaatgaccatgtgctacgcttgtaataagtccatcaccgccaaggaggcactgatttgccctacatgtaacgtgaccattcataaccgctgcaaggatacacttgctaactgcactaaagtgaagcagaaacagcagaaagccgctctcttaaagaataatacagccttacagtcagtaagcctcagatcaaagacgaccattcgggaaaggcctagtagtgccatttacccttccgattcctttaggcaatctttactgggctcaaggagaggacggagcagcctctcactggccaagtccgtctctacgaccaatattgccggacactttaatgacgagagtccactcggccttagacgtatcctctctcaatcgactgattctctgaatatgcgcaatcgcactctcagtgtcgagtcacttatcgatgaggaggtgatttactcagaattaatgagcgattttgagatggatgagaaggatttcgctgccgactcctggagtctggctgtcgacagttcttttttgcagcagcacaagaaggaagtcatgaagcaacaggatgtgatttatgagctgatccagacggagttgcaccacgtgcggactcttaagatcatgacacgactgtttagaactggaatgttggaagagctgcatctcgaaccgggagttgtacagggactctttccttgcgttgacgaactgtccgacatacacacccggttcctgtcgcagctgctggagcgaagacggcaggccctctgtccgggtagcacaaggaattttgtgatccaccggcttggtgacctattgatctcccagttctctggccctagcgctgagcagatgtgcaagacttattcagaattctgtagtcggcacagcaaagcgctgaagctgtacaaagagctgtacgcaagagacaagcgatttcaacagtttattcgcaaggtgacaaggcccgctgtcctcaagaggcacggtgtgcaggagtgtatactattggtcactcagagaattacgaagtatccgcttttgatcagtcggattctccaacattcacacgggatcgaggaggaacgccaggaccttaccaccgcacttgggctggtcaaggagctgcttagtaacgtggacgagggaatctaccaactggaaaaaggagccaggctgcaggaaatatataatcggatggacccaagagcccagaccccagtgccaggcaaaggacctttcggtcgtgaggagctgcttcgtcgaaaattgattcacgatggatgtctactgtggaagacggcgaccggtaggttcaaagacgtgctcgtgctgttgatgacggatgtgctcgtgtttctccaggaaaaagaccagaaatacatttttcctacactcgacaagccctccgtcgtgtccctgcaaaacttaattgtgagagacatcgccaatcaagaaaagggaatgtttctcatctctgccgcacctccagagatgtacgaggtccataccgcttctagggacgatagatccacgtggatcagggtgatccagcaaagtgtgagaacatgcccaagcagggaggattttccccttatcgagactgaagacgaagcttatctaagacgcattaagatggagctgcaacagaaggatagagcgctggttgagctcttgagggagaaggtcgggctgtttgccgagatgacccatttccaagccgaggaagacgggggatctgggatggccctgcctacactgcctagagggttgttcaggtcagagagcctcgaaagtcccagaggggaacgactgctgcaggatgccattcgggaggtggaaggattaaaggacttgctggtgggcccaggggtcgaactgctgctgacacctcgagagccggcactgcctctggagcccgactccgggggtaatacgagcccaggagttacggcgaatggcgaagccagaactttcaatgggagcatagagctttgccgggctgattctgactcatcccagagagatcggaatggtaaccagctgcggtctccccaggaggaagcactccagaggttggtgaatttgtacggactgctgcacgggctgcaggctgccgtcgcacagcaggatacactcatggaggcgagattccctgaggggcctgaaaggcgagagaaactctgcagggccaactcccgcgacggcgaagcaggaagagctggggctgcgccagttgcgccagaaaaacaggccaccgagctcgccctactccagcgccagcacgctcttttgcaggaagagctcagacgttgtaggaggctgggcgaagagcgtgctaccgaggcaggttctctcgaggctcgcctgagggagagcgagcaagcacgcgcactgctggaacgagaggctgaggaggcccgacggcaactagctgccctgggacagactgaacccctccccgcagaggctccctgggcgcgtcggcctgtagatccgcgaagacgtagcctgccagcaggcgatgctttgtacctaagctttaaccctccgcaaccaagcaggggcacagaccgcctggatcttcctgttaccacacgaagtgtccataggaactttgaggaccgtgagcgccaggagttggggagtcccgaggaaagactgcaggatagttctgatcctgatacaggtagtgaggaggaggggtcctcacggctttctccgcctcactcacctcgagattttacccgaatgcaagacatcccggaagagactgaaagcagggatggcgaggcagtcgccagcgagtcgtag

SEQ ID NO: 61612 - DNA, 2877 bp, Artificial Sequence
  derived and/or modified sequence
atgaaggaggctaaagatgctaggtataccaatggtcacctgttcaccaccataagcgtgagtggcatgacaatgtgttacgcctgcaacaaatccataaccgccaaagaagctctcatctgtccaacatgtaacgtgacaattcacaatcgctgcaaagacaccctggctaactgcacgaaggtgaaacagaagcagcagaaggctgcactcctcaaaaacaatactgcacttcagagtgtttccctgcggtcgaaaaccaccatccgggaaagaccttccagcgccatctacccttctgattctttccggcagtcattgctaggtagcaggcggggtcgcagctctcttagtcttgccaaatccgtgtccacaaccaatatcgctggacatttcaatgacgaaagcccactcggcttgaggagaattctcagccagtcgaccgacagtctgaacatgcggaatagaactttgagtgttgaaagcctaatcgatgaagaggttatctattccgagctcatgtctgactttgaaatggatgagaaggattttgccgcagattcatggtcgttggcggtagacagtagctttctccagcagcacaagaaggaggtgatgaaacagcaggacgtgatctacgagctcatccagacggagcttcatcacgtccgcactctgaagatcatgactaggctgtttcgcactggtatgctcgaggaacttcaccttgaacctggggtcgttcagggactatttccatgcgtagacgaactatcggatatccatactcgcttcttgtctcagctgctggagcgtcgacgtcaggctctttgccccggttcaacacgcaattttgtaatccacagattgggcgacctcctgatttcccagttctccgggcctagtgccgaacagatgtgcaagacctattccgaattttgctcacggcatagtaaggctctcaaactgtacaaagagctatatgcgagagacaagcggtttcagcagttcatacggaaagtgacccgccctgcagtgcttaagcggcatggcgtgcaggaatgtattttgctggtgactcagaggattacaaagtacccgctgctgatcagccgcatactccagcattctcacggaatagaggaggagcgacaagatctcaccaccgcgctgggccttgtcaaagagctgctttcaaacgtggacgaaggcatctaccagctagagaagggagccaggcttcaagaaatttataatcggatggacccacgcgctcaaactccagtgccaggcaaagggccatttggcagagaggaactcttgcgcagaaagctgatacatgacggctgtttgctttggaagactgcaactggtcgatttaaggatgtcctagtcctgctgatgacagatgtcctggtcttccttcaagagaaggaccaaaaatacatctttccaacactcgacaaaccctccgttgtcagccttcagaatctgatcgtgcgagatattgcaaaccaggaaaagggaatgttcctcatcagcgctgcccctcccgagatgtacgaggttcacacagcttcaagagacgaccggtcaacatggatccgcgtgattcaacaaagcgtcaggacttgtcctagcagagaggatttccccttaatcgagaccgaggacgaggcctacctacgcagaatcaagatggagttgcagcagaaggaccgcgctttagtggagctgctgagggagaaggttggcctattcgctgagatgacccattttcaagcagaggaggacggcggatctgggatggctcttcccaccctgcccagagggctcttccgtagcgaaagtcttgagagccccaggggcgaaagactgctccaggacgctatccgcgaggtggaaggcctgaaggacctgctcgtgggccctggagtggagctactactgaccccacgcgagcccgcactgccccttgaacccgacagcggcggtaatacctctccaggggtgacagctaacggcgaggctcgaacgtttaacgggtcaatcgagctctgccgggcagactccgactcttcacagagggacaggaatggcaatcagctgcgcagccctcaggaggaggctctgcagaggttagttaatctttacggtctgttacatggcttgcaggcagccgtcgcacagcaagatactctcatggaagccagattcccagaaggcccagaaagaagggagaaactctgtcgggctaacagccgcgacggcgaagcaggacgggcaggggcagccccagtggcccctgagaagcaggcaacggaactggctctcctgcagcggcagcatgccctactgcaggaggagctcaggcgttgtcggaggctgggtgaagaacgcgctactgaagcgggtagcctcgaagccagactccgcgaatcagagcaggccagggcactacttgagagagaagccgaggaggcacggcgacagctggcagctctcgggcagactgagccgctgcctgcagaggcaccctgggcacggaggccggtggatcctaggcggcgaagcctccccgcaggcgatgcactatatctgtcctttaacccgccacaaccgagtcgtggcactgaccgcctcgatcttcccgttactacacgcagcgtgcaccggaactttgaggacagagagcgacaggaactggggtccccggaagagcgtctgcaggacagctcagaccccgatactggatctgaggaggagggttctagccgcctctctcctccgcacagtcctagggacttcacaagaatgcaggatattccagaagagacagaatcacgagatggcgaggctgtcgcctccgaatcttag

SEQ ID NO: 61613 - DNA, 2877 bp, Artificial Sequence
  derived and/or modified sequence
atgaaagaagctaaagacgctagatataccaacggtcatctatttactaccattagcgtgagtggaatgacaatgtgctacgcctgcaataagagcatcacagccaaagaggccttaatttgcccaacttgcaacgtaacaatccataatcgatgcaaggacacattggccaactgtaccaaggttaagcaaaaacagcagaaagcagcgctgttgaaaaataacacagctctgcagtccgtgtctctccgctcaaagacgacaatccgcgaaaggccgagctccgccatttacccttccgattcttttaggcagagtttgctcggcagccgtagaggaagatcaagtctgagcctcgcgaagagcgtgtcaacgactaatattgcgggtcactttaacgatgaatcacctctcgggttgaggaggatactttctcagagcaccgatagcttgaacatgagaaaccggactctgtcagttgaatccctcatcgatgaagaggtaatttactccgagttgatgtccgactttgaaatggatgagaaggactttgccgcagactcatggagcttggccgttgacagctccttccttcagcagcataagaaggaggtcatgaagcaacaggatgttatttacgagctgatccagacagagttgcaccatgttagaacgttaaaaatcatgacacgcttattcaggaccggtatgcttgaggaactgcacctggaacctggcgtggtgcaggggctgtttccgtgcgttgatgaactgtccgatatccatacaagattcctttctcagttactggaaagacgcaggcaggccttatgtcctggttccaccaggaacttcgtgatccaccgactgggcgacttactcatttctcagttctccggccctagcgcagagcaaatgtgcaagacttacagcgagttttgttcaagacattctaaagccttgaagctgtacaaagaactctatgcacgggacaaacggttccagcagttcattcgaaaagtcacaaggccggcagtgctgaaaaggcacggggtacaggaatgtatcctcctggtgacgcaacgaattacgaagtaccccttactgataagcaggatactgcagcacagtcatggaatagaagaggagcggcaagacctgacaactgctcttggtcttgtgaaagaactgctgagcaacgtggacgaggggatttatcagctagaaaagggcgctcggttgcaagagatctataaccgtatggatcccagagcccagactcccgtgccaggcaagggcccatttggaagagaggaactcttgcgcaggaagctgatccacgacggatgtctactatggaagacagctactgggagatttaaggacgtgcttgtactcctcatgactgatgtacttgtgttcctgcaggaaaaggatcagaaatatatttttcctacgttggataaaccctccgtggtttccctgcagaatttaatcgtgcgagacatcgcgaaccaggaaaagggcatgttcctgattagtgctgccccacccgagatgtacgaggtgcataccgcgtcaagagacgatcggtccacctggataagagtgattcagcagtctgtgaggacatgcccttcccgggaggattttcctctgatcgagaccgaggacgaggcttatctgcggaggatcaagatggaactgcagcagaaggaccgtgcactggtcgagcttctgcgcgaaaaggtgggtctgttcgcagagatgacccacttccaggccgaggaggatggaggctcgggtatggccctcccgacgctccctaggggtctcttcaggtccgagtcactcgaatcacccaggggggagcgcctgcttcaggatgcaatcagggaagtcgaaggactgaaagatttgttagttggcccaggtgtcgaacttttgttaacgcccagagagcccgcactgcctttagagcccgattctgggggaaatacttcaccaggggtgactgcaaacggtgaggccaggaccttcaacggttccattgagttgtgccgtgcggactctgacagctctcaacgcgatagaaacggcaaccagttacgatccccacaggaggaggctctgcagaggctggttaacctgtacggtctactgcatggcctgcaggcggcagtggctcaacaggataccttgatggaagctcggttccccgaaggaccagaacgacgagagaagctttgccgggcaaattccagggacggggaagctggtagggcaggcgctgcccctgtcgcccctgaaaagcaagcgacagagttggccctcctccagagacagcacgcactgcttcaagaagaactccgtaggtgccggagactaggggaggagagagccaccgaagccggatcactggaggccagattgagggagtctgagcaagctcgagcactgttagagcgtgaggcagaagaagccagacggcaactggcagccttgggccaaacagaaccgcttcccgcagaggccccatgggcaaggcgacccgtggacccaaggcgcagaagcctgcccgcaggagatgctctttacctgtctttcaacccaccgcaacccagtagaggtacagatcgcttagaccttcctgtgaccacacgaagcgtgcatagaaacttcgaagaccgggaacggcaggagttagggagtccagaagagcgcctccaagacagctccgacccagatactggatccgaagaagaaggcagcagccgcttgtctccacctcacagccctagagactttacccggatgcaggacattcctgaggagacagagagcagggatggagaggctgtggcatccgagtcatag

SEQ ID NO: 61614 - DNA, 2958 bp, Artificial Sequence
  derived and/or modified sequence
atgtctcggatcgaatccctcacgcgggcgcggatcgaccggagcagagagctggcgagcaagacccgggaaaaggagaagatgaaggaagccaaggatgcccgctataccaatgggcacctcttcaccaccatttcagtttcaggcatgaccatgtgctatgcctgtaacaagagcatcacagccaaggaagccctcatctgcccaacctgcaatgtgactatccacaaccgctgtaaagacaccctcgccaactgtaccaaggtcaagcagaagcaacagaaagcggccctgctgaagaacaacaccgccttgcagtccgtttctcttcgaagtaagacaaccatccgggagcggccaagctcggccatctacccctccgacagcttccggcagtccctcctgggctcccgccgtggccgctcctccttgtctttagccaagagtgtttctaccaccaacattgctggacatttcaatgatgagtctcccctggggctgcgccggatcctctcacagtccacagactccctcaacatgcggaaccgaaccctatccgtggaatccctcattgacgaagaggtaatctacagtgagctgatgagtgactttgagatggatgagaaggactttgcagctgactcttggagtcttgctgtggacagcagcttcctgcagcagcataaaaaggaggtgatgaagcagcaagatgtcatctatgagctaatccagacagagctgcaccatgtgaggacactgaagatcatgacccgcctcttccgcacggggatgctggaagagctacacttggagccaggagtggtccagggcctgttcccctgcgtggacgagctcagtgacatccatacacgcttcctcagccagctattagaacgccgacgccaggccctgtgccctggcagcacccggaactttgtcatccatcgcttgggtgatctgctcatcagccagttctcaggtcctagtgcggagcagatgtgtaagacctactcggagttctgcagccgccacagcaaggccttaaagctctataaggagctgtacgcccgagacaaacgcttccagcaattcatccggaaagtgacccgccccgccgtgctcaagcggcacggggtacaggagtgcatcctgctggtgactcagcgcatcaccaagtacccgttactcatcagccgcatcctgcagcattcccacgggatcgaggaggagcgccaggacctgaccacagcactggggctagtgaaggagctgctgtccaatgtggacgagggtatttatcagctggagaaaggggcccgtctgcaggagatctacaaccgcatggaccctcgggcccaaaccccagtgcctggcaagggcccctttggccgagaggaacttctgaggcgcaaactcatccacgatggctgcctgctctggaagacagcgacggggcgcttcaaagatgtgctagtgctgctgatgacagatgtactggtgtttctccaggaaaaggaccagaagtacatctttcctaccctggacaagccttcagtggtatcgctgcagaatctaatcgtacgagacattgccaaccaggagaaagggatgtttctgatcagcgcagccccacctgagatgtacgaggtgcacacagcatcccgggatgaccggagcacctggatccgggtcattcagcagagcgtgcgcacatgcccatccagggaggacttccccctgattgagacagaggatgaggcttacctgcggcgaattaagatggagttgcagcagaaggaccgggcactggtggagctgctgcgagagaaggtcgggctgtttgctgagatgacccatttccaggccgaagaggatggtggcagtgggatggccctgcccaccctgcccaggggccttttccgctctgagtcccttgagtcccctcgtggcgagcggctgctgcaggatgccatccgtgaggtggagggtctgaaagacctgctggtggggccaggagtggaactgctcttgacaccccgagagccagccctgcccttggaaccagacagcggtggtaacacgagtcctggggtcactgccaatggtgaggccagaaccttcaatggctccattgaactctgcagagctgactcagactctagccagagggatcgaaatggaaatcagctgagatcaccgcaagaggaggcgttacagcgattggtcaatctctatggacttctacatggcctacaggcagctgtggcccagcaggacactctgatggaagcccggttccctgagggccctgagcggcgggagaagctgtgccgagccaactctcgggatggggaggctggcagggctggggctgcccctgtggcccctgaaaagcaggccacggaactggcattactgcagcggcaacatgcgctgctgcaggaggagctacggcgctgccggcggctaggtgaagaacgggcaaccgaagctggcagcctggaggcccggctccgggagagtgagcaggcccgggcactgctggagcgtgaggccgaagaggctcgaaggcagctggccgccctgggccagaccgagccactcccagctgaggccccctgggcccgcagacctgtggatcctcggcggcgcagcctccccgcaggcgatgccctgtacttgagtttcaaccccccacagcccagccgaggcactgaccgcctggatctacctgtcactactcgctctgtccatcgaaactttgaggaccgagagaggcaggaactggggagccccgaagagcggctgcaagacagcagtgaccctgacactggcagcgaggaggaaggtagcagccgtctgtctccgccccacagtccacgagactttaccagaatgcaggacatcccggaggagacggagagccgcgacggggaggctgtagcctccgagagctaa

SEQ ID NO: 61615 - DNA, 2958 bp, Artificial Sequence
  derived and/or modified sequence
atgagcagaatcgagagcctgaccagagccagaatcgacagaagcagagagctggccagcaagaccagagagaaggagaagatgaaggaggccaaggacgccagatacaccaacggccacctgttcaccaccatcagcgtgagcggcatgaccatgtgctacgcctgcaacaagagcatcaccgccaaggaggccctgatctgccccacctgcaacgtgaccatccacaacagatgcaaggacaccctggccaactgcaccaaggtgaagcagaagcagcagaaggccgccctgctgaagaacaacaccgccctgcagagcgtgagcctgagaagcaagaccaccatcagagagagacccagcagcgccatctaccccagcgacagcttcagacagagcctgctgggcagcagaagaggcagaagcagcctgagcctggccaagagcgtgagcaccaccaacatcgccggccacttcaacgacgagagccccctgggcctgagaagaatcctgagccagagcaccgacagcctgaacatgagaaacagaaccctgagcgtggagagcctgatcgacgaggaggtgatctacagcgagctgatgagcgacttcgagatggacgagaaggacttcgccgccgacagctggagcctggccgtggacagcagcttcctgcagcagcacaagaaggaggtgatgaagcagcaggacgtgatctacgagctgatccagaccgagctgcaccacgtgagaaccctgaagatcatgaccagactgttcagaaccggcatgctggaggagctgcacctggagcccggcgtggtgcagggcctgttcccctgcgtggacgagctgagcgacatccacaccagattcctgagccagctgctggagagaagaagacaggccctgtgccccggcagcaccagaaacttcgtgatccacagactgggcgacctgctgatcagccagttcagcggccccagcgccgagcagatgtgcaagacctacagcgagttctgcagcagacacagcaaggccctgaagctgtacaaggagctgtacgccagagacaagagattccagcagttcatcagaaaggtgaccagacccgccgtgctgaagagacacggcgtgcaggagtgcatcctgctggtgacccagagaatcaccaagtaccccctgctgatcagcagaatcctgcagcacagccacggcatcgaggaggagagacaggacctgaccaccgccctgggcctggtgaaggagctgctgagcaacgtggacgagggcatctaccagctggagaagggcgccagactgcaggagatctacaacagaatggaccccagagcccagacccccgtgcccggcaagggccccttcggcagagaggagctgctgagaagaaagctgatccacgacggctgcctgctgtggaagaccgccaccggcagattcaaggacgtgctggtgctgctgatgaccgacgtgctggtgttcctgcaggagaaggaccagaagtacatcttccccaccctggacaagcccagcgtggtgagcctgcagaacctgatcgtgagagacatcgccaaccaggagaagggcatgttcctgatcagcgccgccccccccgagatgtacgaggtgcacaccgccagcagagacgacagaagcacctggatcagagtgatccagcagagcgtgagaacctgccccagcagagaggacttccccctgatcgagaccgaggacgaggcctacctgagaagaatcaagatggagctgcagcagaaggacagagccctggtggagctgctgagagagaaggtgggcctgttcgccgagatgacccacttccaggccgaggaggacggcggcagcggcatggccctgcccaccctgcccagaggcctgttcagaagcgagagcctggagagccccagaggcgagagactgctgcaggacgccatcagagaggtggagggcctgaaggacctgctggtgggccccggcgtggagctgctgctgacccccagagagcccgccctgcccctggagcccgacagcggcggcaacaccagccccggcgtgaccgccaacggcgaggccagaaccttcaacggcagcatcgagctgtgcagagccgacagcgacagcagccagagagacagaaacggcaaccagctgagaagcccccaggaggaggccctgcagagactggtgaacctgtacggcctgctgcacggcctgcaggccgccgtggcccagcaggacaccctgatggaggccagattccccgagggccccgagagaagagagaagctgtgcagagccaacagcagagacggcgaggccggcagagccggcgccgcccccgtggcccccgagaagcaggccaccgagctggccctgctgcagagacagcacgccctgctgcaggaggagctgagaagatgcagaagactgggcgaggagagagccaccgaggccggcagcctggaggccagactgagagagagcgagcaggccagagccctgctggagagagaggccgaggaggccagaagacagctggccgccctgggccagaccgagcccctgcccgccgaggccccctgggccagaagacccgtggaccccagaagaagaagcctgcccgccggcgacgccctgtacctgagcttcaaccccccccagcccagcagaggcaccgacagactggacctgcccgtgaccaccagaagcgtgcacagaaacttcgaggacagagagagacaggagctgggcagccccgaggagagactgcaggacagcagcgaccccgacaccggcagcgaggaggagggcagcagcagactgagccccccccacagccccagagacttcaccagaatgcaggacatccccgaggagaccgagagcagagacggcgaggccgtggccagcgagagctag

SEQ ID NO: 61616 - DNA, 2877 bp, Artificial Sequence
  derived and/or modified sequence
atgaaggaggccaaggacgccagatacaccaacggccacctgttcaccaccatcagcgtgagcggcatgaccatgtgctacgcctgcaacaagagcatcaccgccaaggaggccctgatctgccccacctgcaacgtgaccatccacaacagatgcaaggacaccctggccaactgcaccaaggtgaagcagaagcagcagaaggccgccctgctgaagaacaacaccgccctgcagagcgtgagcctgagaagcaagaccaccatcagagagagacccagcagcgccatctaccccagcgacagcttcagacagagcctgctgggcagcagaagaggcagaagcagcctgagcctggccaagagcgtgagcaccaccaacatcgccggccacttcaacgacgagagccccctgggcctgagaagaatcctgagccagagcaccgacagcctgaacatgagaaacagaaccctgagcgtggagagcctgatcgacgaggaggtgatctacagcgagctgatgagcgacttcgagatggacgagaaggacttcgccgccgacagctggagcctggccgtggacagcagcttcctgcagcagcacaagaaggaggtgatgaagcagcaggacgtgatctacgagctgatccagaccgagctgcaccacgtgagaaccctgaagatcatgaccagactgttcagaaccggcatgctggaggagctgcacctggagcccggcgtggtgcagggcctgttcccctgcgtggacgagctgagcgacatccacaccagattcctgagccagctgctggagagaagaagacaggccctgtgccccggcagcaccagaaacttcgtgatccacagactgggcgacctgctgatcagccagttcagcggccccagcgccgagcagatgtgcaagacctacagcgagttctgcagcagacacagcaaggccctgaagctgtacaaggagctgtacgccagagacaagagattccagcagttcatcagaaaggtgaccagacccgccgtgctgaagagacacggcgtgcaggagtgcatcctgctggtgacccagagaatcaccaagtaccccctgctgatcagcagaatcctgcagcacagccacggcatcgaggaggagagacaggacctgaccaccgccctgggcctggtgaaggagctgctgagcaacgtggacgagggcatctaccagctggagaagggcgccagactgcaggagatctacaacagaatggaccccagagcccagacccccgtgcccggcaagggccccttcggcagagaggagctgctgagaagaaagctgatccacgacggctgcctgctgtggaagaccgccaccggcagattcaaggacgtgctggtgctgctgatgaccgacgtgctggtgttcctgcaggagaaggaccagaagtacatcttccccaccctggacaagcccagcgtggtgagcctgcagaacctgatcgtgagagacatcgccaaccaggagaagggcatgttcctgatcagcgccgccccccccgagatgtacgaggtgcacaccgccagcagagacgacagaagcacctggatcagagtgatccagcagagcgtgagaacctgccccagcagagaggacttccccctgatcgagaccgaggacgaggcctacctgagaagaatcaagatggagctgcagcagaaggacagagccctggtggagctgctgagagagaaggtgggcctgttcgccgagatgacccacttccaggccgaggaggacggcggcagcggcatggccctgcccaccctgcccagaggcctgttcagaagcgagagcctggagagccccagaggcgagagactgctgcaggacgccatcagagaggtggagggcctgaaggacctgctggtgggccccggcgtggagctgctgctgacccccagagagcccgccctgcccctggagcccgacagcggcggcaacaccagccccggcgtgaccgccaacggcgaggccagaaccttcaacggcagcatcgagctgtgcagagccgacagcgacagcagccagagagacagaaacggcaaccagctgagaagcccccaggaggaggccctgcagagactggtgaacctgtacggcctgctgcacggcctgcaggccgccgtggcccagcaggacaccctgatggaggccagattccccgagggccccgagagaagagagaagctgtgcagagccaacagcagagacggcgaggccggcagagccggcgccgcccccgtggcccccgagaagcaggccaccgagctggccctgctgcagagacagcacgccctgctgcaggaggagctgagaagatgcagaagactgggcgaggagagagccaccgaggccggcagcctggaggccagactgagagagagcgagcaggccagagccctgctggagagagaggccgaggaggccagaagacagctggccgccctgggccagaccgagcccctgcccgccgaggccccctgggccagaagacccgtggaccccagaagaagaagcctgcccgccggcgacgccctgtacctgagcttcaaccccccccagcccagcagaggcaccgacagactggacctgcccgtgaccaccagaagcgtgcacagaaacttcgaggacagagagagacaggagctgggcagccccgaggagagactgcaggacagcagcgaccccgacaccggcagcgaggaggagggcagcagcagactgagccccccccacagccccagagacttcaccagaatgcaggacatccccgaggagaccgagagcagagacggcgaggccgtggccagcgagagctag

SEQ ID NO: 61617 - protein, 484 aa, Artificial Sequence
  derived and/or modified sequence
MRHSKRTYCPDWDDKDWDYGKWRSSSSHKRRKRSHSSAQENKRCKYNHSKMCDSHYLESRSINEKDYHSRRYIDEYRNDYTQGCEPGHRQRDHESRYQNHSSKSSGRSGRSSYKSKHRIHHSTSHRRSHGKSHRRKRTRSVEDDEEGHLICQSGDVLSARYEIVDTLGEGAFGKVVECIDHKAGGRHVAVKIVKNVDRYCEAARSEIQVLEHLNTTDPNSTFRCVQMLEWFEHHGHICIVFELLGLSTYDFIKENGFLPFRLDHIRKMAYQICKSVNFLHSNKLTHTDLKPENILFVQSDYTEAYNPKIKRDERTLINPDIKVVDFGSATYDDEHHSTLVSTRHYRAPEVILALGWSQPCDVWSIGCILIEYYLGFTVFPTHDSKEHLAMMERILGPLPKHMIQKTRKRKYFHHDRLDWDEHSSAGRYVSRRCKPLKEFMLSQDVEHERLFDLIQKMLEYDPAKRITLREALKHPFFDLLKKSI

SEQ ID NO: 61618 - protein, 526 aa, Artificial Sequence
  derived and/or modified sequence
MAAGRRPASALWPERRGSPLRGDLLGFQNVREPSSCGETLSGMRHSKRTYCPDWDDKDWDYGKWRSSSSHKRRKRSHSSAQENKRCKYNHSKMCDSHYLESRSINEKDYHSRRYIDEYRNDYTQGCEPGHRQRDHESRYQNHSSKSSGRSGRSSYKSKHRIHHSTSHRRSHGKSHRRKRTRSVEDDEEGHLICQSGDVLSARYEIVDTLGEGAFGKVVECIDHKAGGRHVAVKIVKNVDRYCEAARSEIQVLEHLNTTDPNSTFRCVQMLEWFEHHGHICIVFELLGLSTYDFIKENGFLPFRLDHIRKMAYQICKSVNFLHSNKLTHTDLKPENILFVQSDYTEAYNPKIKRDERTLINPDIKVVDFGSATYDDEHHSTLVSTRHYRAPEVILALGWSQPCDVWSIGCILIEYYLGFTVFPTHDSKEHLAMMERILGPLPKHMIQKTRKRKYFHHDRLDWDEHSSAGRYVSRRCKPLKEFMLSQDVEHERLFDLIQKMLEYDPAKRITLREALKHPFFDLLKKSI

SEQ ID NO: 61619 - DNA, 1581 bp, Artificial Sequence
  derived and/or modified sequence
atggcagccggcaggcggccagcgtctgcactgtggccagagaggcggggctcccccctccgaggggatctcttaggatttcagaacgtccgggaacccagttcctgcggggagactctgtccgggatgcgacactccaaaaggacgtactgccccgactgggacgacaaggactgggactacggtaaatggcgctcctcctccagccacaaacgtcgaaagcgctcccattcctcagctcaggagaacaagcgctgtaaatataatcatagcaagatgtgtgacagtcattatctggaaagcaggtcaatcaatgagaaggactaccattcaaggcgctacatcgatgaataccggaacgattatacacagggctgtgagcccggacatcggcagcgcgaccacgagtcacgttaccagaatcactcgtcaaaatcctccggccgctcaggccgaagctcatacaaaagcaagcacagaatccatcacagcacgagccaccgaagaagtcatggaaaatcgcaccgccgtaagagaacgagatctgtcgaagacgacgaggagggacatttaatctgccagtcgggcgatgttctctcagcccgttacgaaatcgtcgatacacttggcgaaggggccttcggtaaagtggtggagtgcattgatcataaagcaggaggaagacacgtggccgttaaaattgttaaaaatgtagataggtactgcgaagcggctagatctgagattcaggttctggagcacctgaatacaacggatcctaatagcacctttcggtgtgtgcaaatgctcgaatggttcgagcatcacggtcacatctgtatcgtgttcgagctattgggcctgagtacatacgatttcataaaggagaatggcttcctcccatttaggttagaccacatcaggaaaatggcctaccagatttgcaaaagcgtgaactttcttcatagcaataaactgacccatacggatctaaaacctgagaatatattattcgtccagtctgactatactgaggcctataatccaaagatcaaacgggatgaacgaactctgataaatcccgatattaaagtggtggatttcggcagcgctacctacgacgacgaacaccacagtacgttggtcagtactcgccactacagagcccctgaagtgatcttggctctgggctggtcccagccttgcgacgtgtggagtatcggctgtatactcattgagtattatcttggatttaccgtcttcccgacacacgatagcaaggagcacctcgcaatgatggagcgcatcttgggcccgttaccgaaacacatgatccagaaaaccagaaagcgtaagtacttccaccacgatcgcttggattgggatgagcactccagtgctggcagatatgtgagcaggcggtgtaagccccttaaggaattcatgctgtcccaggatgtggaacatgaacggttgtttgaccttattcagaagatgttggagtatgaccctgctaagaggataaccttgagagaagccttgaaacatccatttttcgatctactcaaaaaatctatctag

SEQ ID NO: 61620 - DNA, 1581 bp, Artificial Sequence
  derived and/or modified sequence
atggctgctggaagaagacctgccagcgccctgtggccagagcggcggggcagccccctgcggggggacctgctgggcttccagaatgtgcgggagcccagcagctgtggggagaccctgagcggcatgaggcacagcaagaggacctactgcccagactgggatgacaaggactgggactatggcaagtggaggagcagcagcagccacaagaggaggaagaggagccacagcagcgcccaggagaacaagcgctgcaagtacaaccacagcaagatgtgtgacagccactacctggagagccgcagcatcaatgagaaggactaccacagccgccgctacattgatgagtacagaaatgactacacccagggctgtgagcccggccaccggcagagggaccacgagagccgctaccagaaccacagcagcaagagcagcggccgcagcggccgcagcagctacaagagcaagcaccgcatccaccacagcaccagccaccggcgcagccacggcaagagccacaggaggaagaggaccaggtctgtggaggatgatgaggagggccacctgatctgccagagcggagatgtgctgagcgcccgctatgaaattgtggacaccctgggggagggcgccttcggcaaggtggtggagtgcatcgaccacaaggccggcggcagacatgtggccgtgaagatcgtgaagaatgtggaccgctactgtgaggccgcccggtctgagatccaggtgctggagcacctgaacaccacagaccccaacagcaccttccgctgtgtgcagatgctggagtggtttgagcaccacggccacatctgcatcgtgtttgagctgctgggcctgagcacctatgacttcatcaaggaaaatggcttcctgcccttccggctggaccacatcaggaagatggcctaccagatctgcaagtctgtgaacttcctgcacagcaacaagctgacccacacagacctgaagccagagaacatcctgtttgtgcagagcgactacacagaggcctacaaccccaagatcaagagagatgagaggaccctcatcaacccagacatcaaggtggtggactttggcagcgccacctatgatgatgagcaccacagcaccctggtgtccaccaggcactaccgggcccctgaggtgatcctggccctgggctggagccagccctgtgatgtgtggagcatcggctgcatcctgattgagtactacctgggcttcaccgtcttccccacccatgacagcaaggagcacctggccatgatggagcgcatcctgggccccctgcccaagcacatgatccagaagaccaggaagaggaagtacttccaccacgaccggctggactgggatgagcacagcagcgctggccgctacgtgtcccggcgctgcaagcccctgaaggagttcatgctgagccaggatgtggagcacgagcggctgtttgacctgatccagaagatgctggagtatgaccctgccaagaggatcaccctgcgggaggccctgaagcaccccttctttgacctgctgaagaagagcatctag

SEQ ID NO: 61621 - DNA, 1581 bp, Artificial Sequence
  derived and/or modified sequence
atggccgccggccggcggcccgccagcgccctgtggcccgagcggaggggcagtcctttgcgcggcgacttactggggttccaaaatgtgagggaaccttcttcttgcggtgaaacccttagcggcatgaggcacagtaagcggacatactgcccagattgggacgacaaggattgggactatggcaaatggagaagcagcagctctcacaagaggcgcaagagaagtcattcttcagctcaggagaataaaagatgtaaatataaccattctaagatgtgtgactctcactatctcgagtcccggtctattaatgagaaagactatcattctcgcaggtacatcgacgaataccgcaatgactatacccagggctgtgagcccggccacagacagcgggatcacgaaagcaggtaccagaatcattcctctaagagctccggcaggagcggaaggtcctcttacaaatctaaacacagaatccaccattcgacaagccaccggcgcagccacgggaagagtcatcgacgcaagaggacccgcagtgtcgaagatgacgaggaaggtcatctgatctgtcagagcggggatgtgttgtcagcgcggtacgaaatcgtggatactcttggtgaaggggccttcggcaaggtagttgagtgtattgatcacaaagcaggcggtcggcatgtcgctgttaagatcgttaaaaatgttgatcgctactgtgaagcggccaggtcagagatccaggttctcgagcatcttaacacaaccgacccaaattcgacgtttcgttgcgtgcagatgctggaatggtttgagcaccacggccatatttgtatcgtattcgagctattgggactctctacatatgacttcattaaagagaacggcttcctcccatttcgtctggatcacatccgcaagatggcctaccagatttgcaagtccgttaactttttgcacagtaacaagttgactcataccgacttgaagcccgaaaacatcctattcgtgcagagtgactacaccgaagcgtataaccccaagatcaaacgggacgagagaacactgattaaccctgatatcaaagtggtggattttggaagcgcgacttatgatgatgagcatcactcaacactggtgtcaacccgccattaccgcgcgcctgaggttatcctcgctcttggatggtcccaaccgtgcgacgtctggagtatcggctgcattctgatcgagtactatctggggttcacagtgtttccaacccatgatagcaaggagcacctcgcgatgatggagcgaattctgggaccactgccaaagcacatgattcagaagacaagaaaacggaaatatttccatcacgatcgacttgactgggacgagcatagttcagctggccggtacgtctcacgtcgatgcaagcctctgaaggagtttatgctttctcaggatgtggaacacgagaggctcttcgatcttatacagaaaatgctagagtacgacccagcgaagagaataacactgagagaagcccttaaacacccattcttcgatctgcttaaaaagtcaatctag

SEQ ID NO: 61622 - DNA, 1581 bp, Artificial Sequence
  derived and/or modified sequence
atggctgccggacgcagaccagcctccgcactgtggcccgagcggcgagggtctcctttaaggggcgacttgctgggttttcagaatgtcagagagccgtcttcttgcggcgaaacactttcaggtatgcgacactccaaaaggacctactgtcctgattgggatgataaggattgggattatggcaagtggcggtcaagctcctcacacaaaaggcgcaagcggtcccactccagcgcccaggagaacaaaagatgcaagtacaaccacagcaagatgtgtgattcacactacctggagtcaaggagtatcaacgagaaggactaccacagccggaggtatattgacgaataccggaacgattacacccaggggtgcgagccagggcaccgccagagagaccacgagagtagatatcagaatcatagctcaaaatcatcgggtcggtcggggaggagttcctacaaatccaaacataggattcatcattcgacctcccacaggcgatcacatggtaaatcccatagaaggaaaagaaccaggtccgttgaggatgatgaggagggccacctgatctgccagtccggcgatgtattgagcgcacgctacgagattgtggatacccttggagaaggcgctttcgggaaggtggtggagtgtatcgaccacaaggcagggggaaggcacgtggccgttaagatcgtgaagaatgttgacaggtattgtgaggctgcacggagtgagatccaagtgctcgaacatttaaacacaaccgacccaaattccacttttagatgcgtccaaatgctggaatggttcgaacaccacggacacatctgcattgtatttgagctcctcggcttaagtacttacgatttcattaaggaaaatggcttcctcccctttagattggaccacattcggaaaatggcttaccagatctgtaaatccgtgaattttcttcactctaataagttaacccacaccgacctcaagccggagaatatcctgtttgtgcagtctgattatacggaggcctataaccccaaaatcaagcgggatgaacggacattaatcaacccagacattaaagtcgtcgactttggtagcgcaacgtacgacgatgagcaccacagtactctggtttccactcgtcactaccgcgcaccagaggttatcttggcgttgggatggtctcagccatgtgacgtgtggtcaattggctgtatcttgatagaatactacctggggtttaccgttttcccaacacacgatagcaaagagcatctggcaatgatggaaaggatcctgggacctttacccaaacacatgattcaaaaaactcggaaacgaaagtatttccatcacgatcgactggattgggatgagcactcttcagccggaaggtacgtgagtcgcagatgcaagccactcaaggagtttatgctatctcaggacgtagagcacgagcggttgtttgacctcatccaaaaaatgttggagtatgaccctgctaaacgtatcaccttgagggaggccctgaaacatccctttttcgatctgcttaaaaagtcaatctag

SEQ ID NO: 61623 - DNA, 2026 bp, Artificial Sequence
  derived and/or modified sequence
aagacgcaggagggagcggactaggtgacagggccgttcctgtgagcctcgcgggcgcctggcgatgcccccttttcctgcttgtttgctgcccgccgtccccggcgcgacgactgcctgctcccttcactcccaggctgcacagtggcggcgcgcccctctttcctgcgcggccgagcctgtcgccgccggatccggcctgcgggggtagttacggtgtttgctaggccggccgccctcttggagcttctgccctccgctgaggaagcggcgccgcctgacgcgggacggtcgggcgggcgccatgttgtgaaccgcctcggcggagctgtaagatggcggctgggcggaggccggcttcggccctgtggccggaaaggcgaggctccccgttgaggggggatttgctggggttccagaatgtgcgtgagccaagcagctgtggggaaacgttgtctggaatgagacactcaaagagaacttactgtcctgattgggatgacaaggattgggattatggaaaatggaggagcagcagcagtcataaaagaaggaagagatcacatagcagtgcccaggagaacaagcgctgcaaatacaatcactctaaaatgtgtgatagccattatttggaaagcaggtctataaatgagaaagattatcatagtcgacgctacattgatgagtacagaaatgactacactcaaggatgtgaacctggacatcgccaaagagaccatgaaagccggtatcagaaccatagtagcaagtcttctggtagaagtggaagaagtagttataaaagcaaacacaggattcaccacagtacttcacatcgtcgttcacatgggaagagtcaccgaaggaaaagaaccaggagtgtagaggatgatgaggagggtcacctgatctgtcagagtggagacgtactaagtgcaagatatgaaattgttgatactttaggtgaaggagcttttggaaaagttgtggagtgcatcgatcataaagcgggaggtagacatgtagcagtaaaaatagttaaaaatgtggatagatactgtgaagctgctcgctcagaaatacaagttctggaacatctgaatacaacagaccccaacagtactttccgctgtgtccagatgttggaatggtttgagcatcatggtcacatttgcattgtttttgaactattgggacttagtacttacgacttcattaaagaaaatggttttctaccatttcgactggatcatatcagaaagatggcatatcagatatgcaagtctgtgaattttttgcacagtaataagttgactcacacagacttaaagcctgaaaacatcttatttgtgcagtctgactacacagaggcgtataatcccaaaataaaacgtgatgaacgcaccttaataaatccagatattaaagttgtagactttggtagtgcaacatatgatgacgaacatcacagtacattggtatctacaagacattatagagcacctgaagttattttagccctagggtggtcccaaccatgtgatgtctggagcataggatgcattcttattgaatactatcttgggtttaccgtatttccaacacacgatagtaaggagcatttagcaatgatggaaaggattcttggacctctaccaaaacatatgatacagaaaaccaggaaacgtaaatattttcaccacgatcgattagactgggatgaacacagttctgccggcagatatgtttcaagacgctgtaaacctctgaaggaatttatgctttctcaagatgttgaacatgagcgtctctttgacctcattcagaaaatgttggagtatgatccagccaaaagaattactctcagagaagccttaaagcatcctttctttgaccttctgaagaaaagtatatagatctgtaattggacagctctctcgaagagatcttacagactgtatcagtctaatttttaaattttaagttattttgtacagctttgtaaattcttaacatttttatattg

SEQ ID NO: 61624 - DNA, 1581 bp, Artificial Sequence
  derived and/or modified sequence
atggccgccggcagaagacccgccagcgccctgtggcccgagagaagaggcagccccctgagaggcgacctgctgggcttccagaacgtgagagagcccagcagctgcggcgagaccctgagcggcatgagacacagcaagagaacctactgccccgactgggacgacaaggactgggactacggcaagtggagaagcagcagcagccacaagagaagaaagagaagccacagcagcgcccaggagaacaagagatgcaagtacaaccacagcaagatgtgcgacagccactacctggagagcagaagcatcaacgagaaggactaccacagcagaagatacatcgacgagtacagaaacgactacacccagggctgcgagcccggccacagacagagagaccacgagagcagataccagaaccacagcagcaagagcagcggcagaagcggcagaagcagctacaagagcaagcacagaatccaccacagcaccagccacagaagaagccacggcaagagccacagaagaaagagaaccagaagcgtggaggacgacgaggagggccacctgatctgccagagcggcgacgtgctgagcgccagatacgagatcgtggacaccctgggcgagggcgccttcggcaaggtggtggagtgcatcgaccacaaggccggcggcagacacgtggccgtgaagatcgtgaagaacgtggacagatactgcgaggccgccagaagcgagatccaggtgctggagcacctgaacaccaccgaccccaacagcaccttcagatgcgtgcagatgctggagtggttcgagcaccacggccacatctgcatcgtgttcgagctgctgggcctgagcacctacgacttcatcaaggagaacggcttcctgcccttcagactggaccacatcagaaagatggcctaccagatctgcaagagcgtgaacttcctgcacagcaacaagctgacccacaccgacctgaagcccgagaacatcctgttcgtgcagagcgactacaccgaggcctacaaccccaagatcaagagagacgagagaaccctgatcaaccccgacatcaaggtggtggacttcggcagcgccacctacgacgacgagcaccacagcaccctggtgagcaccagacactacagagcccccgaggtgatcctggccctgggctggagccagccctgcgacgtgtggagcatcggctgcatcctgatcgagtactacctgggcttcaccgtgttccccacccacgacagcaaggagcacctggccatgatggagagaatcctgggccccctgcccaagcacatgatccagaagaccagaaagagaaagtacttccaccacgacagactggactgggacgagcacagcagcgccggcagatacgtgagcagaagatgcaagcccctgaaggagttcatgctgagccaggacgtggagcacgagagactgttcgacctgatccagaagatgctggagtacgaccccgccaagagaatcaccctgagagaggccctgaagcaccccttcttcgacctgctgaagaagagcatctag

SEQ ID NO: 61625 - protein, 225 aa, Artificial Sequence
  derived and/or modified sequence
MKAAVDLKPTLTIIKTEKVDLELFPSPGKLGGQDSFESIESYDSCDRLTQSWSSQSSFNSLQRVPSYDSFDSEDYPAALPNHKPKGTFKDYVRDRADLNKDKPVIPAAALAGYTGSGPIQLWQFLLELLTDKSCQSFISWTGDGWEFKLSDPDEVARRWGKRKNKPKMNYEKLSRGLRYYYDKNIIHKTAGKRYVYRFVCDLQSLLGYTPEELHAMLDVKPDADE

SEQ ID NO: 61626 - DNA, 678 bp, Artificial Sequence
  derived and/or modified sequence
atgaaggccgccgtggacctgaagcccaccctgaccatcatcaagaccgagaaggtggacctggagctgttccccagccccggcaagctgggcggccaggacagcttcgagagcatcgagagctacgacagctgcgacagactgacccagagctggagcagccagagcagcttcaacagcctgcagagagtgcccagctacgacagcttcgacagcgaggactaccccgccgccctgcccaaccacaagcccaagggcaccttcaaggactacgtgagagacagagccgacctgaacaaggacaagcccgtgatccccgccgccgccctggccggctacaccggcagcggccccatccagctgtggcagttcctgctggagctgctgaccgacaagagctgccagagcttcatcagctggaccggcgacggctgggagttcaagctgagcgaccccgacgaggtggccagaagatggggcaagagaaagaacaagcccaagatgaactacgagaagctgagcagaggcctgagatactactacgacaagaacatcatccacaagaccgccggcaagagatacgtgtacagattcgtgtgcgacctgcagagcctgctgggctacacccccgaggagctgcacgccatgctggacgtgaagcccgacgccgacgagtag

SEQ ID NO: 61627 - DNA, 678 bp, Artificial Sequence
  derived and/or modified sequence
atgaaagccgcagtggatctcaagcctacactgaccattatcaagacggagaaggtcgacttggaactctttccctccccggggaagctggggggacaggacagtttcgagtccattgagagctatgactcttgtgaccgcttaacacagagttggtcatcacagtcttcttttaactctttacaaagagttccctcctacgattcattcgacagcgaggactacccggcggccttgcctaatcataagccaaagggtacattcaaggactacgtgagggacagggcagacttgaacaaagacaagccagtcatccctgctgccgctctggccggctatactggcagcggaccaattcagctttggcagtttttattagagttgttgacagacaagtcatgccagagtttcattagttggaccggtgacggctgggagttcaaactgtctgaccctgacgaggttgctaggaggtggggaaaacgcaaaaacaaacccaagatgaattatgagaagctctcccgcggcctgaggtattactacgacaaaaatataattcacaaaaccgcaggaaagaggtatgtctaccgattcgtgtgtgacctgcaatctctccttgggtacaccccagaagaacttcatgctatgctggatgtgaaaccagatgccgacgagtag

SEQ ID NO: 61628 - DNA, 678 bp, Artificial Sequence
  derived and/or modified sequence
atgaaggctgctgtggacctgaagcccaccctgaccatcatcaagacagagaaggtggacctggagctgttccccagccctgggaagctgggcggccaggacagctttgagagcattgagagctatgacagctgtgaccggctgacccagagctggagcagccagagcagcttcaacagcctgcagagggtgcccagctatgacagctttgacagcgaggactacccagctgccctgcccaaccacaagcccaagggcaccttcaaggactatgtgcgggacagagctgacctgaacaaggacaagcctgtgatcccagctgctgccctggccggctacacaggcagcggccccatccagctgtggcagttcctgctggagctgctgacagacaagagctgccagagcttcatctcctggacaggagatggctgggagttcaagctgagtgaccctgatgaggtggcccggcgctggggcaagaggaagaacaagcccaagatgaactatgagaagctgagccggggcctgcgctactactatgacaagaacatcatccacaagacagctgggaagcgctacgtgtacagatttgtgtgtgacctgcagagcctgctgggctacaccccagaggagctgcacgccatgctggatgtgaagccagatgctgatgaatag

SEQ ID NO: 61629 - DNA, 678 bp, Artificial Sequence
  derived and/or modified sequence
atgaaggccgccgtggacctgaagcccaccctgaccatcatcaagacagaaaaagtggacttagagctcttcccatcgcccggaaagttaggaggtcaggactccttcgaatccatcgagagttacgatagttgtgaccggctcacgcagagctggagtagccagtcatcctttaatagcctgcagagagttccctcttacgattcctttgacagcgaagattatcctgccgctttgcccaaccacaagcccaaaggcacatttaaggattatgtaagagatagggcggacctgaataaagacaaaccggtcatccctgccgccgctctggccggctacacgggcagtggccccatccagctgtggcagtttctcctcgagctgctcacagacaaatcttgtcagtccttcataagctggacaggcgatggatgggagttcaaactctccgaccccgacgaagtagctcgccgatggggtaaacgaaaaaacaagcccaagatgaattatgaaaagctgtccagaggactaagatactattatgacaaaaacattatccataagactgctgggaagagatatgtgtaccgttttgtgtgtgatcttcaaagtctgttgggttacacacccgaggaacttcacgctatgctagatgtgaaaccagacgctgatgagtag

SEQ ID NO: 61630 - DNA, 678 bp, Artificial Sequence
  derived and/or modified sequence
atgaaggccgctgtcgacttgaaaccgactcttactatcatcaaaacagagaaggtggacctagaactctttccaagccccggaaagctgggaggccaggattcattcgaaagcattgagtcatatgacagctgtgatcgcttaactcaaagctggagctctcagagcagcttcaatagtcttcagagggtgccctcctacgatagtttcgacagcgaagactaccccgcagctttgccgaaccacaagccaaagggcacgttcaaggattacgtcagggatcgggctgaccttaacaaggacaaacctgtgatcccagcggctgctctggctggatacactggaagcggccctatccagctgtggcaattcctgcttgagctgcttacggataagtcctgccagtctttcatttcatggactggcgatggatgggaattcaagctatcagatcctgacgaggtagccagacgctggggaaaacgaaaaaacaaacctaaaatgaactatgagaagttgtcacgcggacttcgatattattacgataaaaacattatccataagactgccggaaagcggtatgtctatagatttgtctgtgatttacagtccctcctggggtacacgcccgaggagctgcatgctatgctggatgtgaagccagatgctgacgagtag

SEQ ID NO: 61631 - DNA, 4594 bp, Artificial Sequence
  derived and/or modified sequence
gagatcgagagcgaacgaggcagccgccggcggagaggagggagcgggcgagggccgggcaggaggagcgggcgcggcgcgggcgaggctgggacccgagcgcgctcacttcgccgcaaagtgccaacttcccctggagtgccgggcgcgcaccgtccgggcgcgggggaaagaaaggcagcgggaatttgagatttttgggaagaaagtcggatttcccccgtccccttccccctgttactaatcctcattaaaaagaaaaacaacagtaactgcaaacttgctaccatcccgtacgtcccccactcctggcaccatgaaggcggccgtcgatctcaagccgactctcaccatcatcaagacggaaaaagtcgatctggagcttttcccctccccgggtaaactcgggggccaggactcttttgaaagcatagagagctacgatagttgtgatcgcctcacccagtcctggagcagccagtcatctttcaacagcctgcagcgtgttccctcctatgacagcttcgactcagaggactatccggctgccctgcccaaccacaagcccaagggcaccttcaaggactatgtgcgggaccgtgctgacctcaataaggacaagcctgtcattcctgctgctgccctagctggctacacaggcagtggaccaatccagctatggcagtttcttctggaattactcactgataaatcctgtcagtcttttatcagctggacaggagatggctgggaattcaaactttctgacccagatgaggtggccaggagatggggaaagaggaaaaacaaacctaagatgaattatgagaaactgagccgtggcctacgctactattacgacaaaaacatcatccacaagacagcggggaaacgctacgtgtaccgctttgtgtgtgacctgcagagcctgctggggtacacccctgaggagctgcacgccatgctggacgtcaagccagatgccgacgagtgatggcactgaaggggctggggaaaccctgctgagaccttccaaggacagccgtgttggttggactctgaattttgaattgttattctattttttattttccagaactcattttttaccttcaggggtgggagctaagtcagttgcagctgtaatcaattgtgcgcagttgggaaaggaaagccaggacttgtggggtgggtgggaccagaaattcttgagcaaattttcaggagagggagaagggccttctcagaagcttgaaggctctggcttaacagagaaagagactaatgtgtccaatcatttttaaaaatcatccatgaaaaagtgtcttgagttgtggacccattagcaagtgacattgtcacatcagaactcatgaaactgatgtaaggcaattaatttgcttctgtttttaggtctgggagggcaaaaaagaggtgggtgggatgaaacatgttttggggggggatgcactgaaaatctgagaactatttacctatcactctagttttgaagcaaagatggacttcagtggggaggggccaaaaccgttgttgtgttaaaatttattttattaaattttgtgccagtattttttttcttaaaaatcgtcttaagctctaaggtggtctcagtattgcaatatcatgtaagtttgtttttatttgccggctgaggattctgtcacaatgaaagaaaactgtttatatagaccccattggaaaagcaaaacgctctcactgagatcagggatcccaaattcatgggacttatataagaaggacaattaatgctgatttgggtacaggggaattatgtgtgtgaatgtcatctacaattaaaaaaaattagcacatccctttacttacttgttatcagtggattctcggggtttggacttaatgttgagctaagaagcattaagtctttgaactgaatgtattttgcatccctggttttggacgacagtaaacgtaggagcactgttgaagtcctggaagggagatcgaaggaggaagattgacttggttctttcttagtcctatatctgtagcatagatgacttggaataaaagctgtatgcatgggcattacccctcaggtcctaagaaataagtcctgaatgcatgtcgttccaaactaacactctgtaatttttcttttatgtcttattttccaagagtcctccattttttgcaccccctcaccgccaactctgttattcagtagagagaagtgtacggctttctgattggtgagtgaaaaagtaacttgagacacgacctaagttgaagagtttagacttgctgagttttagaagtgatggaaattaagagagcatttcaataaaatgtgacttggctgtctttggaagagaagtgcaaggctttcctttgaagaatttaaattagtccggtaggatgtcaggtgagactgtgtatgcaaaatgaatggcacaggtgatgccagggcctcttgcttgggtctgatgtcttggcacagggtaagtgaaggttaattccagaagagaggaatgacttgaaggcaaaggaaactaaggaaggaggttcagtgaggaaaataaggttgtccatgagatttgaatagatttttagttcccccaaggtttaaatacaaacatagtcaagcaaggtagtcatctttctgctggttgtgagggggaatctgaaaatggagttttagaggaaaagtcaacatctaactagtgaggaaaagtgcctaatacaattagaatctccctcactctatagttgcccagttgaaaggataaggaggaggggtggcttttatggacttccatgagagaaggaaagaaatatttcaggtaagcttctcagggctggccctttttgggatttggatgagaaattggaagtactaactactttctagcatatctttaagaaaattgattgttatttactcccagatcctcttgcagacccagaattatcaggaacatagctctgtgattcatgagtgtccccatactgatgaattggagcatccatatggaaagcaaaggcagaattatcccagctgtattattttgatcttttggatgcaggtgccttaatgaagctctcaaaatattttaggagctgctcagggagtgttgggtggaactgtttggactacattgttttctcttagattatgtgatttttgttgggcactggcaaaaggtgtgtgtgtgaatgtgtgcatgtgtgtgaatgttgtgtgtgtgtgtgtgtgtgtgtgtgtgtgtgtgtgtgtgtgtgtttgcagacatgcaaaactgcagctgaaataataccttagatttctaggtaagtctttccacatttcaataatgggtaagagtagaaccagggccgggtatcaattattgcttgctgtttgcaaccaggcataaaatcactttctcaaatcatccaccgttcctattaaatttatgccggaaactctccttctgtgagtataactcctgcagttcctatagcagataagatataagaaagtgcctcctagtgctcctccgcccgcttgtttgctaaaattccctttctctctaagtccaccattttcaagatttgtagatagtgtattagttaagacagctttgtcgatctggccagatgttttttctcctttgtccaaaggccagagaccatcccaggaagagtggtgggtggtttatacactggaaatgttgcgtttatgctttttaaaaacacacgttaacttcagaggaaggatgggcaaatctggtctagctgggtgaaacccttattttcccagagatgccttaacctttgttggttttggctttagggttcagagtcacttttgttcccttctccattctggagagggacttcccctacatagagccctgatttttgtggctgtggggattggaggtagcattcaaagatcagatgtgcttttcctcactttggagatgaacactctgggttttacagcattaacctgcctaaccttcatggtgagaaatacaccatctctcttctagtcatgctgtgcatgccgcttactctgttggggtctatataaatttgttgaactcttacctacattccaaagaagtttcaaggaaccataaatatatgtatacatatacatatataaaatatatatattaaaataaaattatcaggaatactgcctcagttattgaacttttttttttaagaatactttttttttaagctgagaagtatagggatgaaaaagatgttatattgtgtttgactattttccaacttgtattttcatataatttatattttttaaaagctgaaaatttagaagcaagatgaaaaaaaggaaaagcaggtgctttttaaaaatcagaactgaggtagcttagagatgtagcgatgtaagtgtcgatgtttttttaaaaaaaaatgcaaaaaaattcttatggcggagttttttgtttgtttattttagtagctgatgctggcacatcattttgctggagagttttttatatactgtagcctgatttcatattgtattttaaactgtgtgaaattaaaaacaaagaatttcattcataatgct

SEQ ID NO: 61632 - protein, 317 aa, Artificial Sequence
  derived and/or modified sequence
MDTDVVVLTTGVLVLITMLPMIPQSGKQHLLDFFDIFGRLSSWCLKKPGHVAEVYLVHLHASVYALFHRLYGMYPCNFVSFLRSHYSMKENLETFEEVVKPMMEHVRIHPELVTGSKDHELDPRRWKRLETHDVVIECAKISLDPTEASYEDGYSVSHQISARFPHRSADVTTSPYADTQNSYGCATSTPYSTSRLMLLNMPGQLPQTLSSPSTRLITEPPQATLWSPSMVCGMTTPPTSPGNVPPDLSHPYSKVFGTTAGGKGTPLGTPATSPPPAPSVIRMTTCTFHSPRPQSHPPGRKREWILQDHVYTDNTIF

SEQ ID NO: 61633 - protein, 282 aa, Artificial Sequence
  derived and/or modified sequence
MDTDVVVLTTGVLVLITMLPMIPQSGKQHLLDFFDIFGRLSSWCLKKPGHVAEVYLVHLHASVYALFHRLYGMYPCNFVSFLRSHYSMKENLETFEEVVKPMMEHVRIHPELVTGSKDHELDPRRWKRLETHDVVIECAKISLDPTEASYEDGYSVSHQISARFPHRSADVTTSPYADTQNSYGCATSTPYSTSRLMLLNMPGHLATTVRPRPPGPAAPGAVVEAEVVEAAAAAAASFLPQRNPHTRGQAHSAVGGRRLWEKRLPASPPLWAHFPVQKASWV

SEQ ID NO: 61634 - protein, 1113 aa, Artificial Sequence
  derived and/or modified sequence
MAQQANVGELLAMLDSPMLGVRDDVTAVFKENLNSDRGPMLVNTLVDYYLETSSQPALHILTTLQEPHDKMDTDVVVLTTGVLVLITMLPMIPQSGKQHLLDFFDIFGRLSSWCLKKPGHVAEVYLVHLHASVYALFHRLYGMYPCNFVSFLRSHYSMKENLETFEEVVKPMMEHVRIHPELVTGSKDHELDPRRWKRLETHDVVIECAKISLDPTEASYEDGYSVSHQISARFPHRSADVTTSPYADTQNSYGCATSTPYSTSRLMLLNMPGQLPQTLSSPSTRLITEPPQATLWSPSMVCGMTTPPTSPGNVPPDLSHPYSKVFGTTAGGKGTPLGTPATSPPPAPLCHSDDYVHISLPQATVTPPRKEERMDSARPCLHRQHHLLNDRGSEEPPGSKGSVTLSDLPGFLGDLASEEDSIEKDKEEAAISRELSEITTAEAEPVVPRGGFDSPFYRDSLPGSQRKTHSAASSSQGASVNPEPLHSSLDKLGPDTPKQAFTPIDLPCGSADESPAGDRECQTSLETSIFTPSPCKIPPPTRVGFGSGQPPPYDHLFEVALPKTAHHFVIRKTEELLKKAKGNTEEDGVPSTSPMEVLDRLIQQGADAHSKELNKLPLPSKSVDWTHFGGSPPSDEIRTLRDQLLLLHNQLLYERFKRQQHALRNRRLLRKVIKAAALEEHNAAMKDQLKLQEKDIQMWKVSLQKEQARYNQLQEQRDTMVTKLHSQIRQLQHDREEFYNQSQELQTKLEDCRNMIAELRIELKKANNKVCHTELLLSQVSQKLSNSESVQQQMEFLNRQLLVLGEVNELYLEQLQNKHSDTTKEVEMMKAAYRKELEKNRSHVLQQTQRLDTSQKRILELESHLAKKDHLLLEQKKYLEDVKLQARGQLQAAESRYEAQKRITQVFELEILDLYGRLEKDGLLKKLEEEKAEAAEAAEERLDCCNDGCSDSMVGHNEEASGHNGETKTPRPSSARGSSGSRGGGGSSSSSSELSTPEKPPHQRAGPFSSRWETTMGEASASIPTTVGSLPSSKSFLGMKARELFRNKSESQCDEDGMTSSLSESLKTELGKDLGVEAKIPLNLDGPHPSPPTPDSVGQLHIMDYNETHHEHS

SEQ ID NO: 61635 - DNA, 3342 bp, Artificial Sequence
  derived and/or modified sequence
atggcccagcaggccaacgtgggcgagctgctggccatgctggacagccccatgctgggcgtgagagacgacgtgaccgccgtgttcaaggagaacctgaacagcgacagaggccccatgctggtgaacaccctggtggactactacctggagaccagcagccagcccgccctgcacatcctgaccaccctgcaggagccccacgacaagatggacaccgacgtggtggtgctgaccaccggcgtgctggtgctgatcaccatgctgcccatgatcccccagagcggcaagcagcacctgctggacttcttcgacatcttcggcagactgagcagctggtgcctgaagaagcccggccacgtggccgaggtgtacctggtgcacctgcacgccagcgtgtacgccctgttccacagactgtacggcatgtacccctgcaacttcgtgagcttcctgagaagccactacagcatgaaggagaacctggagaccttcgaggaggtggtgaagcccatgatggagcacgtgagaatccaccccgagctggtgaccggcagcaaggaccacgagctggaccccagaagatggaagagactggagacccacgacgtggtgatcgagtgcgccaagatcagcctggaccccaccgaggccagctacgaggacggctacagcgtgagccaccagatcagcgccagattcccccacagaagcgccgacgtgaccaccagcccctacgccgacacccagaacagctacggctgcgccaccagcaccccctacagcaccagcagactgatgctgctgaacatgcccggccagctgccccagaccctgagcagccccagcaccagactgatcaccgagcccccccaggccaccctgtggagccccagcatggtgtgcggcatgaccaccccccccaccagccccggcaacgtgccccccgacctgagccacccctacagcaaggtgttcggcaccaccgccggcggcaagggcacccccctgggcacccccgccaccagccccccccccgcccccctgtgccacagcgacgactacgtgcacatcagcctgccccaggccaccgtgaccccccccagaaaggaggagagaatggacagcgccagaccctgcctgcacagacagcaccacctgctgaacgacagaggcagcgaggagccccccggcagcaagggcagcgtgaccctgagcgacctgcccggcttcctgggcgacctggccagcgaggaggacagcatcgagaaggacaaggaggaggccgccatcagcagagagctgagcgagatcaccaccgccgaggccgagcccgtggtgcccagaggcggcttcgacagccccttctacagagacagcctgcccggcagccagagaaagacccacagcgccgccagcagcagccagggcgccagcgtgaaccccgagcccctgcacagcagcctggacaagctgggccccgacacccccaagcaggccttcacccccatcgacctgccctgcggcagcgccgacgagagccccgccggcgacagagagtgccagaccagcctggagaccagcatcttcacccccagcccctgcaagatccccccccccaccagagtgggcttcggcagcggccagccccccccctacgaccacctgttcgaggtggccctgcccaagaccgcccaccacttcgtgatcagaaagaccgaggagctgctgaagaaggccaagggcaacaccgaggaggacggcgtgcccagcaccagccccatggaggtgctggacagactgatccagcagggcgccgacgcccacagcaaggagctgaacaagctgcccctgcccagcaagagcgtggactggacccacttcggcggcagcccccccagcgacgagatcagaaccctgagagaccagctgctgctgctgcacaaccagctgctgtacgagagattcaagagacagcagcacgccctgagaaacagaagactgctgagaaaggtgatcaaggccgccgccctggaggagcacaacgccgccatgaaggaccagctgaagctgcaggagaaggacatccagatgtggaaggtgagcctgcagaaggagcaggccagatacaaccagctgcaggagcagagagacaccatggtgaccaagctgcacagccagatcagacagctgcagcacgacagagaggagttctacaaccagagccaggagctgcagaccaagctggaggactgcagaaacatgatcgccgagctgagaatcgagctgaagaaggccaacaacaaggtgtgccacaccgagctgctgctgagccaggtgagccagaagctgagcaacagcgagagcgtgcagcagcagatggagttcctgaacagacagctgctggtgctgggcgaggtgaacgagctgtacctggagcagctgcagaacaagcacagcgacaccaccaaggaggtggagatgatgaaggccgcctacagaaaggagctggagaagaacagaagccacgtgctgcagcagacccagagactggacaccagccagaagagaatcctggagctggagagccacctggccaagaaggaccacctgctgctggagcagaagaagtacctggaggacgtgaagctgcaggccagaggccagctgcaggccgccgagagcagatacgaggcccagaagagaatcacccaggtgttcgagctggagatcctggacctgtacggcagactggagaaggacggcctgctgaagaagctggaggaggagaaggccgaggccgccgaggccgccgaggagagactggactgctgcaacgacggctgcagcgacagcatggtgggccacaacgaggaggccagcggccacaacggcgagaccaagacccccagacccagcagcgccagaggcagcagcggcagcagaggcggcggcggcagcagcagcagcagcagcgagctgagcacccccgagaagcccccccaccagagagccggccccttcagcagcagatgggagaccaccatgggcgaggccagcgccagcatccccaccaccgtgggcagcctgcccagcagcaagagcttcctgggcatgaaggccagagagctgttcagaaacaagagcgagagccagtgcgacgaggacggcatgaccagcagcctgagcgagagcctgaagaccgagctgggcaaggacctgggcgtggaggccaagatccccctgaacctggacggcccccaccccagcccccccacccccgacagcgtgggccagctgcacatcatggactacaacgagacccaccacgagcacagctag

SEQ ID NO: 61636 - DNA, 3342 bp, Artificial Sequence
  derived and/or modified sequence
atggcccagcaggcgaacgtgggtgagctgttggcgatgttggattcccctatgctgggagtgcgagatgacgtcacagcagttttcaaagagaacctgaacagcgacagaggacctatgctggtaaacacactagtggactactacctcgagacaagctcccagccagccttgcatattctcaccacactacaggagccgcacgataaaatggacactgacgtggtggtactgaccacgggggtactggtactgataacaatgctgcccatgattccacagagtggcaagcagcatctcctggatttcttcgacatctttgggaggcttagctcatggtgcctaaagaagcccggccacgttgcagaagtgtatctggtgcacctgcatgccagcgtctacgcactgtttcaccggctctacggaatgtacccgtgtaatttcgtcagctttttacgttctcattattctatgaaggaaaatctggaaaccttcgaagaagtagtgaaacccatgatggaacacgtgcgaattcacccggagctggtcaccggttccaaggaccacgaactcgacccccgaagatggaaacggctggagactcatgacgtcgttattgagtgtgcaaaaatcagcctcgatccaacagaggcctcttatgaggatggatattctgtcagtcaccagatctctgcccggtttccgcataggtccgcagatgttacgacatccccatatgcggacacccaaaattcttacggctgtgctacctcaacaccttacagcaccagccgattaatgttgttgaacatgcccgggcaacttcctcagaccctgtcatctccttcaacaaggttgatcacagagccgccacaggccacactctggtcaccttcaatggtctgtggcatgaccacacctccaacttcaccaggtaacgtcccccccgacctgtcccatccgtattcaaaggtgtttggtaccactgccggcgggaaaggcacacctctggggacccccgctacaagcccccctcctgctcctctgtgccattcagatgattacgtgcacatttccctccctcaagccaccgtcactccacctagaaaggaggaacggatggattccgcgcggccatgtctacaccgccaacaccatctcctgaacgacagaggaagtgaggaaccccctgggtccaagggctctgtaacactgtcagacttgcctggctttctcggtgatttagcctctgaggaagattccattgaaaaggacaaggaggaggcagccatcagccgggagctgagcgaaataactaccgctgaggccgaacctgtagtgcctagagggggatttgatagcccattttaccgggattcgctgcccgggagccagaggaagacccactctgcagcctcttcaagccaaggggcctccgtgaaccccgaaccactacactctagcttagataaactcgggccagataccccaaaacaggccttcacacctattgatttgccatgtgggtccgccgacgagtcgcccgcaggcgaccgcgagtgtcaaactagtctggagaccagcatcttcacgccctctccctgtaagatcccgccacctaccagggtggggttcggcagtggacagcctccaccttatgaccacctttttgaagttgctctgccaaaaacggctcaccatttcgtgatacgcaagacggaagaattgttgaagaaggcgaaaggaaatacggaggaagacggcgtcccaagcacatcccctatggaggtgctggatcggttgattcagcagggcgcggacgctcatagtaaggagctcaataagttacctctgccaagtaaatccgtcgactggacccactttgggggttccccgcctagcgatgagatcaggacactcagagaccaactgctgttacttcacaaccagttgctctacgaacgtttcaaaagacaacaacacgcccttcgcaatcgccgcctcctcagaaaggtaattaaagcagccgcgctggaagagcacaatgcggcaatgaaggatcaattgaaattgcaggaaaaggatattcagatgtggaaagtctcactccagaaggaacaggctcgatacaaccagctccaggaacaaagagacacaatggttaccaaacttcatagtcaaatcaggcagctgcaacacgatcgcgaggagttttacaatcaatcccaagagctgcaaacaaaacttgaggattgtagaaatatgattgccgaattgagaattgagttaaagaaagctaataataaggtgtgccacaccgagctgctgctcagtcaggtgagccagaaattatcaaatagcgagtcggtgcaacagcagatggaatttctcaataggcaactgcttgttctgggtgaggtgaacgagctttatttggagcagctacaaaataagcactcagacacgacaaaggaggtggagatgatgaaggctgcttatcgtaaggagctcgagaaaaaccggtcccatgtccttcagcaaacgcagaggctggataccagtcagaagcgaattttggaactcgaaagccatctggctaaaaaagaccaccttctgcttgagcagaagaagtatctggaggatgtgaagctgcaggccagggggcagctgcaggcagcagagtcgagatatgaggcccagaaacgtatcactcaggttttcgagcttgaaattcttgacttatatggcaggctggaaaaggacgggctgctgaaaaagcttgaagaagagaaggccgaggctgcagaagcagccgaagagcgattggactgttgtaacgatggatgcagcgacagtatggtcggccataatgaggaggctagcgggcacaacggggagaccaaaactccaagaccgtcaagcgccaggggtagttctggatcaagaggtggaggtggatctagtagttcgagtagtgaacttagcaccccagaaaaaccgcctcaccagcgagccggcccgttctcctcaaggtgggaaacaacaatgggagaggcctcggcctccatccctacaactgtgggttcccttccgtcttcaaaatcatttctgggaatgaaggctagggagttatttcgaaacaagtctgagagccaatgcgatgaagatggcatgacctcctctctgtcagaatctcttaagacagagcttggtaaggacctgggcgtggaagccaagatccctcttaatctggatgggcctcacccctcccctcctactcctgatagtgtcggccaactgcatatcatggattacaacgaaacccaccatgagcactcttag

SEQ ID NO: 61637 - DNA, 3342 bp, Artificial Sequence
  derived and/or modified sequence
atggcccagcaggccaacgtgggggagctgctggccatgctggacagccccatgctgggcgtgagagatgatgtgacagctgtgttcaaggagaacctgaacagcgaccggggccccatgctggtgaacaccctggtggactactacctggagaccagcagccagcctgccctgcacatcctgaccaccctgcaggagccccatgacaagatggacacagatgtggtggtgctgaccaccggggtgctggtgctgatcaccatgctgcccatgatcccccagagcggcaagcagcacctgctggacttctttgacatcttcggccgcctgagctcctggtgcctgaagaagccaggccacgtggccgaggtgtacctggtgcacctgcacgcctctgtgtatgccctcttccaccggctgtatggcatgtacccctgcaactttgtgtccttcctgcggagccactacagcatgaaggagaacctggagacctttgaggaggtggtgaagcccatgatggagcacgtgcgcatccaccctgagctggtgacaggcagcaaggaccacgagctggacccccggcgctggaagaggctggagacccatgatgtggtgattgaatgtgccaagatcagcctggaccccacagaggccagctatgaagatggctacagcgtgagccaccagatcagcgcccgcttcccccacaggtctgcagatgtgaccaccagcccctatgctgacacccagaacagctatggctgtgccaccagcaccccctacagcaccagccggctgatgctgctgaacatgcctggccagctgccccagaccctgagcagccccagcaccaggctcatcacagagcccccccaggccaccctgtggagccccagcatggtgtgtggcatgaccaccccacccaccagccctggaaatgtgcccccagacctgagccacccctacagcaaggtgtttggcaccacagctgggggcaagggcacccccctgggcaccccagccaccagccccccaccagcccccctgtgccacagtgatgattatgtgcacatcagcctgccccaggccaccgtgaccccacccaggaaggaggagaggatggacagcgcccggccctgcctgcaccggcagcaccacctgctgaatgaccggggcagcgaggagcccccaggcagcaagggctctgtgaccctgagtgacctgcccggcttcctgggggacctggcctctgaagaagattccattgagaaggacaaggaggaggccgccatcagccgggagctgtctgagatcaccacagctgaggccgagcctgtggtgccccggggcggctttgacagccccttctacagagacagcctgcccggcagccagaggaagacccacagcgctgccagcagcagccagggcgcctctgtgaaccctgagcccctgcacagcagcctggacaagctgggccctgacacccccaagcaggccttcacccccatcgacctgccctgtggcagcgcagatgagagccctgctggggaccgggagtgccagaccagcctggagaccagcatcttcacccccagcccctgcaagatccccccacccaccagggtgggctttggaagtggccagcccccaccctatgaccacctgtttgaggtggccctgcccaagacagcccaccacttcgtcatcaggaagacagaggagctgctgaagaaggccaagggcaacacagaggaggatggagtgcccagcaccagccccatggaggtgctggacaggctcatccagcagggcgcagatgcccacagcaaggagctgaacaagctgcccctgcccagcaagtctgtggactggacccactttggaggcagccccccatctgatgagatccgcaccctgcgggaccagctgctgctgctgcacaaccagctgctgtatgagcgcttcaagaggcagcagcacgccctgaggaacagaaggctgctgaggaaggtgatcaaggccgccgccctggaggagcacaatgctgccatgaaggaccagctgaagctgcaggagaaggacatccagatgtggaaggtgtccctgcagaaggagcaggcccgctacaaccagctgcaggagcagagggacaccatggtgaccaagctgcacagccagatccggcagctgcagcacgaccgggaggagttctacaaccagagccaggagctgcagaccaagctggaggactgcaggaacatgattgctgagctgagaattgagctgaagaaggccaacaacaaggtgtgccacacagagctgctgctgagccaggtgtcccagaagctgagcaacagcgagagcgtgcagcagcagatggagttcctgaaccggcagctgctggtgctgggggaggtgaatgagctgtacctggagcagctgcagaacaagcacagcgacaccaccaaggaggtggagatgatgaaggccgcctacaggaaggagctggagaagaacagaagccacgtgctgcagcagacccagaggctggacaccagccagaagaggatcctggagctggagagccacctggccaagaaggaccacctgctgctggagcagaagaagtacctggaggatgtgaagctgcaggcccggggccagctgcaggccgctgagagccgctatgaggcccagaagaggatcacccaggtgtttgagctggagatcctggacctgtatggccgcctggagaaggatggcctgctgaagaagctggaggaggagaaggccgaggccgctgaggccgctgaggagcggctggactgctgcaatgatggctgcagcgacagcatggtgggccacaatgaggaggccagcggccacaacggggagaccaagaccccccggcccagcagcgcccggggcagcagcggcagcagaggaggcggcggcagcagcagcagcagcagcgagctgagcaccccagagaagccaccccaccagagagctggccccttcagcagccgctgggagaccaccatgggagaggccagcgccagcatccccaccaccgtgggcagcctgcccagcagcaagagcttcctgggcatgaaggcccgggagctgttcaggaacaagtctgagagccagtgtgatgaagatggcatgaccagcagcctgtctgagagcctgaagacagagctgggcaaggacctgggcgtggaggccaagatccccctgaacctggatggcccccaccccagcccccccaccccagacagcgtgggccagctgcacatcatggactacaatgagacccaccacgagcacagctag

SEQ ID NO: 61638 - DNA, 3342 bp, Artificial Sequence
  derived and/or modified sequence
atggcccagcaggccaacgtgggcgagctgctggccatgctggacagtcccatgctgggcgtgcgcgacgacgtcacagccgtatttaaagaaaatcttaattcagaccgcggtcccatgctcgtcaacactttggtggattattatctggaaacgagtagccagcctgccctgcacattttgaccaccttgcaggagccccacgataagatggataccgatgtggtggtgctcactactggcgtgctagtgctgatcactatgctcccaatgattccacagtcaggaaagcagcacctgctcgacttcttcgatatttttgggcggctatcaagctggtgcttaaaaaagcctggccacgtggcggaggtatatctggttcacttacacgctagcgtgtacgcactctttcaccggctctacggaatgtacccttgtaatttcgtgtctttcctgagatcacactactctatgaaagaaaacctggaaacgtttgaggaggtggttaagcccatgatggagcatgtgcggatccaccccgagctggtgacaggttccaaagatcacgaactggaccctagacgctggaagcggctcgagacccatgacgttgtcattgaatgcgcaaaaattagtctcgatccaaccgaagccagctacgaggacggttattcagtttcgcaccaaattagcgccaggttcccgcaccggagtgccgacgttactacgtctccttatgccgacacccagaactcatacggatgtgccacgagcaccccatacagcacaagtcggctgatgcttctaaacatgcccgggcagcttccccagacgctctcaagcccttcaacacggttgatcacagaacctccccaggctacactctggtctccatcaatggtttgtggaatgaccacccccccgacaagccccggcaacgtcccccctgatttgagtcatccttactcaaaggtgtttggaacaactgctggaggcaaaggtacccccctggggacgccagcaacaagtccgccccccgccccactatgtcattcagacgactacgtgcacatatcccttcctcaggccacagtcactccaccaaggaaagaggagagaatggacagcgcccgcccatgcctgcaccgccagcaccacctgttgaacgaccgcggaagcgaagagccacccgggagcaagggctcagtgacactttcagacctcccagggttcttaggggaccttgcgagcgaggaggactccatcgaaaaggacaaggaggaagccgctatcagccgggaattgagcgaaatcacaacggccgaggcagagccggtagtcccccggggaggatttgattcgcctttttaccgagattcacttccggggtctcagcggaagacccactccgcggcttcctcaagccagggcgccagcgtgaatccagagccattacactcctctcttgataagctgggcccggatacccctaagcaggccttcactcccatcgacctgccttgcggaagcgcggacgaaagcccagctggagaccgggagtgtcagactagcctggagacttctattttcacccccagcccatgcaaaataccgccgcctacccgtgtcggctttggctccggccagcccccaccatatgatcatctctttgaagtggccctgccgaaaactgcacatcacttcgtgatccgtaagacagaagaactgctcaaaaaggccaaggggaacactgaggaggacggggtgccctctacttcccctatggaggtcctggacagacttattcagcagggggcagatgctcactccaaggaacttaacaagctgccattaccaagtaaaagcgtggactggacccatttcgggggtagccccccctctgatgagatcagaacattgagggaccaattgctgttgctccataatcaactcttgtacgaaagatttaaacgccagcagcacgccctaaggaacaggagactgctgaggaaggtgataaaggctgccgcgttagaggaacataatgctgcgatgaaggatcagctcaaattgcaggagaaggatattcagatgtggaaggtgtctttacaaaaagagcaagccagatataatcagctccaagagcagcgagataccatggtgacaaaattacattcccagataaggcagctgcagcacgaccgagaggaattttacaaccagagtcaagaactacagacgaaacttgaagattgccggaacatgattgccgaactgagaatagagctgaaaaaagctaacaataaagtctgtcacaccgagcttcttttgtcgcaggtcagccagaagctgagtaacagtgaatcggtgcagcagcaaatggaatttcttaataggcagttattggtgcttggtgaggtgaacgaactttatctggagcagctccagaacaaacactctgatactacaaaagaagtcgaaatgatgaaagccgcttacagaaaggaacttgagaagaatcggagtcatgtgctccagcagactcagagactggacacgagtcagaaaagaatactagagcttgaaagtcatctggcaaagaaggatcaccttctattggaacagaagaagtaccttgaagatgtgaaacttcaggctcgcggacagttgcaggccgcagagtcccggtacgaagcccaaaaacgcattacgcaggtatttgagctggagatcctcgacctgtacggtagacttgaaaaggatggcctgcttaagaaactggaggaggaaaaagcagaggcagctgaagccgctgaagagcggctcgattgttgcaacgacggatgttccgatagtatggtaggacacaatgaggaagccagcggacataacggggaaactaaaaccccccgacccagcagcgctcggggaagctccgggtcccgcggtggcggcggatccagctcatctagttccgaactgagtacaccagaaaagccaccacatcagagggccggcccctttagctcacggtgggagacaaccatgggtgaagctagcgcgagtattcccactacagtgggctctctgcctagcagcaagtcattcctgggtatgaaggcaagggaactctttagaaataagagcgagtctcagtgcgatgaagacgggatgacctcatcactgtccgagtctctcaaaaccgagctgggtaaagatctgggggttgaggccaagatccctctgaacctggacggacctcatccctcaccacccacacccgactcagttgggcagctccacatcatggattacaacgagacccaccatgagcactcttag

SEQ ID NO: 61639 - DNA, 3342 bp, Artificial Sequence
  derived and/or modified sequence
atggctcaacaggctaatgttggggagctgctcgcaatgctcgattcgcctatgctaggcgtgagggacgacgtgacggctgtgttcaaggagaacctcaattctgaccggggacctatgctcgtcaataccttagttgactattacttggagacatcaagtcagccagctctgcacattctgaccacacttcaggaaccccacgacaaaatggacacagacgtcgtagttcttactaccggggtgctcgtgctaattaccatgctgcctatgatcccacagtctggcaaacagcacctcttggactttttcgatatcttcggacggttgtcgtcttggtgcctaaagaagccaggccacgttgcagaggtttatttagttcatctgcacgcttccgtttacgccctgttccaccggctgtacggcatgtatccatgtaattttgtgtcgtttttaagaagtcactactcaatgaaagaaaatctggaaacattcgaggaggtggttaaaccaatgatggagcatgtccggatccacccggaattggtcacagggtctaaagaccatgaattggacccaaggaggtggaagcgtctcgaaacccacgacgtggtgatcgaatgtgccaaaatcagtttggatcccacggaagcaagttatgaggacgggtactccgtgtcccaccagattagcgccaggttcccccatcgcagcgccgatgtgaccaccagcccgtacgcagatacccaaaacagctacgggtgcgccacatcgactccctatagtactagccggctgatgctgctgaatatgcccggtcagctcccccaaaccctcagctccccatcaactaggctcatcacagaaccccctcaggccaccctttggagtccaagcatggtgtgtggaatgaccacaccccctacctcacctgggaacgtccctcccgatctgtcacacccttatagcaaggtcttcgggaccactgcaggcggaaaggggacacccctcggaacccccgcaacctccccgcctccagccccactgtgccacagcgacgactatgtgcatatctccctcccccaggccaccgtgacacctcccagaaaagaggaaagaatggattccgcgcgaccctgcctacatagacagcaccacttactaaacgatcggggaagcgaggaacctcctggcagcaaaggctcagttaccttatcggaccttccgggttttctcggtgatctggcctcagaggaagattctatcgagaaagataaggaagaggctgctatctcgcgcgaactgagtgagattacaacagcagaagccgaacccgtagtcccaaggggaggattcgactccccattctaccgcgattccctgccaggcagccagagaaaaacgcattccgctgcatcctccagtcagggggcatccgtgaatccggagccgctgcattcttcccttgacaaattgggccctgatacacctaagcaagcctttacccccatcgacctgccttgtggcagcgcagatgagagccccgctggggatcgggaatgccagacttccttagaaacttcgatttttacgccgagcccctgtaagattcctcctccaacacgggtcggatttggatccgggcagcccccaccttacgatcacctttttgaagtggctttgcccaaaactgctcatcattttgttattcggaaaaccgaagaactgctgaagaaggctaaaggaaataccgaagaggatggcgtgccaagcacatctccaatggaggttctggaccggttaatacagcagggcgctgacgcccactccaaagaactaaataaactgccattacccagcaagtctgtggactggacccacttcggcggaagtcccccatcagatgagattcgcacacttcgagaccagttgctgctgttacacaaccagctgctctacgaaagatttaaacgtcagcagcacgctttaaggaatcgcaggctactccgcaaggtcataaaggccgctgcgttagaggaacacaatgctgccatgaaagatcagcttaaacttcaggaaaaggacatccaaatgtggaaagtctcgcttcagaaagagcaagctcggtacaatcagcttcaagagcagcgagatacaatggtcaccaaacttcatagccaaattcgccagctacaacatgatcgagaagagttttacaatcagtctcaggagctgcagaccaagctcgaggactgtagaaatatgattgccgagctgcggatagaactcaaaaaggccaacaacaaagtctgccacaccgagctgctgcttagtcaagtcagccaaaagctgagtaattcagagtccgtacagcaacagatggagtttctgaaccggcagctactcgtgctgggagaagtgaatgaactgtatctggagcaactgcagaacaagcacagcgatactacaaaggaggtggagatgatgaaggccgcttatagaaaggagttggaaaaaaacaggtctcatgttctgcagcaaacccagagactcgatacttcccagaaaagaattctagaactcgagtcacatctagctaagaaggatcacctcctattggaacaaaagaagtatcttgaggatgtcaagttgcaagctcggggtcaacttcaagctgctgaatcgaggtatgaggctcagaaacgtataacccaagtctttgaactggaaatactcgatctttacggtcgtcttgaaaaggatggcctgctgaaaaaattagaggaagagaaagcagaggccgcagaggccgcagaggagcgacttgactgttgtaacgacggttgctctgacagtatggtaggccataatgaagaagcaagtgggcacaacggcgagacaaagactccacgaccatccagcgccagaggcagttctggttctaggggtggaggcggtagttcgtctagcagcagtgaactgagcacccctgagaagcctccgcatcagcgggctggacccttctcgagccgctgggaaaccacgatgggcgaagcctcagcttctatccccaccacggtgggctcactcccttcctctaagtccttcctgggtatgaaggccagagagctattccgcaacaagagcgaaagtcagtgcgatgaggatggcatgacaagctcactgagcgagagcctaaagacagagctcggaaaggatctcggcgtggaagcgaaaatccctcttaacctagacggaccacatccgtcgccacctacgccagactcggtcggccagctgcacatcatggactacaacgaaacgcaccatgagcactcatag

SEQ ID NO: 61640 - DNA, 8310 bp, Artificial Sequence
  derived and/or modified sequence
cagtttggtagtggccccaatgaagaaccttcagaacctgtagcacacgtcctggagccagcacagcgccttcgagcgagagaatggcccaacaagcaaatgtcggggagcttcttgccatgctggactcccccatgctgggtgtgcgggacgacgtgacagctgtctttaaagagaacctcaattctgaccgtggccctatgcttgtaaacaccttggtggattattacctggaaaccagctctcagccggcattgcacatcctgaccaccttgcaagagccacatgacaagatggacactgacgtcgttgtcctcacaacaggcgtcttggtgttgataaccatgctaccaatgattccacagtctgggaaacagcatcttcttgatttctttgacatttttggccgtctgtcatcatggtgcctgaagaaaccaggccacgtggcggaagtctatctcgtccatctccatgccagtgtgtacgcactctttcatcgcctttatggaatgtacccttgcaacttcgtctcctttttgcgttctcattacagtatgaaagaaaacctggagacttttgaagaagtggtcaagccaatgatggagcatgtgcgaattcatccggaattagtgactggatccaaggaccatgaactggaccctcgaaggtggaagagattagaaactcatgatgttgtgatcgagtgtgccaaaatctctctggatcccacagaagcctcatatgaagatggctattctgtgtctcaccaaatctcagcccgctttcctcatcgttcagccgatgtcaccaccagcccttatgctgacacacagaatagctatgggtgtgctacttctaccccttactccacgtctcggctgatgttgttaaatatgccagggcagctacctcagactctgagttccccatcgacacggctgataactgaaccaccacaagctactctttggagcccatctatggtttgtggtatgaccactcctccaacttctcctggaaatgtcccacctgatctgtcacacccttacagtaaagtctttggtacaactgcaggtggaaaaggaactcctctgggaaccccagcaacctctcctcctccagccccactctgtcattcggatgactacgtgcacatttcactcccccaggccacagtcacaccccccaggaaggaagagagaatggattctgcaagaccatgtctacacagacaacaccatcttctgaatgacagaggatcagaagagccacctggcagcaaaggttctgtcactctaagtgatcttccagggtttttaggtgatctggcctctgaagaagatagtattgaaaaagataaagaagaagctgcaatatctagagaactttctgagatcaccacagcagaggcagagcctgtggttcctcgaggaggctttgactctcccttttaccgagacagtctcccaggttctcagcggaagacccactcggcagcctccagttctcagggcgccagcgtgaaccctgagcctttacactcctccctggacaagcttgggcctgacacaccaaagcaagcctttactcccatagacctgccctgcggcagtgctgatgaaagccctgcgggagacagggaatgccagacttctttggagaccagtatcttcactcccagtccttgtaaaattccacctccgacgagagtgggctttggaagcgggcagcctcccccgtatgatcatctttttgaggtggcattgccaaagacagcccatcattttgtcatcaggaagactgaggagctgttaaagaaagcaaaaggaaacacagaggaagatggtgtgccctctacctccccaatggaagtgctggacagactgatacagcagggagcagacgcgcacagcaaggagctgaacaagttgcctttacccagcaagtctgtcgactggacccactttggaggctctcctccttcagatgagatccgcaccctccgagaccagttgcttttactgcacaaccagttactctatgagcgttttaagaggcagcagcatgccctccggaacaggcggctcctccgcaaggtgatcaaagcagcagctctggaggaacataatgctgccatgaaagatcagttgaagttacaagagaaggacatccagatgtggaaggttagtctgcagaaagaacaagctagatacaatcagctccaggagcagcgtgacactatggtaaccaagctccacagccagatcagacagctgcagcatgaccgagaggaattctacaaccagagccaggaattacagacgaagctggaggactgcaggaacatgattgcggagctgcggatagaactgaagaaggccaacaacaaggtgtgtcacactgagctgctgctcagtcaggtttcccaaaagctctcaaacagtgagtcggtccagcagcagatggagttcttgaacaggcagctgttggttcttggggaggtcaacgagctctatttggaacaactgcagaacaagcactcagataccacaaaggaagtagaaatgatgaaagccgcctatcggaaagagctagaaaaaaacagaagccatgttctccagcagactcagaggcttgatacctcccaaaaacggattttggaactggaatctcacctggccaagaaagaccaccttcttttggaacagaagaaatatctagaggatgtcaaactccaggcaagaggacagctgcaggccgcagagagcaggtatgaggctcagaaaaggataacccaggtgtttgaattggagatcttagatttatatggcaggttggagaaagatggcctcctgaaaaaacttgaagaagaaaaagcagaagcagctgaagcagcagaagaaaggcttgactgttgtaatgacgggtgctcagattccatggtagggcacaatgaagaggcatctggccacaacggtgagaccaagacccccaggcccagcagcgcccggggcagtagtggaagcagaggtggtggaggcagcagcagcagcagcagcgagctttctaccccagagaaacccccacaccagagggcaggcccattcagcagtcggtgggagacgactatgggagaagcgtctgccagcatccccaccactgtgggctcacttcccagttcaaaaagcttcctgggtatgaaggctcgagagttatttcgtaataagagcgagagccagtgtgatgaggacggcatgaccagtagcctttctgagagcctaaagacagaactgggcaaagacttgggtgtggaagccaagattcccctgaacctagatggccctcacccgtctcccccgaccccggacagtgttggacagctacatatcatggactacaatgagactcatcatgaacacagctaaggaatgatggtcaatcagtgttaacttgcatattgttggcacagaacaggaggtgtgaatgcacgtttcaaagctttcctgtttccagggtctgagtgcaagttcatgtgtggaaatgggacggaggtcctttggacagctgactgaatgcagaacggtttttggatctggcattgaaatgcctcttgaccttcccctccacccgccctaaccccctctcatttacctcgcagtgtgttctaatccaagggccagttggtgttcctcagtagctttactttcttcctttcccccccaaatggttgcgtcctttgaacctgtgcaatatgaggccaaatttaatctttgagtctaacacaccactttctgctttcccgaagttcagataactgggttggctctcaattagaccaggtagtttgttgcattgcaggtaagtctggttttgtcccttccaggaggacatagcctgcaaagctggttgtctttacatgaaagcgtttacatgagactttccgactgcttttttgattctgaagttcagcatctaaagcagcaggtctagaagaacaacggtttattcatacttgcattcttttggcagttctgataagcttcctagaaagttctgtgtaaacagaagcctgtttcagaaatctggagctggcactgtggagaccacacaccctttgggaaagctcttgtctcttcttcccccactacctcttatttatttggtgtttgcttgaatgctggtactattgtgaccacaggctggtgtgtaggtggtaaaacctgttctccataggagggaaggagcagtcactgggagaggttacccgagaagcacttgagcatgaggaactgcacctttaggccatctcagcttgctgggccttttgttaaacccttctgtctactggcctccctttgtgtgcatacgcctcttgttcatgtcagcttatatgtgacactgcagcagaaaggctctgaaggtccaaagagtttctgcaaagtgtatgtgaccatcatttcccaggccattagggttgcctcactgtagcaggttctaggctaccagaagaggggcagctttttcataccaattccaactttcaggggctgactctccagggagctgatgtcatcacactctccatgttagtaatggcagagcagtctaaacagagtccgggagaatgctggcaaaggctggctgtgtatacccactaggctgccccacgtgctcccgagagatgacactagtcagaaaattggcagtggcagagaatccaaactcaacaagtgctcctgaaagaaacgctagaagcctaagaactgtggtctggtgttccagctgaggcagggggatttggtaggaaggagccagtgaacttggctttcctgtttctatctttcattaaaaagaatagaaggattcagtcataaagaggtaaaaaactgtcacggtacgaaatcttagtgcccacggaggcctcgagcagagagaatgaaagtcttttttttttttttttttttttagcatggcaataaatattctagcatccctaactaaaggggactagacagttagagactctgtcaccctagctataccagcagaaaacctgttcaggcaggctttctgggtgtgactgattcccagcctgtggcagggcgtggtcccaactactcagcctagcacaggctggcagttggtactgaattgtcagatgtggagtattagtgacaccacacatttaattcagctttgtccaaaggaaagcttaaaacccaatacagtctagtttcctggttccgttttagaaaaggaaaacgtgaacaaacttagaaagggaaggaaatcccatcagtgaatcctgaaactggttttaagtgctttccttctcctcatgcccaagagatctgtgccatagaacaagataccaggcacttaaagccttttcctgaattggaaaggaaaagaggcccaagtgcaaaagaaaaaacattttagaaacggacagcttataaaaataaagggaagaaaggaggcagcatggagagaggcctgtgctagaagctccatggacgtgtctgcacagggtcctcagctcatccatgcggcctgggtgtccttttactcagctttataacaaatgtggctccaagctcaggtgcctttgagttctaggaggctgtgggttttattcaactacggttgggagaatgagacctggagtcatgttgaaggtgcccaacctaaaaatgtaggctttcatgttgcaaagaactccagagtcagtagttaggtttggtttggttttggacatgataaacctgccaagagtcaacaggtcacttgatcatgctgcagtgggtagttctaaggatggaaaggtgacagtattactctcgagaggcaattcagtcctgggcaaaggtattagtacaataagcgttaagggcagagtctaccttgaaaccaattaagcagcttggtattcataaatattgggattggatggcctccatccagaaatcactatgggtgagcatacctgtctcagctgtttggccaatgtgcataacctactcggatccccacctgacactaaccagagtcagcacaggccccgaggagcccgaagtctgctgctgtgcagcatggaattcctttaaaaaggtgcactacagttttagcggggagggggataggaagacgcagagcaaatgagctccggagtccctgcaggtgaataaacacacagatctgcatctgatagaactttgatggattttcaaaaagccgttgacaaggctctgctatacagtctataaaaattgttattatgggattggaagaaacacgtggtcatgaatagaaaaaaaacaaacccaaaggtaggaaggtcaaggtcatttcttagatggagaagttgtgaaagatgtccttggagatgagttttaggaccagcattactaaggcaggtgggcagacagtgacctctctaggtgtgtccacagagtttttcaggagagaaaactgcctgacctttgggactaagctgcggaatcttcttactaagcttgaagagtggagaggcgagaggtgagctactttgtgagccaaagcttatgtgacatggttggggaaacagtccaaactgttctgagaaggtgaactgttacgacccaggacaattagaaaaattcacccaccatgccgcacattactgggtaaaagcagggcagcagggaacaaaactccagactcttgggccgtccccatttgcaacagcacacatagtttctggtatatttgttgggaaagataaaactctagcagttgttgaggggaggatgtataaaatggtcatggggatgaaaggatctctgagaccacagaggctcagactcactgttaagaatagaaaactgggtatgcgtttcatgtagccagcagaactgaagtgtgctgtgacaagccaatgtgaatttctaccaaatagtagagcataccacttgaagaaggaaagaaccgaagagcaaacaaaagttctgcgtaatgagactcaccttttctcgctgaaagcactaagaggtgggaggaggcctgcacaggctggaggagggtttgggcagagcgaagacccggccaggaccttggtgagatggggtgccgcccacctcctgcggatactcttggagagttgttcccccagggggctctgccccacctggagaaggaagctgcctggtgtggagtgactcaaatcagtatacctatctgctgcaccttcactctccagggtacatgctttaaaaccgacccgcaacaagtattggaaaaatgtatccagtctgaagatgtttgtgtatctgtttacatccagagttctgtgacacatgccccccagattgctgcaaagatcccaaggcattgattgcacttgattaagcttttgtctgtaggtgaaagaacaagtttaggtcgaggactggcccctaggctgctgctgtgacccttgtcccatgtggcttgtttgcctgtccgggactcttcgatgtgcccaggggagcgtgttcctgtctcttccatgccgtcctgcagtccttatctgctcgcctgagggaagagtagctgtagctacaagggaagcctgcctggaagagccgagcacctgtgcccatggcttctggtcatgaaacgagttaatgatggcagaggagcttcctccccacttcgcagcgccacattatccatcctctgagataagtaggctggtttaaccattggaatggacctttcagtggaaaccctgagagtctgagaacccccagaccaacccttccctccctttccccacctcttacagtgtttggacaggagggtatggtgctgctctgtgtagcaagtactttggcttatgaaagaggcagccacgcattttgcactaggaagaatcagtaatcacttttcagaagacttctatggaccacaaatatattacggaggaacagattttgctaagacataatctagttttataactcaatcatgaatgaaccatgtgtggcaaacttgcagtttaaaggggtcccatcagtgaaagaaactgattttttttaacggactgcttttagttaaattgaagaaagtcagctcttgtcaaaaggtctaaactttcccgcctcaatcctaaaagcatgtcaacaatccacatcagatgccataaatatgaactgcaggataaaatggtacaatcttagtgaatgggaattggaatcaaaagagtttgctgtccttcttagaatgttctaaaatgtcaaggcagttgcttgtgtttaactgtgaacaaataaaaatttattgttttgcact

SEQ ID NO: 61641 - protein, 873 aa, Artificial Sequence
  derived and/or modified sequence
MATFISVQLKKTSEVDLAKPLVKFIQQTYPSGGEEQAQYCRAAEELSKLRRAAVGRPLDKHEGALETLLRYYDQICSIEPKFPFSENQICLTFTWKDAFDKGSLFGGSVKLALASLGYEKSCVLFNCAALASQIAAEQNLDNDEGLKIAAKHYQFASGAFLHIKETVLSALSREPTVDISPDTVGTLSLIMLAQAQEVFFLKATRDKMKDAIIAKLANQAADYFGDAFKQCQYKDTLPKYFYFQEVFPVLAAKHCIMQANAEYHQSILAKQQKKFGEEIARLQHAAELIKTVASRYDEYVNVKDFSDKINRALAAAKKDNDFIYHDRVPDLKDLDPIGKATLVKSTPVNVPISQKFTDLFEKMVPVSVQQSLAAYNQRKADLVNRSIAQMREATTLANGVLASLNLPAAIEDVSGDTVPQSILTKSRSVIEQGGIQTVDQLIKELPELLQRNREILDESLRLLDEEEATDNDLRAKFKERWQRTPSNELYKPLRAEGTNFRTVLDKAVQADGQVKECYQSHRDTIVLLCKPEPELNAAIPSANPAKTMQGSEVVNVLKSLLSNLDEVKKEREGLENDLKSVNFDMTSKFLTALAQDGVINEEALSVTELDRVYGGLTTKVQESLKKQEGLLKNIQVSHQEFSKMKQSNNEANLREEVLKNLATAYDNFVELVANLKEGTKFYNELTEILVRFQNKCSDIVFARKTERDELLKDLQQSIAREPSAPSIPTPAYQSSPAGGHAPTPPTPAPRTMPPTKPQPPARPPPPVLPANRAPSATAPSPVGAGTAAPAPSQTPGSAPPPQAQGPPYPTYPGYPGYCQMPMPMGYNPYAYGQYNMPYPPVYHQSPGQAPYPGPQQPSYPFPQPPQQSYYPQQ

SEQ ID NO: 61642 - DNA, 2622 bp, Artificial Sequence
  derived and/or modified sequence
atggctacatttatctcagtccagctgaaaaagacaagtgaggtggacctggcaaaaccactggtaaaattcattcaacagacatacccaagcggcggggaggaacaagcccagtattgtagagccgctgaggaacttagtaagcttagacgtgcagccgtgggaaggcccttggataaacatgaaggagctcttgagacccttctccgatactacgatcaaatatgcagcatcgagcccaaattcccgttttctgaaaaccaaatttgcctgacattcacatggaaagacgcgttcgacaaaggaagtctgttcggcggatctgtcaagttagccctggcctccctcggctatgaaaaatcctgtgttttatttaactgtgccgcccttgcctcacagatcgcggccgagcaaaacctggacaatgacgagggcctgaagatcgcagctaagcactatcaatttgcaagcggggccttcctacacatcaaagagacagttctctcagccctcagtcgtgaaccgactgtggacatcagccctgatacagtgggaacactctctctaatcatgctcgcccaggcccaggaggtgtttttcctgaaggccactcgagacaagatgaaggacgccattatcgctaagctggcaaaccaggcggccgattacttcggcgacgccttcaaacagtgtcagtacaaggacaccctccctaagtacttttactttcaggaggtgtttcctgtgctggctgcaaagcattgcattatgcaggcgaatgccgagtaccaccagtcgattctggctaagcagcagaagaaatttggcgaggaaatcgccagattacaacacgccgccgaactcataaaaacagtggcgagcagatatgatgagtacgttaacgtgaaggatttcagtgataagataaaccgcgccctagccgccgccaagaaagataacgatttcatttaccatgacagagtacccgatttaaaagacctcgacccaataggtaaggccactctagtgaagtctactccagtgaacgtgcccatctctcagaagtttaccgacctgttcgagaagatggtaccagtaagtgtccaacaaagcctagctgcatataaccagcggaaggccgacctggtaaacaggagcatcgcgcagatgcgagaggccaccactcttgcaaacggggtgcttgccagcttaaatctgcctgccgctatcgaggatgtgagcggcgataccgtcccacagtcaattcttacaaagagtagatccgtcattgaacagggagggatccagacagtggatcagttaattaaagagctacccgagcttcttcagaggaatcgggaaatcctcgatgagtccctcagactgctggatgaagaggaggcaaccgataacgacctccgcgcaaaatttaaggaaaggtggcagcggaccccctcgaatgagctttataaacctcttcgcgccgaggggactaatttcaggaccgtgctcgacaaagctgtccaggcagacggacaggtgaaggagtgctatcagtctcaccgggacactatcgtgctgctctgtaagccggagccggaacttaatgcagcaatcccctctgctaatcccgccaagactatgcaggggagcgaggtagtcaatgtactcaaatcattattgtccaaccttgatgaggttaaaaaggagcgggagggcctggaaaatgacttgaagtcagttaacttcgacatgacttcaaagttcctgactgcgcttgcccaagatggcgtcatcaatgaagaggcactctctgtgaccgagctggaccgagtgtacggcggattaacaacaaaggttcaggaatcactcaagaaacaagaagggttgcttaagaacatccaggtgagtcatcaggaattttctaagatgaagcagtcgaataacgaggccaacctcagggaggaagttctgaagaaccttgccacagcctatgataacttcgtagaactggtggccaaccttaaagagggcacaaaattttataatgagttgaccgagatcctcgtcaggttccaaaataaatgttctgacattgttttcgcccggaagaccgagagagatgaactgcttaaggatctccaacaaagcatcgcccgagaaccatccgctccttccattcccacgcctgcttaccagtcaagccctgccggcggtcacgccccaacgccgcctaccccagccccccgaacaatgccacctaccaagccacagcctccagctcgcccaccaccccctgtgcttccggccaacagagctccatctgctactgctcctagtccggttggcgctggaaccgcggctcccgcaccctcacagacccccggtagtgcaccgcctccgcaggctcaggggccaccatatcctacctaccctgggtacccaggttattgccaaatgcctatgcccatgggctacaatccctacgcctatggccagtataatatgccctaccccccagtctaccaccagtctcctgggcaggctccatatcccggcccccaacagccgtcttacccgtttccacagccaccacagcagagttattatccgcagcagtag

SEQ ID NO: 61643 - DNA, 2622 bp, Artificial Sequence
  derived and/or modified sequence
atggccaccttcatctctgtgcagctgaagaagaccagcgaggtggacctggccaagcccctggtgaagttcatccagcagacctaccccagcggcggggaggagcaggcccagtactgcagagctgctgaggagctgagcaagctgcggcgggctgctgtgggccggcccctggacaagcatgaaggagccctggagaccctgctgcgctactatgaccagatctgcagcattgagcccaagttccccttcagcgagaaccagatctgcctgaccttcacctggaaggatgcctttgataaaggcagcctgtttggaggctctgtgaagctggccctggccagcctgggctatgagaagagctgtgtgctcttcaactgtgccgccctggccagccagattgctgctgagcagaacctggacaatgatgagggcctgaagattgctgccaagcactaccagtttgccagcggggccttcctgcacatcaaggagaccgtgctgagcgccctgagccgggagcccaccgtggacatcagcccagacacagtgggcaccctgagcctcatcatgctggcccaggcccaggaggtgttcttcctgaaggccacccgggacaagatgaaggatgccatcatcgccaagctggccaaccaggccgctgactactttggagatgccttcaagcagtgccagtacaaggacaccctgcccaagtacttctacttccaggaggtgtttcctgtgctggccgccaagcactgcatcatgcaggccaatgctgagtaccaccagagcatcctggccaagcagcagaagaagtttggagaggagatcgcccggctgcagcacgccgctgagctgatcaagacagtggccagccgctatgatgaatatgtgaatgtgaaggacttcagtgacaagatcaacagagccctggccgccgccaagaaggacaatgacttcatctaccatgacagagtgcctgacctgaaggacctggaccccatcggcaaggccaccctggtgaagagcacccctgtgaatgtgcccatcagccagaagttcacagacctgtttgagaagatggtgcctgtgtctgtgcagcagagcctggccgcctacaaccagaggaaggctgacctggtgaacagaagcatcgcccagatgagggaggccaccaccctggccaacggggtgctggccagcctgaacctgcctgctgccattgaagatgtgtctggggacacagtgccccagagcatcctgaccaagagccgcagcgtcatcgagcagggcggcatccagacagtggaccagctgatcaaggagctgcctgagctgctgcagaggaaccgggagatcctggatgagagcctgcggctgctggatgaggaggaggccacagacaatgacctgcgggccaagttcaaggagcgctggcagaggacccccagcaatgagctgtacaagcccctgcgggcagagggcaccaacttcagaacagtgctggacaaggctgtgcaggctgatggccaggtgaaggagtgctaccagagccaccgggacaccatcgtgctgctgtgcaagccagagcctgagctgaatgctgccatccccagcgccaacccagccaagaccatgcagggcagcgaggtggtgaatgtgctgaagagcctgctgagcaacctggatgaggtgaagaaggagcgggagggcctggagaatgacctgaagtctgtgaactttgacatgaccagcaagttcctgacagccctggcccaggatggagtcatcaatgaggaggccctgtctgtgacagagctggacagagtgtatggaggcctgaccaccaaggtgcaggagagcctgaagaagcaggagggcctgctgaagaacatccaggtgagccaccaggagttcagcaagatgaagcagagcaacaatgaggccaacctgcgggaggaggtgctgaagaacctggccacagcctatgacaactttgtggagctggtggccaacctgaaggagggcaccaagttctacaatgagctgacagagatcctggtgcgcttccagaacaagtgcagcgacatcgtgtttgccaggaagacagaaagagatgagctgctgaaggacctgcagcagagcatcgcccgggagcccagcgcccccagcatccccaccccagcctaccagagcagccctgctgggggccacgcccccaccccacccaccccagcccccaggaccatgccacccaccaagccccagcccccagcccggcccccacctcctgtgctgcctgccaacagagcccccagcgccacagcccccagccctgtgggcgccggcacagctgccccagcccccagccagaccccaggcagcgcccccccaccccaggcccagggccccccctaccccacctacccaggctacccaggctactgccagatgcccatgcccatgggctacaacccctatgcctacggccagtacaacatgccctacccacctgtgtaccaccagagccctggccaggccccctacccaggcccccagcagcccagctaccccttcccccagcccccccagcagagctactacccccagcagtag

SEQ ID NO: 61644 - DNA, 2622 bp, Artificial Sequence
  derived and/or modified sequence
atggccaccttcatcagcgtgcagctgaagaagaccagcgaggtggacctcgctaaacccttagtgaagttcatccagcagacttacccctccggtggagaggagcaagcccaatattgcagagctgccgaagagctgagtaagctccggcgggcggctgtcgggagaccccttgataagcatgaaggggctctggagactttactgagatattatgatcagatctgctcaatagagccaaagtttccatttagcgaaaatcagatttgtctcaccttcacttggaaagacgctttcgacaaaggctcgctttttgggggttccgtcaaactcgccctcgcatctttgggatatgaaaaatcctgcgtgttgttcaactgcgcggccctggcatctcagattgcagctgaacagaatttagataacgacgaggggctgaaaatagctgcaaaacattatcagtttgcttctggtgcattcctgcatattaaggaaacagtactctccgctctgagtcgggagccaacagtggatatctccccggacactgtgggtactcttagtctgattatgcttgcccaggcccaggaagtgtttttcttgaaagcaacaagagataagatgaaggacgccatcatcgccaagttggctaaccaagccgctgactattttggcgacgccttcaaacagtgccagtacaaagatactcttcctaagtacttttactttcaggaggtgttcccagttttagcagcaaaacactgtattatgcaggccaacgctgaatatcaccaaagcatcctcgcgaaacagcagaagaagtttggggaagagatcgccagacttcaacatgcagccgaactgatcaagacagtggcttcccggtatgacgagtacgtgaacgtaaaggacttcagcgacaagatcaaccgcgccttggctgccgctaagaaggacaatgacttcatataccatgaccgggtacctgacctcaaggatttagatccaattggaaaagctaccctagtaaagagtacccctgtgaacgtgccgatatcccagaaatttaccgatctgttcgagaagatggtacctgttagcgtgcagcagtctttggccgcatataaccaaagaaaagccgacctggtgaacagaagtatcgcacagatgcgcgaagctactacactcgccaacggcgtcctagctagtttgaacctgcctgccgctatagaagacgtgtcgggagacaccgtcccacagtctatactgacaaaatctcggtcggtcattgagcaaggggggatacagaccgtggatcagcttataaaagagctaccagagctgttgcagcgcaatcgtgagatactggatgaaagcttgcggttgctagacgaggaggaggcgactgataatgatttgagagccaaattcaaggagcgctggcagaggacgccaagcaacgaactgtataaacctctccgtgctgaaggcactaacttccggactgtgctggataaggccgtacaggctgacggccaggtaaaagagtgctatcagtcacacagagatacgatcgttcttctctgcaagcctgaacccgagttgaacgccgcaatcccgagtgcaaatcccgctaagaccatgcaggggagcgaagttgtgaacgtgttgaaatcacttctgtctaacctggatgaggtgaagaaggagagagagggacttgaaaatgacctgaaatctgtcaatttcgatatgacgagcaagttcttaaccgcccttgcccaggacggagtaatcaacgaagaggccctgagcgttaccgagctggacagggtgtatggtggtctcaccacaaaagttcaggagagccttaagaagcaggagggactactcaaaaatattcaagtatctcaccaggagtttagtaagatgaaacagagcaacaatgaggccaatctgcgtgaagaggtattaaagaacttggccactgcatatgacaacttcgtggaactcgtggcaaaccttaaggaggggacaaaattttataacgagctgaccgaaatacttgtacggttccagaataaatgcagcgacatcgtgttcgctaggaagaccgaacgggacgagctcctcaaagatctccagcagagtattgcccgggagcctagcgctccctctattccaacgcccgcatatcagagcagccccgcaggcggacatgctcccactccacccacacctgcacccagaactatgccgccaaccaagccgcaacccccggccaggcctcctcctcccgtgctgcctgcaaatcgcgcaccgtcagccaccgccccatcaccagttggagctggcactgcagccccggcgccgtcacaaaccccaggctctgctcccccaccccaggcacaggggcctccttatcccacatatccaggctatccgggctactgtcagatgccaatgccaatggggtacaatccgtacgcttacggacagtataacatgccttatccacctgtttatcaccagagcccaggccaagcaccctatcctggacctcagcagccatcatacccttttccccagcctcctcagcagagctactacccacaacaatag

SEQ ID NO: 61645 - DNA, 2622 bp, Artificial Sequence
  derived and/or modified sequence
atggcaacttttatctctgtacagctgaagaagacatcagaagtcgacctcgcaaagccactggtgaagttcattcagcagacctatccctccgggggagaggagcaagctcagtattgtagggccgcagaagagctgagcaaactccggcgtgcagccgtgggcagaccactcgacaagcatgaaggtgcactggaaactctcctccgatactatgaccagatctgctcgatcgagccgaaatttcccttcagtgaaaaccagatctgtctcacttttacctggaaggacgccttcgataaagggagtttatttggcggatcggtcaagttagccctcgcaagtcttgggtacgagaagtcttgcgtgttgttcaattgcgcagccctggccagccagatcgccgcagaacaaaatcttgacaatgacgagggcctgaagatcgccgcaaagcactaccagtttgcatctggagccttcctacacattaaggaaaccgtcctctcagccctgtcaagagagccgacagtcgatatatccccagatacggtgggtaccctaagcctgattatgcttgctcaagctcaggaggtgttttttctcaaagctaccagagataaaatgaaggatgcgattatcgctaagctggccaatcaggctgccgattattttggggatgcgtttaagcagtgtcaatataaagacaccctcccgaaatacttctattttcaggaagtgtttcctgtgctggccgcaaaacactgcatcatgcaggcaaacgctgagtaccaccagtctattcttgccaagcaacagaaaaagttcggcgaggaaattgctcgcctgcagcacgcggcagagctcattaagaccgtcgcaagccgatacgacgagtatgtgaacgtcaaagatttttcagacaagatcaatcgcgcattggcagccgcaaagaaggacaatgacttcatttaccatgaccgggttccagatttgaaggatctcgatccaatcggtaaagcaacgctcgtcaaatctacccctgtcaatgttcccattagccagaagttcaccgatctgtttgaaaagatggtcccagtgagcgtacaacagagccttgccgcatataaccagaggaaggccgacctggtcaaccggagcattgcacagatgagagaggccactacactggcgaatggtgtactcgcatctctcaacttgcctgctgcgattgaggacgtttctggagataccgtgccacagtcaatactgacaaagagcaggagcgtcatcgaacagggagggatacagaccgttgaccaacttatcaaagagcttcctgaattgctccaacgcaatagggagatccttgatgaatccctgagattgctggacgaggaggaggcaactgataacgacctgcgagccaagtttaaggagagatggcaacgcaccccgagcaacgaactgtacaagccgctccgcgcagagggtaccaatttccggactgtgctagacaaggccgtacaggccgatggacaggtgaaggagtgttaccagtcccatcgcgataccatcgtgttgctctgcaaacctgagcctgagttaaatgccgctatccctagcgcaaatccagccaagaccatgcagggatctgaggtcgtcaacgtgctgaagtccctgctttccaacctggacgaagtgaagaaggaacgcgagggcctcgagaatgatctgaagtctgtgaatttcgatatgacgtcaaagttcctgacagccctggctcaggatggcgtcatcaacgaggaggcgctgtctgtcactgagctagacagagtgtacgggggtctgacaacaaaagtacaagaatcattaaagaagcaggaggggttgttgaagaatatccaggtttcacaccaagagtttagtaagatgaagcagagcaataatgaggctaatcttagggaggaggtcctcaaaaacttggccactgcttacgacaacttcgtcgagctggtcgccaatttaaaggaaggaactaaattctataacgaactgaccgagattctcgtccggttccagaataaatgttctgacattgtgttcgcacgcaaaacagaacgggacgaactgctgaaagaccttcagcaatccattgctcgggaaccctccgcgccatccatcccgactcccgcttaccaatcatcccctgcgggagggcatgcccctacccctccgacccccgctcccagaacgatgcctccaaccaaacctcagcctccagctagacctccaccccctgtcctgcccgctaatagagccccatcagcaacagcaccttccccagtgggcgcagggacagccgcacctgcaccatcacagacacctggctccgcccctccccctcaggcccagggacctccttatccaacatatccgggataccctggttattgtcaaatgcccatgccgatgggatacaacccatacgcctacggacaatacaatatgccttaccctccagtgtaccaccaaagccctgggcaagcgccttatcccggaccacagcaacccagttaccccttcccgcagccccctcagcagtcgtattacccacaacagtag

SEQ ID NO: 61646 - DNA, 5954 bp, Artificial Sequence
  derived and/or modified sequence
ggagctcccggaagttgccggacccggaacgcaggcggagcgcaagtctgtcagccagtcagtccgccagtccgccagcccagtacctctctctcctcggccctcgtaagctgtccgcggtctgtttggcccgaacggcggcggaggcgctgatcatggcgacattcatctcggtgcagctgaaaaagacctcagaggtggacctggccaagccgctggtgaagttcatccagcagacttacccaagcggcggggaagagcaggcccagtactgccgcgcggcggaggagctcagcaagctgcgccgcgccgcagtcggtcgtccgctggacaagcacgagggcgcgctcgagacgctcctgagatattatgatcagatttgttctattgaacccaaattcccattttctgaaaatcagatctgcttgacatttacctggaaggatgctttcgataaaggttcactttttggaggctctgtaaaactggctcttgcaagcttaggatatgaaaagagctgtgtgttgttcaattgtgcagccttagctagccaaattgcagcagaacagaacctggataatgatgaaggattgaaaatcgctgctaaacattaccagtttgctagtggtgcctttttacatattaaagagacggttttatctgccttaagtcgagagccgaccgtggacatatctccagatactgttgggaccctcagtcttattatgctggcacaggctcaagaagtattttttttaaaagccacaagagataaaatgaaagatgccatcatagctaaattggctaatcaggctgcagattattttggtgatgctttcaaacagtgtcaatacaaagatactctccccaagtatttttatttccaggaggtgttccctgtcttggctgcaaagcactgtatcatgcaggccaatgctgagtaccatcagtctatcctggcaaaacagcagaagaaatttggagaagaaattgcaaggttacagcatgcagcagaactgattaaaacagtggcatctcgctatgatgaatatgttaatgtgaaggatttttctgacaaaatcaatcgtgcccttgctgcagcaaagaaggataatgacttcatttatcatgatcgagttccagaccttaaagatctagatcctattggcaaagccacacttgtgaaatctaccccggtcaatgtacccatcagtcagaaatttactgatctgtttgagaagatggttcccgtgtcagtacagcagtctttggctgcctataatcagaggaaagccgatttggttaacagatcaattgctcagatgagagaagccaccactttggcaaatggggtgctagcttcccttaatcttccagcagcaattgaagatgtgtctggagacactgtacctcagtctatattgactaaatccagatctgtgattgaacagggaggcatccagactgttgatcagttgattaaagaactgcctgaattactgcaacgaaatagagaaatcctagatgagtcattaaggttgttggatgaagaagaagcaaccgataatgatttaagagcaaaatttaaggaacgttggcaaaggacaccatccaatgaactgtataagcctttaagagcagagggaaccaacttcagaacagttttagataaagctgtgcaggcagatggacaagtgaaagaatgttaccagtctcatcgtgacaccatcgtgcttttgtgtaagccagagcctgagctgaatgctgccatcccttctgctaatccagcaaagaccatgcagggcagtgaggttgtaaatgtcttaaaatccttattgtcaaatcttgatgaagtaaagaaggaaagagagggtctggagaatgacttgaaatctgtgaattttgacatgacaagcaagtttttgacagccctggctcaagatggtgtgataaatgaagaagctctttctgttactgaactagatcgagtctatggaggtcttacaactaaagtccaagaatctctaaagaaacaggagggacttcttaaaaatattcaggtctcacatcaggaattttcaaaaatgaaacaatctaataatgaagctaacttaagagaagaagttttgaagaatttagctactgcatatgacaactttgttgaacttgtagctaatttgaaggaaggcacaaagttttacaatgagttgactgaaatcctggtcaggttccagaacaaatgcagtgatatagtttttgcacggaagacagaaagagatgaactcttaaaggacttgcaacaaagcattgccagagaacctagtgctccttcaattcctacacctgcgtatcagtcctcaccagcaggaggacatgcaccaactcctccaactccagcgccaagaaccatgccgcctactaagccccagcccccagccaggcctccaccacctgtgcttccagcaaatcgagctccttctgctactgctccatctccagtgggggctgggactgctgcgccagctccatcacaaacgcctggctcagctcctcctccacaggcgcagggaccaccctatcccacctatccaggatatcctgggtattgccaaatgcccatgcccatgggctataatccttatgcgtatggccagtataatatgccatatccaccagtgtatcaccagagtcctggacaggctccatacccgggaccccagcagccttcataccccttccctcagcccccacagcagtcttactatccacagcagtaatatgtctgctcagcagctcagctgattcagatcagagggaaagaaataccaaccctgcaataagtgtactaaactctacgctctggttaatgtaatgtactctcctggactgaatgcagtgtataatttctgtctacagctagaagctgtgccccagttccacatttgattacacatgtgagatttgctgctgttgcagtataaacactaggtataataggatttgaaattgcattacagttcataaaaattgaaaatgagaaattaaacctgcaagtgaaacatttgaaacgattatactttctacataagacatggttgggacatcagatacttacaaagatggtttaagtatggatactagagaaaattaagttttctttctctttggtttattgatttggtttaatttccattatgctattttgcataatcaaggcactgtaaatcttataattttaaaataaattacttaagaacagttgtcattgttatgttttgttattgattctcattactgtctaattttttttctggtattagtctcattttgtatgtatataagttaaacagatactgtttttaagtgcatgaatagtacaagttattatcaaggatgttttacagggaaatcaaaagaatattatcatactttatctttcgtatgctgattagtaaacgatttttgacatttattttagaaagtcctataatgtggaagaaacaaacagttgctaccaaagattcttcaaataaacatacaaataaatgtgtatatttaatgttttattgttagcttctccagaaaattgatgcaaattctggtaataattcttgcattttttccccataacctggttaaaataaatacgccattggcaatacttcataatgtaatggaattgtttggggaacacttactgtaccctctcatcctttttccaccttactgtgttaacttagtgacatttaatgcccaatatgtatgaatagatctaagccatttaattttttttccttaaagattggagtattttataattcaaggagcatacaaaacaatggttgggaacatatgccaattatggaataggctatgtatttaatattaatctctgccattaggatatctactcactgtataaacctcagtaaaaatagtgaagacatgcatcatggaatgagaaaatgagaaaggaatgagttgtctaacatcacagtgggatctgttttttgtgaggttcatttctgaacacattaggcatatgagcagatttccagtgaatctatttatgtttattttctgagtttcaacgctgaccttttcttgcattattgtttcattttaatgatagtgttacttgtcccactgttgttttcattgagtttggatttatattttaaatgttcgaatgaaagtatgattgtaaaagggagtgaattggtttaaaaatatatgtatattttaaactttgttgtgtgtaggaaacatgaaggcatgttaattcaatataaatgacctttgatttcatggaatattaaagttggtttaaagtccaatagttaaaccttagcaaaaatagctttttacttcatcagttgctaagatttaatactttggattcatcaaagtgtgacatgggcttgtttgacttctgtaagtggcatttaagttccacattcttattacttgaggtactttatactaacataagacagtgagagttagaggtattacaagttgctagtttataatgtcttactaatgcagaaacaaggaaaaaagcaaaattggcctgaatattctcttggggaaagagggcaccaaagaaaagggtaagtgcatctgagggccaaaagagatgtataagccttttagcccattccccatgctgggcctgctcacagagccacaggaagatcattcagaaactaggaaaggaggcccccacagctgatcctgccacagcacacctgactcactcggctctgttagtgtaaccttttaaatgtagcaacacaaaccctttccctcttgtcagttcactcatcctttggtttctttttaatcacctgtgtctgggcacagacaatcacaataaatgcagccctttattactgttaaggatcatactgttggtttggagttggaagggtactactctgtgattcaggtgtgttgtacccatatttataattaggctttattatcttcctaaatcaaggaaaggaaatcatccccagaccatttatgctgagctttggaatactattttaaactggattgtacttaaataatgaagctctgcatagaggaactagtcagaagtggggaaaacactgtctaatttttatcagtctggtataaagtattgatctaagagaactctccctgtgccccttggtctttattctcaattaagaaaaacagtcacatgtcacgacaaaccaatcaatctttatgagatattcctgtatccataccccagcttgtttgcaatttataaacctccccttcaaaactaaggagttgcagaaaaaaatggatttcacagagccttgtgtccctaaagttctgtcccagtcagcagtctttatagtccaaacagattataaaaaatgttttccatttgaactttacagtttgcaaaagtgcttttatacattttctaatttcagaaacaggataatttgttaagtgggtttcagtttgctaatagggattttttgtgttttgttttttaattttcagcatctcttgaagaatcttgctacagccaaatggcatctcactttttaaagacgtttgcaattattagttgattcacagtacagaacaaggtataaaggaaaaaaccctgctaggtagtgttataattgctagattaaaaatagactagaacaggttcattttaagatttacttggaagagcaaagaaggaaaaattatatttttaaagaaagagaatattcaggctttatttctggtatgaagtttatattttttaaaaaaatcctatattatcacaccagagattttagattcttttctggttagaaacattgctggtagttggattatatttttattgtattcatttatcttagggggaacattgtaaagaaacaaaaaggtccagatgaatgtatgctagaaataaaagttgaaagattctt

SEQ ID NO: 61647 - DNA, 2622 bp, Artificial Sequence
  derived and/or modified sequence
atggccaccttcatcagcgtgcagctgaagaagaccagcgaggtggacctggccaagcccctggtgaagttcatccagcagacctaccccagcggcggcgaggagcaggcccagtactgcagagccgccgaggagctgagcaagctgagaagagccgccgtgggcagacccctggacaagcacgagggcgccctggagaccctgctgagatactacgaccagatctgcagcatcgagcccaagttccccttcagcgagaaccagatctgcctgaccttcacctggaaggacgccttcgacaagggcagcctgttcggcggcagcgtgaagctggccctggccagcctgggctacgagaagagctgcgtgctgttcaactgcgccgccctggccagccagatcgccgccgagcagaacctggacaacgacgagggcctgaagatcgccgccaagcactaccagttcgccagcggcgccttcctgcacatcaaggagaccgtgctgagcgccctgagcagagagcccaccgtggacatcagccccgacaccgtgggcaccctgagcctgatcatgctggcccaggcccaggaggtgttcttcctgaaggccaccagagacaagatgaaggacgccatcatcgccaagctggccaaccaggccgccgactacttcggcgacgccttcaagcagtgccagtacaaggacaccctgcccaagtacttctacttccaggaggtgttccccgtgctggccgccaagcactgcatcatgcaggccaacgccgagtaccaccagagcatcctggccaagcagcagaagaagttcggcgaggagatcgccagactgcagcacgccgccgagctgatcaagaccgtggccagcagatacgacgagtacgtgaacgtgaaggacttcagcgacaagatcaacagagccctggccgccgccaagaaggacaacgacttcatctaccacgacagagtgcccgacctgaaggacctggaccccatcggcaaggccaccctggtgaagagcacccccgtgaacgtgcccatcagccagaagttcaccgacctgttcgagaagatggtgcccgtgagcgtgcagcagagcctggccgcctacaaccagagaaaggccgacctggtgaacagaagcatcgcccagatgagagaggccaccaccctggccaacggcgtgctggccagcctgaacctgcccgccgccatcgaggacgtgagcggcgacaccgtgccccagagcatcctgaccaagagcagaagcgtgatcgagcagggcggcatccagaccgtggaccagctgatcaaggagctgcccgagctgctgcagagaaacagagagatcctggacgagagcctgagactgctggacgaggaggaggccaccgacaacgacctgagagccaagttcaaggagagatggcagagaacccccagcaacgagctgtacaagcccctgagagccgagggcaccaacttcagaaccgtgctggacaaggccgtgcaggccgacggccaggtgaaggagtgctaccagagccacagagacaccatcgtgctgctgtgcaagcccgagcccgagctgaacgccgccatccccagcgccaaccccgccaagaccatgcagggcagcgaggtggtgaacgtgctgaagagcctgctgagcaacctggacgaggtgaagaaggagagagagggcctggagaacgacctgaagagcgtgaacttcgacatgaccagcaagttcctgaccgccctggcccaggacggcgtgatcaacgaggaggccctgagcgtgaccgagctggacagagtgtacggcggcctgaccaccaaggtgcaggagagcctgaagaagcaggagggcctgctgaagaacatccaggtgagccaccaggagttcagcaagatgaagcagagcaacaacgaggccaacctgagagaggaggtgctgaagaacctggccaccgcctacgacaacttcgtggagctggtggccaacctgaaggagggcaccaagttctacaacgagctgaccgagatcctggtgagattccagaacaagtgcagcgacatcgtgttcgccagaaagaccgagagagacgagctgctgaaggacctgcagcagagcatcgccagagagcccagcgcccccagcatccccacccccgcctaccagagcagccccgccggcggccacgcccccaccccccccacccccgcccccagaaccatgccccccaccaagccccagccccccgccagaccccccccccccgtgctgcccgccaacagagcccccagcgccaccgcccccagccccgtgggcgccggcaccgccgcccccgcccccagccagacccccggcagcgccccccccccccaggcccagggccccccctaccccacctaccccggctaccccggctactgccagatgcccatgcccatgggctacaacccctacgcctacggccagtacaacatgccctacccccccgtgtaccaccagagccccggccaggccccctaccccggcccccagcagcccagctaccccttcccccagcccccccagcagagctactacccccagcagtag

SEQ ID NO: 61648 - protein, 256 aa, Artificial Sequence
  derived and/or modified sequence
MFRLLSSCCSCLRTTEETRRNVTIPIIGLNNSGKTVLVEAFQKLLPSKTDHCMKSELTTLLLDEYELSIYDLNGDLKGREAWPNYYAQAHGLVFVLDSSDIRRMQEVKIILTHLLSDKRVAGKPILILANKQDKKKALMPCDIIDYLLLKKLVKENKCPCRVEPCSAIRNLERRNHQPIVEGLRWLLAVIDTCQLPPTSSISISKNNTGSGERCSSHSFSTRTGMSKEKRQHLEQCSIEAKPLKSILQPSNQSYTH

SEQ ID NO: 61649 - DNA, 771 bp, Artificial Sequence
  derived and/or modified sequence
atgttcagactgctgagcagctgctgcagctgcctgagaaccaccgaggagaccagaagaaacgtgaccatccccatcatcggcctgaacaacagcggcaagaccgtgctggtggaggccttccagaagctgctgcccagcaagaccgaccactgcatgaagagcgagctgaccaccctgctgctggacgagtacgagctgagcatctacgacctgaacggcgacctgaagggcagagaggcctggcccaactactacgcccaggcccacggcctggtgttcgtgctggacagcagcgacatcagaagaatgcaggaggtgaagatcatcctgacccacctgctgagcgacaagagagtggccggcaagcccatcctgatcctggccaacaagcaggacaagaagaaggccctgatgccctgcgacatcatcgactacctgctgctgaagaagctggtgaaggagaacaagtgcccctgcagagtggagccctgcagcgccatcagaaacctggagagaagaaaccaccagcccatcgtggagggcctgagatggctgctggccgtgatcgacacctgccagctgccccccaccagcagcatcagcatcagcaagaacaacaccggcagcggcgagagatgcagcagccacagcttcagcaccagaaccggcatgagcaaggagaagagacagcacctggagcagtgcagcatcgaggccaagcccctgaagagcatcctgcagcccagcaaccagagctacacccactag

SEQ ID NO: 61650 - DNA, 1102 bp, Artificial Sequence
  derived and/or modified sequence
aagaaggctagaaagctcaatgcgtcttcctattactctgcatatcttatgtcttccatccaaaaagaatcaacttatcagataaataaccacctcatgaactaagatgaatcatgttccggcttttgtcctcctgctgctcttgcctaaggacaacagaagagacacgaaggaatgtgaccatccctatcattggcttgaacaactctggcaaaactgttcttgtggaggcattccaaaaattacttcccagtaagacagaccattgcatgaaatcggaactgactacacttttgttagatgagtatgaactttccatctatgacctgaatggagacctgaagggccgggaagcatggccaaactactatgcacaggcccatgggcttgttttcgtcctggattccagtgacataagacgcatgcaggaagtgaagatcatcttaacacatctgctgtccgataaaagagtggcagggaaacccatcttaattttagcaaacaaacaagacaagaagaaagccctcatgccttgtgatattattgactatctacttctaaagaagctagtgaaagagaataagtgcccatgccgagtagagccatgttcagccatcagaaaccttgaaagaagaaaccatcagcccatagttgaaggactgcgctggctattagctgtcattgatacttgccaactaccacctacctcgagcatctcaatctccaagaataacacaggctctggagaaagatgctcatcacacagcttctccaccagaacaggaatgtcaaaggagaaaagacagcatctagaacaatgctcaatcgaagctaagcctctaaagtcaatcctacagccatcaaatcaatcctatactcactgagaggctcaagaagagtgagatggcatccattgagaatgaagaccaccttggtaaaaaagaacagagactttacatctttgtaccgagatgctgctgacaaagcttgtggacaataagtcatgggtgatcaaccaaaactgagccttagaaatacagggttcatttagaaataagtatttttttctttaaggttcttaggcagaaaaggattggcaaaa

SEQ ID NO: 61651 - DNA, 771 bp, Artificial Sequence
  derived and/or modified sequence
atgttcagactgctgagcagttgttgcagctgcctgaggacaacagaagaaactcggaggaacgtgaccataccaattatcggcctgaacaacagcggcaaaactgtcctggtcgaggccttccaaaaactgctgccgtccaagactgatcactgtatgaagtccgagttgaccacactgctcctggacgaatatgagctgagcatctatgacttaaacggcgacctcaaagggcgcgaggcctggcccaactattatgcccaggctcatggcctcgtgtttgtgctggattcttctgatataagaaggatgcaggaagtcaaaatcattttgacccacctgctttccgataaacgcgtggccggcaaaccaatacttatccttgcgaataaacaggataagaaaaaggccttaatgccttgtgacattattgattacttgctgctgaagaagctagtaaaggagaataagtgtccgtgccgcgtcgaaccttgttctgctatccgtaacctggagcggcgcaatcaccagccaatagtcgagggtcttagatggctgcttgccgtgatcgatacatgtcagttgccccctacctctagcatttccatttccaagaacaacacaggatcaggggaacggtgtagttcccattctttttctacaaggaccggcatgtctaaagagaagaggcagcatcttgaacaatgctcaatcgaggctaaacctcttaaaagtatcttgcagccttcgaaccagagctatacgcattag

SEQ ID NO: 61652 - DNA, 771 bp, Artificial Sequence
  derived and/or modified sequence
atgttccggctgctgagcagctgctgcagctgcctgcggaccacagaggagaccaggagaaatgtgaccatccccatcatcggcctgaacaacagcggcaagacagtgctggtggaggccttccagaagctgctgcccagcaagacagaccactgcatgaagtctgagctgaccaccctgctgctggatgaatatgagctgagcatctatgacctgaatggagacctgaagggccgggaggcctggcccaactactatgcccaggcccacggcctggtgtttgtgctggacagcagtgacatccggaggatgcaggaggtgaagatcatcctgacccacctgctgagtgacaagagggtggccggcaagcccatcctgatcctggccaacaagcaggacaagaagaaggccctgatgccctgtgacatcatcgactacctgctgctgaagaagctggtgaaggaaaataaatgtccctgccgggtggagccctgcagcgccatccggaacctggagaggaggaaccaccagcccatcgtggagggcctgcgctggctgctggccgtcatcgacacctgccagctgccccccaccagcagcatcagcatcagcaagaacaacacaggcagcggggagcgctgcagcagccacagcttcagcaccaggacaggcatgagcaaggagaagaggcagcacctggagcagtgcagcattgaggccaagcccctgaagagcatcctgcagcccagcaaccagagctacacccactag

SEQ ID NO: 61653 - DNA, 771 bp, Artificial Sequence
  derived and/or modified sequence
atgttccggctgctgagcagctgctgcagctgcctgcggaccaccgaagagactcgaagaaacgtcactatccctattattggcctgaataacagcggtaagaccgtcttagtcgaagccttccaaaagttactcccatccaaaaccgaccactgtatgaagtctgagctgacaactctcctgttggatgaatacgaactttccatctacgatcttaatggcgatctcaagggcagagaggcttggcctaattactatgcccaggctcacgggctggtttttgtgcttgatagcagcgacatccggcgaatgcaggaggtgaagattattctgactcacctgctgagtgacaagcgggtggccggtaaacctatccttattttagcaaacaaacaggataagaagaaagctcttatgccctgtgatataattgactacctgctgttaaaaaagttagtcaaagagaacaagtgtccctgccgagtggaaccctgctcagccataaggaatctcgagagacgcaatcaccagccgattgtcgaaggtctaagatggttgttggcagtgatcgacacatgccagttgccgccgacttcttctatcagcatttccaagaacaacactggctccggagagcggtgttcttcacatagcttctcaaccagaaccgggatgagcaaggaaaaacgccagcacttagaacagtgcagtatcgaggccaagcccctgaagagtattctacagccctccaaccagagttacacacattag

SEQ ID NO: 61654 - DNA, 771 bp, Artificial Sequence
  derived and/or modified sequence
atgtttcggctcctcagcagttgttgtagctgtctgagaaccaccgaggagacacgcagaaacgttacgatccccataatagggctgaacaattccggaaagacagttctcgtggaagctttccagaagttattaccctccaaaacagaccactgcatgaagagcgagctcacaaccttgttactcgacgagtacgagctgtctatttacgacctgaacggggacctgaagggacgggaggcttggccaaattattacgcacaggctcatgggctcgtgtttgttctggacagcagtgatattcgacgaatgcaggaagtgaagatcattctgacccatctgttaagcgacaagagggtggctggcaaaccaattctcatcttggccaataagcaggataagaaaaaagcacttatgccgtgcgacattatcgattacctattgctgaaaaagctggtgaaagagaataaatgcccatgtagagtggagccttgtagcgcaatacggaatctggaacgaagaaatcatcagcccatagtggagggcctgaggtggctgctggccgtgattgatacctgtcaactcccccctacttcaagcatctctataagcaagaataataccggcagtggcgagaggtgtagctcgcacagttttagtacccgcactggcatgtctaaagagaagaggcagcatctcgagcaatgctctattgaagccaagccacttaaatccatcctgcagcctagcaatcagagttacactcattag

SEQ ID NO: 61655 - protein, 344 aa, Artificial Sequence
  derived and/or modified sequence
MVSVNSSHCFYNDSFKYTLYGCMFSMVFVLGLISNCVAIYIFICVLKVRNETTTYMINLAMSDLLFVFTLPFRIFYFTTRNWPFGDLLCKISVMLFYTNMYGSILFLTCISVDRFLAIVYPFKSKTLRTKRNAKIVCTGVWLTVIGGSAPAVFVQSTHSQGNNASEACFENFPEATWKTYLSRIVIFIEIVGFFIPLILNVTCSSMVLKTLTKPVTLSRSKINKTKVLKMIFVHLIIFCFCFVPYNINLILYSLVRTQTFVNCSVVAAVRTMYPITLCIAVSNCCFDPIVYYFTSDTIQNSIKMKNWSVRRSDFRFSEVHGAENFIQHNLQTLKSKIFDNESAA

SEQ ID NO: 61656 - DNA, 1035 bp, Artificial Sequence
  derived and/or modified sequence
atggtgagcgtgaacagcagccactgcttctacaacgacagcttcaagtacaccctgtacggctgcatgttcagcatggtgttcgtgctgggcctgatcagcaactgcgtggccatctacatcttcatctgcgtgctgaaggtgagaaacgagaccaccacctacatgatcaacctggccatgagcgacctgctgttcgtgttcaccctgcccttcagaatcttctacttcaccaccagaaactggcccttcggcgacctgctgtgcaagatcagcgtgatgctgttctacaccaacatgtacggcagcatcctgttcctgacctgcatcagcgtggacagattcctggccatcgtgtaccccttcaagagcaagaccctgagaaccaagagaaacgccaagatcgtgtgcaccggcgtgtggctgaccgtgatcggcggcagcgcccccgccgtgttcgtgcagagcacccacagccagggcaacaacgccagcgaggcctgcttcgagaacttccccgaggccacctggaagacctacctgagcagaatcgtgatcttcatcgagatcgtgggcttcttcatccccctgatcctgaacgtgacctgcagcagcatggtgctgaagaccctgaccaagcccgtgaccctgagcagaagcaagatcaacaagaccaaggtgctgaagatgatcttcgtgcacctgatcatcttctgcttctgcttcgtgccctacaacatcaacctgatcctgtacagcctggtgagaacccagaccttcgtgaactgcagcgtggtggccgccgtgagaaccatgtaccccatcaccctgtgcatcgccgtgagcaactgctgcttcgaccccatcgtgtactacttcaccagcgacaccatccagaacagcatcaagatgaagaactggagcgtgagaagaagcgacttcagattcagcgaggtgcacggcgccgagaacttcatccagcacaacctgcagaccctgaagagcaagatcttcgacaacgagagcgccgcctag

SEQ ID NO: 61657 - DNA, 1035 bp, Artificial Sequence
  derived and/or modified sequence
atggtgtctgttaatagctcacactgtttctacaatgactccttcaagtacacattgtacggctgcatgtttagtatggtgttcgtgctgggcctcatttctaattgtgtcgctatttatatcttcatctgcgtgttgaaggtgcgcaacgaaaccacgacctatatgattaacctcgcaatgtctgatctgctgttcgtttttacgctcccgttcagaatattttatttcaccacccgcaattggccatttggcgatctcctgtgtaagatctccgtcatgctgttctacaccaatatgtacggctctatcttattcctgacttgcatctccgttgacagattcctggctattgtctatcctttcaagagcaaaaccctgaggactaagaggaatgctaagattgtgtgtacgggagtttggctaacagtcattgggggatctgcccccgcagtgtttgtccagtcaacccactcccagggcaataatgcatctgaagcttgtttcgagaacttcccggaggcaacttggaagacttacttatctaggattgtgatcttcattgaaatcgtcggcttcttcatccccttgattcttaacgtaacctgcagctccatggtactaaaaaccctcactaagcccgttaccctttctcgaagtaagattaacaaaaccaaagtactgaagatgattttcgtccacctgattattttttgcttctgttttgtgccatataacattaatttgatcctgtactccttggtgcggacccagacctttgtgaattgctcggttgtggctgccgtgaggacaatgtatcctataacgctgtgtattgctgtgtccaactgttgctttgaccctattgtgtactacttcactagtgataccatccaaaattccattaaaatgaaaaattggtccgtgaggaggagtgactttagattcagcgaggtccatggcgcagaaaatttcattcagcataacctgcaaaccttgaagtcaaagatcttcgacaatgagtccgccgcctag

SEQ ID NO: 61658 - DNA, 1035 bp, Artificial Sequence
  derived and/or modified sequence
atggttagtgtgaacagctctcactgcttttacaacgactccttcaagtacacactttacggctgtatgtttagtatggtatttgtcctcggtctgatatccaattgcgtggccatatatatttttatttgtgtcctgaaggtcaggaatgaaactacaacgtacatgattaaccttgcaatgagcgatctgctctttgtgtttacccttcccttccgcattttctattttacaacgagaaactggccatttggtgacctgctctgtaaaattagcgtcatgctcttttatacaaacatgtatggatcaatactgttcttaacctgtataagtgtggatcggtttctcgctattgtttatcctttcaaaagcaaaacactcaggactaagaggaacgcgaagattgtctgtacgggcgtctggctgactgtgataggggggagtgctcccgcagtgtttgtccagagtactcattcacagggcaacaatgcttctgaggcttgtttcgagaattttcccgaggcaacctggaaaacatacttgtcacggattgtcatattcattgagatagtggggttttttattccgctgatccttaatgtcacctgcagctctatggttttgaaaacacttaccaaaccggtgactctgagtcggtccaaaatcaacaagacaaaggtgctaaagatgatctttgtgcatctgatcattttttgtttctgtttcgtgccctacaacatcaacctgattctgtactccttggtgcgaacccagaccttcgtgaactgtagtgtggtcgcagccgtgcgaaccatgtaccccataaccctttgcattgcggtctccaattgttgcttcgatccgatagtgtattactttacttctgacacgatccaaaattccattaaaatgaagaattggtcagtgcgtagatctgattttaggttcagtgaagtccatggggccgaaaactttatccagcacaacctgcagactctgaagtctaagattttcgataacgaaagtgccgcctag

SEQ ID NO: 61659 - DNA, 1035 bp, Artificial Sequence
  derived and/or modified sequence
atggtgtctgtgaacagcagccactgcttctacaatgacagcttcaagtacaccctgtatggctgcatgttctccatggtgtttgtgctgggcctcatcagcaactgtgtggccatctacatcttcatctgtgtgctgaaggtgagaaatgagaccaccacctacatgatcaacctggccatgtctgacctgctgtttgtgttcaccctgcccttccgcatcttctacttcaccaccaggaactggccctttggagacctgctgtgcaagatctctgtgatgctgttctacaccaacatgtatggcagcatcctcttcctgacctgcatctctgtggaccgcttcctggccatcgtgtaccccttcaagagcaagaccctgcggaccaagagaaatgccaagatcgtgtgcaccggggtgtggctgactgtgattggaggcagcgccccagctgtgtttgtgcagagcacccacagccagggcaacaatgccagcgaggcctgctttgagaacttccctgaggccacctggaagacctacctgagccgcatcgtcatcttcatcgagatcgtgggcttcttcatccccctcatcctgaatgtgacctgcagctccatggtgctgaagaccctgaccaagcctgtgaccctgagccgcagcaagatcaacaagaccaaggtgctgaagatgatctttgtgcacctgatcatcttctgcttctgctttgtgccctacaacatcaacctgatcctgtacagcctggtgaggacccagacctttgtgaactgcagcgtggtggccgctgtgaggaccatgtaccccatcaccctgtgcatcgctgtgagcaactgctgctttgaccccatcgtgtactacttcaccagtgacaccatccagaacagcatcaagatgaagaactggagcgtgcggcggagtgacttccgcttcagcgaggtgcacggggctgagaacttcatccagcacaacctgcagaccctgaagagcaagatctttgacaatgaatctgctgcctag

SEQ ID NO: 61660 - DNA, 1035 bp, Artificial Sequence
  derived and/or modified sequence
atggtgagcgtgaacagcagccactgcttctacaacgacagcttcaaatacaccttatatgggtgtatgttctcaatggtcttcgtccttgggttgatctccaattgtgtggctatctatatctttatatgtgtacttaaggttcgaaacgaaaccacaacatacatgatcaatctagcaatgagcgacttattgttcgtgttcaccttgcctttcagaatattttatttcaccaccaggaactggccatttggcgatcttctttgtaaaataagcgttatgctcttctacacaaatatgtacggcagtattctgttcttgacttgtatcagtgtagaccggttcctagccatcgtctatccgttcaaatccaaaactctgcgtactaagaggaacgctaaaatcgtgtgcactggtgtatggctcactgtcattggtggatccgcccccgcggtgttcgttcagagtactcattcccaggggaataacgcctcagaagcttgttttgagaacttcccggaggctacctggaagacctacttatcaagaatcgtgattttcatagagatcgtagggttctttataccactgattctgaacgtgacttgttcatctatggtattaaagaccctgacaaaacccgttacgctgtcaaggtcaaagatcaataagaccaaagtactcaaaatgatcttcgtgcacctcataatcttctgtttctgtttcgtcccctacaatattaacctaattctatatagtctcgtacgtacacaaacattcgtcaactgcagcgtagtagccgcagttcgcactatgtatcccattaccctctgtattgccgttagtaattgctgtttcgaccccattgtttactactttacctctgatacgatacagaacagcattaagatgaaaaactggagtgttcgccggagcgactttagattctccgaggtgcatggtgcagagaatttcatccagcacaacttgcagacacttaagagtaaaattttcgataatgaatcagccgcatag

SEQ ID NO: 61661 - DNA, 1035 bp, Artificial Sequence
  derived and/or modified sequence
atggtgagcgtgaacagcagccactgcttctacaacgacagcttcaagtacaccctgtatggttgcatgttctcaatggtctttgtccttggcttaatttcaaattgcgtggcaatttatatattcatctgtgttctcaaggtgcgcaacgagacaactacctatatgattaacctggctatgagcgaccttctatttgtcttcacgctaccatttaggatcttctattttactaccagaaactggccatttggcgatctgctctgtaagataagtgttatgttattttacaccaacatgtatgggagcatactgttcctgacctgtatctccgtggatcgcttcctggctatcgtgtatccctttaagagcaagactcttcgtacaaaaaggaatgccaagattgtgtgtactggcgtatggctcacagtaattggcggatctgctcctgctgtctttgtgcaatccacacatagtcagggaaataacgcctccgaagcctgtttcgagaatttcccagaggccacgtggaagacctacttgagccgcattgtaatatttattgagattgtcggattcttcattcccctcatattgaatgtgacctgtagctccatggttctcaagaccttgaccaaacccgtgacacttagcagaagcaaaattaacaagacaaaagttcttaaaatgatttttgtccacctgatcatcttttgcttctgctttgttccctacaacatcaatctgatattgtatagccttgtcaggacacagacctttgtcaattgtagcgtcgttgccgccgtccgaaccatgtaccccataacactctgcatcgccgtgagtaattgctgttttgaccctattgtgtactacttcactagtgatacaatacagaacagtattaagatgaagaactggagcgtgcggaggtcagactttcggttttccgaagttcatggagccgaaaactttatccagcacaacctccagacactcaaatcgaagatatttgacaacgagtctgccgcatag

SEQ ID NO: 61662 - DNA, 1035 bp, Artificial Sequence
  derived and/or modified sequence
atggtcagtgtgaactcatctcactgcttctataatgactcatttaagtatactctctacggatgtatgttctcaatggtgttcgtgctgggcctgattagtaactgcgtagccatttatatcttcatttgtgtactgaaagttcgcaatgaaacaaccacttacatgataaatctggcgatgagtgatctgctgttcgtgttcactcttccattcaggattttttactttacaacccgcaattggcctttcggcgatctactttgcaaaatctctgtcatgctgttctacacaaacatgtacggttctatactgtttctgacttgtatatcagtcgaccgattccttgcaatcgtgtaccctttcaagtctaagacccttcgcaccaagaggaacgcgaagattgtctgtacgggcgtgtggctcaccgtcatcgggggatccgcccctgcagtgttcgtacagagcacgcactctcaaggaaacaatgcttccgaggcttgttttgagaactttccagaagctacgtggaagacttatctttctagaattgtaatttttatcgaaatcgtcggcttcttcatcccgctcatcctcaatgttacctgtagtagtatggtattgaagaccttaaccaagcctgtgactctgtccaggtcaaagataaacaaaactaaggtgctcaaaatgatattcgtacacctaatcatattctgcttttgctttgttccctacaacatcaatttgatcctgtactctctggtccggacacagacattcgtgaattgctcagtggtggccgctgtgagaacaatgtatccaatcacactttgtattgcggtgagcaactgttgtttcgatccaatcgtgtactatttcaccagcgatacaatccagaactccattaagatgaagaattggtcagtgcggaggagcgacttccgtttttcggaggtgcacggtgctgaaaatttcatccagcacaaccttcagacactgaaatctaaaatttttgacaatgaatcggccgcatag

SEQ ID NO: 61663 - DNA, 1035 bp, Artificial Sequence
  derived and/or modified sequence
atggtcagtgtcaacagctcccattgtttctataacgactccttcaaatacaccctttacggctgcatgtttagcatggtgtttgtgttgggcttgattagtaactgcgtggctatatatatttttatttgcgtccttaaggtgagaaatgagaccactacctacatgattaacctcgcaatgtctgatctgctgttcgtcttcacgctcccattcagaattttctattttacaacccggaattggccttttggtgatttactgtgtaaaatcagcgtgatgctcttttacaccaatatgtatgggtcgatcttatttctcacttgtatctccgtggacaggttccttgccatcgtttacccatttaaatccaaaacactcaggacaaaacgcaatgccaagatcgtgtgcacaggagtgtggttgacagttatcggaggctccgccccagccgtcttcgtccaaagcacacactcacagggcaacaatgcctccgaggcttgcttcgagaacttccctgaggctacatggaaaacctatctgtcaagaatcgtaatttttatcgaaatagtcggcttcttcattccccttattctgaacgtcacatgttctagtatggtcctcaaaactttgactaagcctgtcaccctgtccagatcgaagatcaacaaaacaaaggttttaaagatgatattcgtgcaccttatcatattctgcttttgctttgtaccctacaatatcaatttgatcttgtactctctggttaggacacaaacattcgtcaattgctccgttgttgctgcagtgcgaaccatgtacccgattactctgtgtatcgccgtctctaactgctgctttgaccctatcgtgtactacttcacatccgatacgatccagaacagcatcaagatgaaaaactggagcgtgaggaggagcgactttcgatttagcgaggttcatggcgcagaaaactttatccagcataatctgcagactttaaagtccaaaatcttcgataatgaaagcgcagcctag

SEQ ID NO: 61664 - DNA, 2428 bp, Artificial Sequence
  derived and/or modified sequence
gaagctgaggagaagctgatgccatgcttcctgtacagcctgaagaaccacaaggtcttgatctgtcaccaggctgaagtgcagtggtacaatcaaagctcactgcagtctcaacctcctaggctcaaacaatcctcccacttcagcctcccaaccagctgggaccacaggttgacatcaccacacccaggtctgctggaatttgctggaggtccactccagaccctgtttgtctggatatcaccagcagaggttgcagaacaacaaagattgctgcctgttccttcctctggaagctttgtcccagaggggcacccaccagacggcagctggagctctcctgttccctctgctatggctcttcctcagtagaaacaactggcaacaaaattcaagtttatgattcattcatcagcaaacatgtgagaatcatctacaaagaaccaagaattgtgagaaagcgacctcaagatacaactggcaactgaggaaaaggcctcaattcaacaagagctaacaagcttgggagtttatttcggaatctttaaaagactcttctgcttacccacaatctgggatccactgcaggaaaacaaaaaaggaaaacttcatttaaaagaagcaagaagtaaaatgggacaaattgggaatgtttaagtctctgaaactctgcactgaaaagaaaataagattgataacttaagcttaacattctgaggcataaagaaacattaactttggagtattcatcttgactactgaaatacaagtttagaagacaagtggtttcattctggtcacagatcacagcttttctttaaatttataatcctatgggttggactcgttgactgtattttttaaaggttgctcgtcagttaactgagccttggaattcatggattttctaaagactaacaaatgaaaatattttcctgttgaagaacccagcggaaattttacagcaacaaatttcatgtttcttttgggtatttctgagaaaaaggaaatatttataaaaccatccaaagatccagataatttgcaaataaattggaggttatagaggttataatctgaatcccaaaggagactgcagctgatgaaagtgcttccaaactgaaaattggacgtgcctttacgatggtaagcgttaacagctcccactgcttctataatgactcctttaagtacactttgtatgggtgcatgttcagcatggtgtttgtgcttgggttaatatccaattgtgttgccatatacattttcatctgcgtcctcaaagtccgaaatgaaactacaacttacatgattaacttggcaatgtcagacttgctttttgtttttactttacccttcaggattttttacttcacaacacggaattggccatttggagatttactttgtaagatttctgtgatgctgttttataccaacatgtacggaagcattctgttcttaacctgtattagtgtagatcgatttctggcaattgtctacccatttaagtcaaagactctaagaaccaaaagaaatgcaaagattgtttgcactggcgtgtggttaactgtgatcggaggaagtgcacccgccgtttttgttcagtctacccactctcagggtaacaatgcctcagaagcctgctttgaaaattttccagaagccacatggaaaacatatctctcaaggattgtaattttcatcgaaatagtgggattttttattcctctaattttaaatgtaacttgttctagtatggtgctaaaaactttaaccaaacctgttacattaagtagaagcaaaataaacaaaactaaggttttaaaaatgatttttgtacatttgatcatattctgtttctgttttgttccttacaatatcaatcttattttatattctcttgtgagaacacaaacatttgttaattgctcagtagtggcagcagtaaggacaatgtacccaatcactctctgtattgctgtttccaactgttgttttgaccctatagtttactactttacatcggacacaattcagaattcaataaaaatgaaaaactggtctgtcaggagaagtgacttcagattctctgaagttcatggtgcagagaattttattcagcataacctacagaccttaaaaagtaagatatttgacaatgaatctgctgcctgaaataaaaccattaggactcactgggacagaactttcaagttccttcaactgtgaaaagtgtctttttggacaaactatttttccacctccaaaagaaattaacacatggacattttaaagtctttagtataaagaaaatttgtattcaatgtgttaagcattaacatgtattttatttgtgtatccactccatctgatttttctgagccattttgatttgttccttcattaaaaaaaatctcttaaagtt

SEQ ID NO: 61665 - DNA, 2911 bp, Artificial Sequence
  derived and/or modified sequence
tggattaggagagcttctggatagctgaacacatggaggtttctggagggtgtggcccccagagggcatggaagctctgcacccctgctcccatacctcaccctacgcatctcctcatctgtatcctttgcaatatcctttgtaataaaccgaaaattttatcataatgagcatcaaaagaatcccaaatgagaaaactgctttttgcataagtgtaaattaagagatggaagtcacatttcaccatggcaaacatttgctgcatgcaaaatgactgaaacaaggtcttgatctgtcaccaggctgaagtgcagtggtacaatcaaagctcactgcagtctcaacctcctaggctcaaacaatcctcccacttcagcctcccaaccagctgggaccacaggttgacatcaccacacccaggtctgctggaatttgctggaggtccactccagaccctgtttgtctggatatcaccagcagaggttgcagaacaacaaagattgctgcctgttccttcctctggaagctttgtcccagaggggcacccaccagacggcagctggagctctcctgtgtgccactggagtacgaaaaagaaaaaatcctgcagctagctcggtgtctgcccaaacggctgcccagttttgtgcttgaaacccagggcctgggtggtgtaggcacccgagggaattgcctggtctaagggttgtgaagatcacggaaaaggcatagagtctgggccggaatgcatcgttcctcgtggcacattccctcatggcttcccttagctaggggaggaagttccctggccccttgcacttcccgttccctctgctatggctcttcctcagtagaaacaactggcaacaaaattcaagtttatgattcattcatcagcaaacatgtgagaatcatctacaaagaaccaagaattgtgagaaagcgacctcaagatacaactggcaactgaggaaaaggcctcaattcaacaagagctaacaagcttgggagtttatttcggaatctttaaaagactcttctgcttacccacaatctgggatccactgcaggaaaacaaaaaaggaaaacttcatttaaaagaagcaagaagtaaaatgggacaaattgggaatgtttaagtctctgaaactctgcactgaaaagaaaataagattgataacttaagcttaacattctgaggcataaagaaacattaactttggagtattcatcttgactactgaaatacaagtttagaagacaagtggtttcattctggtcacagatcacagcttttctttaaatttataatcctatgggttggactcgttgactgtattttttaaaggttgctcgtcagttaactgagccttggaattcatggattttctaaagactaacaaatgaaaatattttcctgttgaagaacccagcggaaattttacagcaacaaatttcatgtttcttttgggtatttctgagaaaaaggaaatatttataaaaccatccaaagatccagataatttgcaaataaattggaggttatagaggttataatctgaatcccaaaggagactgcagctgatgaaagtgcttccaaactgaaaattggacgtgcctttacgatggtaagcgttaacagctcccactgcttctataatgactcctttaagtacactttgtatgggtgcatgttcagcatggtgtttgtgcttgggttaatatccaattgtgttgccatatacattttcatctgcgtcctcaaagtccgaaatgaaactacaacttacatgattaacttggcaatgtcagacttgctttttgtttttactttacccttcaggattttttacttcacaacacggaattggccatttggagatttactttgtaagatttctgtgatgctgttttataccaacatgtacggaagcattctgttcttaacctgtattagtgtagatcgatttctggcaattgtctacccatttaagtcaaagactctaagaaccaaaagaaatgcaaagattgtttgcactggcgtgtggttaactgtgatcggaggaagtgcacccgccgtttttgttcagtctacccactctcagggtaacaatgcctcagaagcctgctttgaaaattttccagaagccacatggaaaacatatctctcaaggattgtaattttcatcgaaatagtgggattttttattcctctaattttaaatgtaacttgttctagtatggtgctaaaaactttaaccaaacctgttacattaagtagaagcaaaataaacaaaactaaggttttaaaaatgatttttgtacatttgatcatattctgtttctgttttgttccttacaatatcaatcttattttatattctcttgtgagaacacaaacatttgttaattgctcagtagtggcagcagtaaggacaatgtacccaatcactctctgtattgctgtttccaactgttgttttgaccctatagtttactactttacatcggacacaattcagaattcaataaaaatgaaaaactggtctgtcaggagaagtgacttcagattctctgaagttcatggtgcagagaattttattcagcataacctacagaccttaaaaagtaagatatttgacaatgaatctgctgcctgaaataaaaccattaggactcactgggacagaactttcaagttccttcaactgtgaaaagtgtctttttggacaaactatttttccacctccaaaagaaattaacacatggacattttaaagtctttagtataaagaaaatttgtattcaatgtgttaagcattaacatgtattttatttgtgtatccactccatctgatttttctgagccattttgatttgttccttcattaaaaaaaatctcttaaagtta

SEQ ID NO: 61666 - protein, 1236 aa, Artificial Sequence
  derived and/or modified sequence
MSTAAFHISSLLEKMTSSDKDFRFMATSDLMSELQKDSIQLDEDSERKVVKMLLRLLEDKNGEVQNLAVKCLGPLVVKVKEYQVETIVDTLCTNMRSDKEQLRDIAGIGLKTVLSELPPAATGSGLATNVCRKITGQLTSAIAQQEDVAVQLEALDILSDMLSRLGVPLGAFHASLLHCLLPQLSSPRLAVRKRAVGALGHLAAACSTDLFVELADHLLDRLPGPRVPTSPTAIRTLIQCLGSVGRQAGHRLGAHLDRLVPLVEDFCNLDDDELRESCLQAFEAFLRKCPKEMGPHVPNVTSLCLQYIKHDPNYNYDSDEDEEQMETEDSEFSEQESEDEYSDDDDMSWKVRRAAAKCIAALISSRPDLLPDFHCTLAPVLIRRFKEREENVKADVFTAYIVLLRQTQPPKGWLEAMEEPTQTGSNLHMLRGQVPLVVKALQRQLKDRSVRARQGCFSLLTELAGVLPGSLAEHMPVLVSGIIFSLADRSSSSTIRMDALAFLQGLLGTEPAEAFHPHLPILLPPVMACVADSFYKIAAEALVVLQELVRALWPLHRPRMLDPEPYVGEMSAVTLARLRATDLDQEVKERAISCMGHLVGHLGDRLGDDLEPTLLLLLDRLRNEITRLPAIKALTLVAVSPLQLDLQPILAEALHILASFLRKNQRALRLATLAALDALAQSQGLSLPPSAVQAVLAELPALVNESDMHVAQLAVDFLATVTQAQPASLVEVSGPVLSELLRLLRSPLLPAGVLAAAEGFLQALVGTRPPCVDYAKLISLLTAPVYEQAVDGGPGLHKQVFHSLARCVAALSAACPQEAASTASRLVCDARSPHSSTGVKVLAFLSLAEVGQVAGPGHQRELKAVLLEALGSPSEDVRAAASYALGRVGAGSLPDFLPFLLEQIEAEPRRQYLLLHSLREALGAAQPDSLKPYAEDIWALLFQRCEGAEEGTRGVVAECIGKLVLVNPSFLLPRLRKQLAAGRPHTRSTVITAVKFLISDQPHPIDPLLKSFIGEFMESLQDPDLNVRRATLAFFNSAVHNKPSLVRDLLDDILPLLYQETKIRRDLIREVEMGPFKHTVDDGLDVRKAAFECMYSLLESCLGQLDICEFLNHVEDGLKDHYDIRMLTFIMVARLATLCPAPVLQRVDRLIEPLRATCTAKVKAGSVKQEFEKQDELKRSAMRAVAALLTIPEVGKSPIMADFSSQIRSNPELAALFESIQKDSASAPSTDSMELS

SEQ ID NO: 61667 - DNA, 3711 bp, Artificial Sequence
  derived and/or modified sequence
atgtccaccgccgcattccacatcagtagcctcttagagaagatgaccagctcagacaaagattttagattcatggctacttccgacctcatgtcagagcttcagaaagactccatccagctggatgaggattccgaacggaaagtcgttaagatgctgctgcgccttctggaagacaagaatggagaagtccagaatctggcagttaaatgtctggggcctttggtcgttaaggtgaaagaataccaggtcgaaacaatcgtggacaccttgtgcaccaacatgaggtctgataaggagcagctgagagacattgcgggaatcgggcttaagacagtccttagtgagctgccgcccgccgccactggctccggcttggctactaacgtgtgtaggaaaattaccggacagctgacatcggctattgcacagcaagaggacgtggctgtccagctggaagcactggacatcctgtctgacatgctctcaagactcggggtccccctcggtgctttccatgcatccctattacactgcctgctcccacagctgtcatcaccaagactggccgtgagaaagagagccgttggagcactcgggcacctggcagcagcatgtagtacggatctgtttgtggaactggcggatcacctcttggaccgccttccagggcccagagtgcccacgtcccccacagcgatccgcaccttgatccagtgcctgggctcagtaggcaggcaggccggacatagacttggcgcacacctcgatcggctggtacctctggtcgaggacttttgtaatctggatgatgacgagctgcgtgagagctgcctccaggcgtttgaagcctttctaagaaagtgtccgaaagaaatggggccccatgtcccaaacgtcacatccttatgtctgcagtatattaagcatgatccgaattataactatgattcagacgaagacgaagagcagatggagacggaagactcagagttctccgagcaggagtctgaggacgagtattcagatgacgatgatatgtcctggaaagtgcgacgagctgcagctaaatgcatcgctgcgctgatttcctctcggcccgacctcttgcccgatttccactgtacactggcacctgtgcttattcggagatttaaggagcgggaagagaacgttaaagctgatgtatttacagcttatatcgtgcttctgcgccagacacaacctcctaagggttggctcgaggctatggaggagcccactcagacagggtcaaacttacatatgctgagagggcaagttccgctggtcgtgaaagctctgcagcgccagctgaaggatagaagtgtccgggcacggcaagggtgcttctccctgctgaccgagctcgccggtgttttgccaggatcactggcagaacatatgccggtactggtctcgggcatcatcttctccctggcagacaggtcaagcagcagcacaatcaggatggacgcactggccttcctgcagggactccttgggacagagcccgcagaggcgttccatccccacctgccaatcctactgccccccgttatggcgtgcgtggctgatagtttctataagatcgcagccgaagcactagtagtactgcaggagctcgtgagggcactctggcctttacataggccgaggatgttggatcctgagccatatgtgggagagatgtccgctgtaacacttgcacgactgagggccactgacttggaccaggaagtcaaagaacgcgctatctcctgcatgggtcacctggtgggacacctgggcgatcgtctgggtgacgatttagagccaacactgctgctccttctcgataggcttcgaaatgagatcactaggttaccagcgattaaagcccttaccctggttgcagtgtcgcccctccaattagacctccagcctatcctggccgaagctctccatatcttagcatctttcctgcgaaagaatcagcgggccttgaggcttgccaccctagccgctcttgacgctctggctcagagccagggtcttagcctgcccccgagtgctgttcaggcagtgctggcggagctccccgccctcgttaatgagtctgacatgcatgtcgcccagctggccgtggacttccttgctaccgtaacccaggcacaaccagccagcctggtggaagtctctggccctgtcctcagcgaattgttgcggctcctgcgcagtcccctactcccagcaggcgttctcgcagcagctgaaggattcttgcaagctctggtgggaactcggcccccttgtgtcgattacgccaaacttatctcactgctgactgcacctgtttacgaacaggctgtggatggcggcccaggtctgcataagcaagtctttcactcccttgctcgttgcgtggctgccttatctgctgcctgcccccaggaggcagccagtactgctagccgcttggtatgtgatgcaagaagcccccacagttctaccggagtaaaggtccttgcatttctgagtctcgccgaagtgggccaggtagccggaccaggccaccagagggagcttaaggcggtgctactggaggcacttggatctcccagcgaagacgtgagagcagcagccagttatgctcttggacgggtcggggccggcagcttgccagactttctgccctttctcctggagcaaatcgaagctgaaccacggaggcagtaccttctgctacactctctccgagaggccctgggcgccgcccagcccgactctcttaaaccttacgccgaggacatctgggcactcctgtttcaaaggtgtgagggcgccgaggaaggaacaaggggcgtagtggctgagtgcatcggcaaactggttctggtgaatccctccttcctgctgccaaggttgagaaagcaactggcggctggaagaccccacacaagatccacagtgattactgctgtgaaattcttgatctctgatcagccccatcctatcgacccactgctgaagtctttcattggggagttcatggagagtctgcaggaccccgatctaaatgtccgacgcgcaacacttgctttctttaattctgccgtgcataacaagccttcgttagtgcgggatcttctggacgacatcctcccgcttctttatcaagagactaagatccgaagggatctgataagagaagttgagatgggaccatttaagcatactgttgatgacgggctggacgtccgtaaagctgcgtttgaatgtatgtactcgcttctagaatcctgcttaggccaattggatatctgcgagtttttaaaccatgtcgaggacgggctgaaagatcattacgacattagaatgctaacattcatcatggtcgccaggctcgctaccctgtgccccgcacccgtgctccaaagggtcgatagactgattgagccgctgcgggctacatgtaccgctaaggtgaaagccggaagcgtgaagcaagaatttgagaaacaggacgaactcaagcggtcggcaatgagagcagttgcagcactcctcacaatcccggaagttggcaagagccccattatggctgacttttcatcccaaatacgatctaatcctgaactggctgcactctttgagagcattcagaaagactcagcctccgcccctagcaccgactcgatggagctaagctag

SEQ ID NO: 61668 - DNA, 3711 bp, Artificial Sequence
  derived and/or modified sequence
atgagcacagctgccttccacatcagcagcctgctggagaagatgaccagcagtgacaaggacttccgcttcatggccaccagtgacctgatgtctgagctgcagaaggacagcatccagctggatgaagattctgagaggaaggtggtgaagatgctgctgcggctgctggaggacaagaatggagaggtgcagaacctggccgtgaagtgcctgggccccctggtggtgaaggtgaaggagtaccaggtggagaccatcgtggacaccctgtgcaccaacatgagaagtgacaaggagcagctgcgggacattgctggcatcggcctgaagacagtgctgtctgagctgcccccagctgccaccggcagcggcctggccaccaacgtgtgcaggaagatcaccggccagctgaccagcgccatcgcccagcaggaggatgtggccgtgcagctggaggccctggacatcctgagtgacatgctgagccggctgggcgtgcccctgggcgccttccacgccagcctgctgcactgcctgctgccccagctgagcagcccccggctggccgtgaggaagagagctgtgggcgccctgggccacctggccgccgcctgcagcacagacctgtttgtggagctggccgaccacctgctggaccggctgcccggcccccgggtgcccaccagccccacagccatccgcaccctcatccagtgcctgggctctgtgggccggcaggccggccaccggctgggcgcccacctggaccggctggtgcccctggtggaggacttctgcaacctggatgatgatgagctgcgggagagctgcctgcaggcctttgaggccttcctgaggaagtgccccaaggagatgggcccccacgtgcccaacgtgaccagcctgtgcctgcagtacatcaagcatgaccccaactacaactatgacagtgatgaagatgaggagcagatggagacagaggacagcgagttcagcgagcaggagagtgaagatgagtacagtgatgatgatgacatgtcctggaaggtgcggcgggctgctgccaagtgcatcgccgccctgatcagcagcaggccagacctgctgcctgacttccactgcaccctggcccctgtgctgatccgccgcttcaaggagcgggaggagaatgtgaaggcagatgtgttcaccgcctacatcgtgctgctgcggcagacccagccccccaagggctggctggaggccatggaggagcccacccagacaggcagcaacctgcacatgctgcggggccaggtgcccctggtggtgaaggccctgcagaggcagctgaaggacagatctgtgcgggcccggcagggctgcttcagcctgctgacagagctggccggcgtgctgcccggcagcctggccgagcacatgcctgtgctggtgtctggcatcatcttcagcctggccgacaggagcagcagcagcaccatccgcatggatgccctggccttcctgcagggcctgctgggcacagagcctgctgaggccttccacccccacctgcccatcctgctgccccctgtgatggcctgtgtggccgacagcttctacaagattgctgctgaggccctggtggtgctgcaggagctggtgcgggccctgtggcccctgcaccggcccaggatgctggaccctgagccctacgtgggggagatgtctgctgtgaccctggcccggctgcgggccacagacctggaccaggaggtgaaggagcgggccatcagctgcatgggccacctggtgggccacctgggggaccggctgggagatgacctggagcccaccctgctgctgctgctggaccggctgagaaatgagatcacccggctgcctgccatcaaggccctgaccctggtggccgtgagccccctgcagctggacctgcagcccatcctggccgaggccctgcacatcctggccagcttcctgaggaagaaccagagggccctgcggctggccaccctggccgccctggatgccctggcccagagccagggcctgagcctgccccccagcgctgtgcaggccgtgctggccgagctgcctgccctggtgaatgaaagtgacatgcacgtggcccagctggccgtggacttcctggccaccgtgacccaggcccagcctgccagcctggtggaggtgtctggccctgtgctgtctgagctgctgcggctgctgcggagccccctgctgcctgctggggtgctggccgctgctgagggcttcctgcaggccctggtgggcaccaggcctccctgtgtggactatgccaagctgatcagcctgctgacagcccctgtgtatgagcaggccgtggatggcggccctggcctgcacaagcaggtgttccacagcctggcccgctgtgtggccgccctgtctgctgcctgcccccaggaggccgccagcacagccagccggctggtgtgtgatgcccggagcccccacagcagcactggagtgaaggtgctggccttcctgagcctggccgaggtgggccaggtggccggccctggccaccagcgggagctgaaggctgtgctgctggaggccctgggcagccccagtgaagatgtgcgggccgccgccagctatgccctgggccgggtgggcgccggcagcctgcctgacttcctgcccttcctgctggagcagatcgaggccgagccccggcggcagtacctgctgctgcacagcctgcgggaggccctgggcgccgcccagcctgacagcctgaagccctatgcagaggacatctgggccctgctcttccagagatgtgagggcgctgaggagggcacccggggcgtggtggccgagtgcatcggcaagctggtgctggtgaaccccagcttcctgctgccccggctgaggaagcagctggccgccggccggccccacaccaggagcaccgtcatcacagctgtgaagttcctgatcagtgaccagccccaccccatcgaccccctgctgaagagcttcatcggggagttcatggagagcctgcaggaccctgacctgaatgtgcggcgggccaccctggccttcttcaacagcgctgtgcacaacaagcccagcctggtgcgggacctgctggatgacatcctgcccctgctgtaccaggagaccaagatccggcgggacctgatccgggaggtggagatgggccccttcaagcacacagtggatgatggcctggatgtgaggaaggccgcctttgagtgcatgtacagcctgctggagagctgcctgggccagctggacatctgtgagttcctgaaccacgtggaggatggcctgaaggaccactatgacatccgcatgctgaccttcatcatggtggcccggctggccaccctgtgcccagcccctgtgctgcagagggtggaccggctgattgagcccctgcgggccacctgcacagccaaggtgaaggccggctctgtgaagcaggagtttgagaagcaggatgagctgaagaggtctgccatgagagctgtggccgccctgctgaccatccctgaggtgggcaagagccccatcatggctgacttcagcagccagatccgcagcaaccctgagctggccgccctgtttgagagcatccagaaggacagcgccagcgcccccagcacagacagcatggagctgtcctag

SEQ ID NO: 61669 - DNA, 3711 bp, Artificial Sequence
  derived and/or modified sequence
atgagcaccgccgccttccacatcagcagcctgctggagaagatgacaagctctgataaggactttaggttcatggcaacctctgatttaatgtccgagctccagaaggacagcattcagctggacgaggatagcgagcgaaaggtggtgaagatgctgctgcggttgctcgaggataagaatggagaggtgcagaacctggccgttaaatgcttaggtccgttggtggttaaggtgaaagagtatcaagtcgagactatcgtggataccttgtgtaccaatatgagatcggataaagaacaactacgggacatcgccggaattggactgaaaaccgtgctgagtgaattacctcctgctgcgactggttctggcttggccaccaatgtttgtaggaagattacaggacaacttacaagcgccatcgcccagcaagaggatgttgcagtgcagctggaagccttagacattctgagcgatatgttgagccggttgggcgtgcctctgggagcttttcatgctagcttattgcactgcctgctgccacagctgtcttccccaaggctggccgtgaggaagcgggctgtcggcgccctgggccatctggcggccgcgtgcagcacagacttattcgttgagctggcggaccaccttttggaccggcttccaggtccacgtgtgcctacctctccaactgctattcgtactctcattcagtgtttaggaagcgtgggcagacaggccggccatcgcctaggggcgcatctagatcgtctggtgccattggtggaggacttctgcaacctcgacgacgacgagctacgcgagtcttgtttacaagctttcgaagccttcttgaggaagtgccccaaggaaatgggcccccatgttccaaacgtgaccagcctgtgccttcaatatattaagcatgaccccaattataattacgacagtgatgaggatgaagagcagatggagaccgaggactctgagttcagcgaacaggagtccgaggatgagtattcagacgatgacgatatgagttggaaagtgagacgggcggccgccaaatgcatcgccgctctgatttcctctaggccagacctgctaccagacttccactgcaccctggcccctgtgctgattcggagatttaaggaaagggaagagaatgtaaaggcagacgtgtttactgcttacatcgtgcttctcaggcagacccaaccacccaaggggtggctcgaagccatggaggaaccaacacagacagggagcaacctccatatgcttaggggtcaggttccccttgtggttaaagcgcttcagcgccagctgaaggatcgatccgtccgagctcggcagggatgcttcagcctgttgacagaacttgcgggcgtgttgcctgggagtcttgctgagcacatgccagttctcgtgtccggaattatattttctctagccgaccgcagtagttcaagtactatacgaatggatgccctcgcatttctgcaaggcctgctggggactgaaccagccgaggcctttcacccacacctgcctatcctgctccctccggttatggcatgcgtcgctgattccttctataaaatcgccgccgaagctctggtcgttttacaggaactagttagagctttatggcccctgcacagaccccgcatgctggacccagagccatacgttggggaaatgagcgcagtcactcttgcacgcctaagagccaccgatctcgatcaggaagtgaaggagcgggctataagctgtatgggccaccttgtgggccacctgggagatcgccttggcgatgacctggaacccaccttgctactgttactggatagactgcggaatgagataacaagactgccagctattaaagccctaactttggtggccgtgagccccctgcagcttgacctgcaacctatcctggcagaagccctgcatatactagcttctttcctgaggaaaaaccaacgagctctgaggctcgctacacttgccgcgcttgacgcccttgcacaaagccaggggctgtccctgcctcctagcgctgtgcaagccgtgctggctgagctgcccgcgctggttaacgagtctgatatgcatgtcgcacaactggccgtggactttttagctactgtgactcaggctcagcctgcgagtttagtggaagtgtcgggccccgtgctcagcgaattgctacggctcctacgatcacccctgctgcctgcaggcgtgctcgcggccgctgagggctttctccaggctttggttggcacacgacctccatgcgtggactacgctaagctaatttccctgcttacagcccccgtgtacgagcaagccgtggacgggggtccgggactacacaaacaggtgttccatagcttggctaggtgtgtggcggccctctctgcagcctgtccccaggaagcagcatccaccgcctctagactggtgtgcgatgctagatctccacattcctctacaggggtcaaagtattagcctttttgtccctggccgaagtgggacaagtggctggtcctggacaccagcgagaattaaaggcggtcctcctggaggccttgggttctccatccgaggacgttagagctgctgcatcctacgctctgggacgggttggcgcagggtcgctcccagatttcctcccctttctcctggaacagatcgaggcggaaccgagacgccaatatctcctgctacattccttgcgcgaggcacttggcgccgcccagccggatagcctgaagccctacgctgaggatatctgggcattgctgtttcaaaggtgcgaaggggccgaggagggcaccagaggagtggtggccgagtgcatcggtaaactggtcctggtgaacccctcctttctgctgccccgactgagaaaacagctggcggccggcagaccccacaccaggagtaccgtaattacagctgtcaaatttcttatctctgaccagccacaccctatcgatccattacttaaatctttcataggtgagtttatggagagtttgcaggatccggatctcaatgtcagaagagcgacacttgccttctttaactcagcagttcacaataagccttcgttggttcgagaccttttagatgacatccttcccctactctatcaagagacaaagatccggcgagacttgattcgcgaagtggagatggggccattcaagcacacagtggacgacggactcgatgtgagaaaagcagctttcgagtgcatgtacagcctgcttgaatcctgcttggggcagcttgacatttgtgagtttctgaatcacgtggaggatgggctgaaggaccactacgacataagaatgcttacgtttatcatggtggctcggctcgcaactctgtgccctgcacctgtgctccagcgcgtcgaccgcttgatagaacctcttagggctacctgcactgctaaggtgaaagctggctccgtgaaacaggaattcgaaaagcaagatgaacttaaacggagtgctatgcgggcagtggcagcccttctcaccatccctgaggtgggcaagtctccgattatggcggatttctcctctcaaataaggtctaacccagagttggcagctctgttcgagtcgatccagaaagattccgcttccgctccctccacagattctatggagttgtcttag

SEQ ID NO: 61670 - DNA, 3711 bp, Artificial Sequence
  derived and/or modified sequence
atgtctacagccgcattccacattagctccctgctcgaaaagatgacatcctccgacaaggactttcgcttcatggcgactagcgatctcatgtcagaactgcagaaggatagcattcagcttgacgaggatagcgaacgaaaagtagtcaaaatgctgctgaggctgctggaggacaaaaacggcgaagtacagaatttggccgtgaaatgcttagggccactggttgtgaaggtgaaagagtatcaggtcgagacgatcgtggatacactgtgcactaacatgcgatctgataaggagcagcttagggatatcgccggtattggcctgaagacagtgttaagtgaattgcctccggctgccaccgggtcagggttggccaccaacgtctgccgcaagattacagggcagctcacttcagccattgctcaacaggaagacgttgccgtgcagctggaagccctggacattctgtcagatatgctgagcaggctgggagtcccactgggagcattccacgccagcttgttgcattgcctcctcccacagctctcctcccccagactcgctgtcagaaaacgcgctgtgggcgcactcggacacctggccgctgcctgcagcaccgatctcttcgtcgagctcgctgaccacctgctggaccggttaccgggacccagagtgcccacgtcgccaacagctatccggacgctcatacaatgcctgggatccgtggggagacaagccggacacagattaggagcccacctggatagactggtaccactggtggaggatttctgtaatctggatgacgatgagctgagggaaagctgcctccaggcatttgaggcatttctccgcaagtgccccaaggaaatgggaccccacgtgcccaacgttacctctctgtgcctgcagtatatcaaacacgaccccaactacaattatgacagtgacgaagacgaggagcaaatggaaacggaggacagcgagttctctgaacaggagtctgaggatgagtacagtgacgacgacgatatgtcttggaaggtgcgcagggctgcagctaagtgcattgccgctttgatcagtagccgcccagacttgctgccagatttccactgcacactggcgccagtgttgatcagaaggtttaaagagagagaggagaacgtgaaagcagacgtatttacagcctacattgtgctgttacgacagacccagccccctaaaggatggcttgaagcgatggaggaaccaacccagactggatccaatctccacatgctcagaggccaggttcctctggtggtgaaagcactgcagcggcaactcaaggaccggtccgttcgtgccaggcagggctgttttagtctgctgaccgaacttgctggtgtgctcccgggatctctcgctgaacatatgccggtgctagttagtggaattattttctccctggctgataggagttctagctcaaccattcgcatggacgctttggcatttttgcagggtcttctgggcactgaacccgcagaggccttccacccacatttgcccatcctgctgccccctgtcatggcttgcgtggccgattctttttacaagattgccgctgaggccttggtcgtcttgcaagaactggtgcgggctctgtggcctctccatagacctcggatgctagatcctgaaccatacgtcggggagatgagcgctgttacactggctcgcttgagggccaccgaccttgaccaggaagtcaaagagagggcgatctcttgcatggggcacctggtgggtcacctgggggacaggcttggcgacgatctggagcctactctgcttctgctcctggatagactgcgcaacgaaattactcggttgccagctattaaggccctgactcttgtcgcggtctcccctctccagctcgatctgcaacctattctcgccgaagccctccatatcctggctagcttcttacgcaaaaaccagagggccttaagactcgccactttagcagcactggacgccttggcgcaaagccaggggttgagcctgcccccaagtgctgtgcaagctgtgctggctgaacttccagccctggtaaacgaaagcgacatgcacgttgcccagctagccgtagatttcctcgccacggtgacgcaagcccaaccggcatcgctggttgaagtcagtgggccagtcctgtcggagctactcagattgctgcgcagccctttgctgccggcaggcgttttggcagcagccgagggattcctacaagccctcgtgggcaccagacctccctgtgtggattacgctaagctcatcagtttactcacggcgcctgtgtatgagcaggctgtcgatggaggccctggactccataagcaggtgttccattccctcgccagatgtgtggctgccctgagcgcagcctgcccccaagaggctgctagcacagcctcacggctggtatgtgacgcaaggtccccccactcatccactggagtgaaggttctggcctttctctccttggccgaggtgggccaggtggcgggtcctggccaccagcgggagttaaaggcagtgcttcttgaggccctcgggagccccagtgaagatgtgcgagccgcagcctcctatgctctcggccgagttggcgcagggagtttgcctgacttcttgccatttttactggaacaaatcgaagctgagcccaggagacagtacttgttgctccatagtctccgcgaggccctgggggcagcccagccagactcactcaagccctacgccgaggatatatgggctttgctcttccaacgctgcgaaggtgccgaggaggggaccaggggtgtagtggccgaatgcattgggaagctggtgctagttaacccgagcttcctactgccgcgactgaggaaacagttggctgccggacgccctcatacccgcagcacagttatcacagcagtcaagtttctgatctctgatcaaccacaccctattgatccactgctcaaatcttttatcggcgaatttatggagtccctccaagaccctgaccttaacgtaagaagggccaccttggcctttttcaattctgccgtgcacaacaaaccaagcctggtcagagacctcctggatgacatactccctctgctctaccaggagactaaaattagacgagacctcattcgagaggttgagatgggaccattcaagcataccgtagacgatggactcgacgtcaggaaggcagcattcgagtgcatgtactccctgctcgaaagctgcctagggcaactggacatttgcgaatttctgaaccatgtcgaagacggccttaaggatcactatgatattaggatgctgacctttattatggttgcgagacttgccacgctgtgtcccgctccagttctccaacgcgtggaccggttgatcgagcctctacgagccacctgtactgccaaggttaaggctggcagcgtcaagcaagaattcgaaaagcaagacgaactgaaacgctcggcaatgagggcagtggccgctcttttgaccatccctgaggtgggcaaatctccaattatggccgacttttcttcgcagatcaggtcaaacccggagctggctgccctctttgagagcattcagaaggattctgcgtccgcacccagcaccgatagtatggagctcagctag

SEQ ID NO: 61671 - DNA, 4573 bp, Artificial Sequence
  derived and/or modified sequence
atattccctcccgccggccggctccgcggcgcgcagccaccatgagcaccgccgccttccacatctccagcctcctggagaagatgacgtccagcgacaaggacttcaggttcatggccaccagcgacctgatgtcggagttgcagaaggactccatccagctggacgaggacagcgagcgcaaggtggtgaagatgctgctccggctcctggaggacaagaacggtgaggtgcagaacctggctgtcaagtgcctgggtcctctggtggtcaaagtgaaggagtaccaggtggagaccattgtggacaccctgtgcaccaacatgcggtcagacaaggagcagctgcgagacattgccggcattggcctcaagaccgtcctctcggagctccctcctgcagccacaggctccgggctggccaccaacgtgtgccggaagatcacaggccagctcaccagtgccattgcccagcaggaggatgtggctgtgcagctggaagccctggacatcctctctgacatgctgagcaggctgggtgtcccgctgggcgccttccacgccagcctcctgcactgtctgctgccacagctgagcagcccgcgcctggcggtgcgcaagcgggcggtcggagcgcttggccacctggcggccgcctgcagcaccgacctcttcgtcgagctcgctgaccacctactggaccggctgcccggcccgcgggtgcccaccagcccgactgccatccgcaccctgatccaatgtttgggcagcgtcggccgccaggccggccaccgcctcggggctcacctggaccgcctggtgcccctggtggaggatttctgcaacctggatgatgatgagctccgggagtcctgcctccaggcttttgaggccttcttgaggaagtgccccaaggaaatgggtcctcacgtgcccaacgtgaccagcctctgcctccaatacataaaacacgaccccaactacaactacgacagtgatgaggatgaggagcagatggagacagaggatagtgaattcagtgagcaagagagtgaagacgagtacagcgatgacgatgacatgagctggaaggtgcgccgggcagctgccaagtgcatcgcagccttgatcagctcgcggcctgacctgctgcccgatttccactgcaccctggcacctgtgctcatccgccgcttcaaagaacgcgaggagaacgtcaaggctgacgtcttcactgcttacatcgtgctgctgcggcaaacacagcccccgaagggatggctggaggccatggaggaacccacccagaccggcagcaacctccatatgctacgtggacaggtgccccttgtggtcaaggccctgcagcggcagcttaaagatcggagcgtcagagcccgccagggatgcttcagcctcctcaccgagctggcgggtgtcctcccaggcagcctggccgagcatatgcctgtgctggtatcaggcatcatcttctcgctggccgaccgctccagctcctccaccatccggatggatgccctggccttcttgcaggggctgctgggcaccgaaccagctgaggccttccacccacacttgcctatcctcctgccacctgtgatggcctgtgtggctgactctttctacaagattgcagccgaggccctggtggtgctgcaggagctggtgcgggccctgtggccgctgcacaggcctcggatgctggatcctgagccatatgttggagagatgtctgctgtcaccctggcgcgacttcgtgccactgacctggaccaggaggtgaaggagcgggccatttcctgcatgggccaccttgtaggccacctgggtgaccggcttggggatgacctggagcccacgttactgctcctcctggaccgcctgcggaatgagatcacccggctgcccgccatcaaggcgcttacgctggtggccgtatccccactacagcttgacctacagcccatcctggccgaggcactgcacattctggcctcattcctgcggaagaaccagcgggctttgcgactggccacactggcagccctggacgccctggcccagagccagggcctcagcctcccaccgtctgccgtgcaggccgtgctggctgagctgcctgccctggtcaacgagagcgacatgcatgtggcccagctggctgtggacttccttgccacagtgacccaggcccagccagcctctttggtggaggtcagtggccctgtgctctcagagctgctgcggctgctgcgttcgcccctgttgccagccggggttctggcagctgctgaaggcttcctgcaggccctggtagggacccgtcccccgtgtgtggactatgccaaactcatcagcctgctcactgcgcctgtttatgagcaggctgtggatggtgggcctggcctgcacaagcaggtgttccactcattggcccggtgtgtggcagccctctcagctgcctgtccccaagaggcggcaagcacagccagtcgcctggtctgcgatgccaggtcgccccactccagcacgggggtcaaggtcctggcattcttgtcgctggctgaggtgggtcaggtggctgggccaggccaccagcgggagctgaaggcggtgctcctggaagctttggggtcacccagtgaggatgtgagggctgcagcctcgtatgcactgggccgtgtgggtgctggcagcctgcccgacttcctgcccttcctgctggagcagatcgaggctgagccccgacgacagtacctgctgctgcactcactcagggaggccctgggggccgcccagcctgacagcctgaagccctacgccgaggacatctgggccttgctgttccagcgctgcgagggtgctgaggagggcacccggggggtggtggccgagtgcattgggaagctggtccttgtgaacccttcgttccttctgccccgcttgcggaagcagcttgctgcaggtcggccacacacccggagcaccgtcatcacagcggtcaagttccttatctcggaccagccccatcccattgaccccctcctgaagagcttcatcggagagttcatggagagcctgcaggacccagacctgaacgtgcgccgtgcgactctggctttcttcaactcagctgtgcacaacaagccctcgctagtccgggacctgctggatgacatcctgcccctcctctaccaggagacaaagatccggcgggacctcatccgagaggtggagatggggccctttaaacatacagtggacgatgggctggacgtgcggaaggcggcctttgaatgcatgtattcactgcttgagagctgcctgggccagctggatatctgtgagttcctgaaccatgtggaggacgggctgaaggaccactacgacatccggatgctgaccttcatcatggttgcccggctggccaccctgtgtcctgcacctgtcctgcagagggtggaccgactcattgagccactaagggccacctgcactgccaaggtcaaagctggttctgtgaagcaggagtttgaaaagcaagatgaactgaagcgctctgcaatgagggcagtggctgccctgctgaccatccccgaggtggggaaaagccccatcatggccgacttctcttcccaaatcagatccaaccctgaacttgctgccctctttgaaagcatccagaaggattccgcttcagcccccagcacagactcaatggagctcagctagtcccctcagcaccaaggtgggccctcgcttaagagaaaggagcccacccaagtccgaggcctccccatcccaccatcgcaggtctctacttttgcccttccaccatctcactgggggccctgtcgctcctggtcagggcttacagtgccttctccagggacccaactcaaaggcccccagcccaagctgtgaggctgccaacagttgggccccttccttaactcaggacagtcatccaaagaaatagggtgaggaagttttccagtgacttcacactgtacccctccatagtctgtctggttccttcagagggtgtctctgcctcacaaactagtagtatttagaaataggctgtgctgtcagctgtaaaagatcaggaggcagcagacaccactctggtttcttcactgcattcagcaatgcctgaagttagtgctcaggccgggcatctcaaaagaaaagatacttgagttattcacattttaaaattcaaaacggttcatttttaagtggcagtgatgaatcagaaatttggaagatgatacgggtttcttttttccagggaggaggaatgggttgggtagggaactggacaggcttggacctcatgtttcatttctaatttcaaaatacttattagcaaattgggcaacaatgggcatcttccatgccaccacccaggcataaccagttggtttgtttccttctgaggaaggtttcaaatgtgtctagtgttcagtattgaggacaaagaaatacaagtggcaggcccaagtattttctgtgatatcccaggttaataaagattagattctaagtta

SEQ ID NO: 61672 - DNA, 3711 bp, Artificial Sequence
  derived and/or modified sequence
atgagcaccgccgccttccacatcagcagcctgctggagaagatgaccagcagcgacaaggacttcagattcatggccaccagcgacctgatgagcgagctgcagaaggacagcatccagctggacgaggacagcgagagaaaggtggtgaagatgctgctgagactgctggaggacaagaacggcgaggtgcagaacctggccgtgaagtgcctgggccccctggtggtgaaggtgaaggagtaccaggtggagaccatcgtggacaccctgtgcaccaacatgagaagcgacaaggagcagctgagagacatcgccggcatcggcctgaagaccgtgctgagcgagctgccccccgccgccaccggcagcggcctggccaccaacgtgtgcagaaagatcaccggccagctgaccagcgccatcgcccagcaggaggacgtggccgtgcagctggaggccctggacatcctgagcgacatgctgagcagactgggcgtgcccctgggcgccttccacgccagcctgctgcactgcctgctgccccagctgagcagccccagactggccgtgagaaagagagccgtgggcgccctgggccacctggccgccgcctgcagcaccgacctgttcgtggagctggccgaccacctgctggacagactgcccggccccagagtgcccaccagccccaccgccatcagaaccctgatccagtgcctgggcagcgtgggcagacaggccggccacagactgggcgcccacctggacagactggtgcccctggtggaggacttctgcaacctggacgacgacgagctgagagagagctgcctgcaggccttcgaggccttcctgagaaagtgccccaaggagatgggcccccacgtgcccaacgtgaccagcctgtgcctgcagtacatcaagcacgaccccaactacaactacgacagcgacgaggacgaggagcagatggagaccgaggacagcgagttcagcgagcaggagagcgaggacgagtacagcgacgacgacgacatgagctggaaggtgagaagagccgccgccaagtgcatcgccgccctgatcagcagcagacccgacctgctgcccgacttccactgcaccctggcccccgtgctgatcagaagattcaaggagagagaggagaacgtgaaggccgacgtgttcaccgcctacatcgtgctgctgagacagacccagccccccaagggctggctggaggccatggaggagcccacccagaccggcagcaacctgcacatgctgagaggccaggtgcccctggtggtgaaggccctgcagagacagctgaaggacagaagcgtgagagccagacagggctgcttcagcctgctgaccgagctggccggcgtgctgcccggcagcctggccgagcacatgcccgtgctggtgagcggcatcatcttcagcctggccgacagaagcagcagcagcaccatcagaatggacgccctggccttcctgcagggcctgctgggcaccgagcccgccgaggccttccacccccacctgcccatcctgctgccccccgtgatggcctgcgtggccgacagcttctacaagatcgccgccgaggccctggtggtgctgcaggagctggtgagagccctgtggcccctgcacagacccagaatgctggaccccgagccctacgtgggcgagatgagcgccgtgaccctggccagactgagagccaccgacctggaccaggaggtgaaggagagagccatcagctgcatgggccacctggtgggccacctgggcgacagactgggcgacgacctggagcccaccctgctgctgctgctggacagactgagaaacgagatcaccagactgcccgccatcaaggccctgaccctggtggccgtgagccccctgcagctggacctgcagcccatcctggccgaggccctgcacatcctggccagcttcctgagaaagaaccagagagccctgagactggccaccctggccgccctggacgccctggcccagagccagggcctgagcctgccccccagcgccgtgcaggccgtgctggccgagctgcccgccctggtgaacgagagcgacatgcacgtggcccagctggccgtggacttcctggccaccgtgacccaggcccagcccgccagcctggtggaggtgagcggccccgtgctgagcgagctgctgagactgctgagaagccccctgctgcccgccggcgtgctggccgccgccgagggcttcctgcaggccctggtgggcaccagacccccctgcgtggactacgccaagctgatcagcctgctgaccgcccccgtgtacgagcaggccgtggacggcggccccggcctgcacaagcaggtgttccacagcctggccagatgcgtggccgccctgagcgccgcctgcccccaggaggccgccagcaccgccagcagactggtgtgcgacgccagaagcccccacagcagcaccggcgtgaaggtgctggccttcctgagcctggccgaggtgggccaggtggccggccccggccaccagagagagctgaaggccgtgctgctggaggccctgggcagccccagcgaggacgtgagagccgccgccagctacgccctgggcagagtgggcgccggcagcctgcccgacttcctgcccttcctgctggagcagatcgaggccgagcccagaagacagtacctgctgctgcacagcctgagagaggccctgggcgccgcccagcccgacagcctgaagccctacgccgaggacatctgggccctgctgttccagagatgcgagggcgccgaggagggcaccagaggcgtggtggccgagtgcatcggcaagctggtgctggtgaaccccagcttcctgctgcccagactgagaaagcagctggccgccggcagaccccacaccagaagcaccgtgatcaccgccgtgaagttcctgatcagcgaccagccccaccccatcgaccccctgctgaagagcttcatcggcgagttcatggagagcctgcaggaccccgacctgaacgtgagaagagccaccctggccttcttcaacagcgccgtgcacaacaagcccagcctggtgagagacctgctggacgacatcctgcccctgctgtaccaggagaccaagatcagaagagacctgatcagagaggtggagatgggccccttcaagcacaccgtggacgacggcctggacgtgagaaaggccgccttcgagtgcatgtacagcctgctggagagctgcctgggccagctggacatctgcgagttcctgaaccacgtggaggacggcctgaaggaccactacgacatcagaatgctgaccttcatcatggtggccagactggccaccctgtgccccgcccccgtgctgcagagagtggacagactgatcgagcccctgagagccacctgcaccgccaaggtgaaggccggcagcgtgaagcaggagttcgagaagcaggacgagctgaagagaagcgccatgagagccgtggccgccctgctgaccatccccgaggtgggcaagagccccatcatggccgacttcagcagccagatcagaagcaaccccgagctggccgccctgttcgagagcatccagaaggacagcgccagcgcccccagcaccgacagcatggagctgagctag

SEQ ID NO: 61673 - protein, 1833 aa, Artificial Sequence
  derived and/or modified sequence
MREKEQEREEQLMEDKKRKKEDKKKKEATQKVTEQKTKVPEVTKPSLSQPTAASPIGSSPSPPVNGGNNAKRVAVPNGQPPSAARYMPREVPPRFRCQQDHKVLLKRGQPPPPSCMLLGGGAGPPPCTAPGANPNNAQVTGALLQSESGTAPDSTLGGAAASNYANSTWGSGASSNNGTSPNPIHIWDKVIVDGSDMEEWPCIASKDTESSSENTTDNNSASNPGSEKSTLPGSTTSNKGKGSQCQSASSGNECNLGVWKSDPKAKSVQSSNSTTENNNGLGNWRNVSGQDRIGPGSGFSNFNPNSNPSAWPALVQEGTSRKGALETDNSNSSAQVSTVGQTSREQQSKMENAGVNFVVSGREQAQIHNTDGPKNGNTNSLNLSSPNPMENKGMPFGMGLGNTSRSTDAPSQSTGDRKTGSVGSWGAARGPSGTDTVSGQSNSGNNGNNGKEREDSWKGASVQKSTGSKNDSWDNNNRSTGGSWNFGPQDSNDNKWGEGNKMTSGVSQGEWKQPTGSDELKIGEWSGPNQPNSSTGAWDNQKGHPLPENQGNAQAPCWGRSSSSTGSEVGGQSTGSNHKAGSSDSHNSGRRSYRPTHPDCQAVLQTLLSRTDLDPRVLSNTGWGQTQIKQDTVWDIEEVPRPEGKSDKGTEGWESAATQTKNSGGWGDAPSQSNQMKSGWGELSASTEWKDPKNTGGWNDYKNNNSSNWGGGRPDEKTPSSWNENPSKDQGWGGGRQPNQGWSSGKNGWGEEVDQTKNSNWESSASKPVSGWGEGGQNEIGTWGNGGNASLASKGGWEDCKRSPAWNETGRQPNSWNKQHQQQQPPQQPPPPQPEASGSWGGPPPPPPGNVRPSNSSWSSGPQPATPKDEEPSGWEEPSPQSISRKMDIDDGTSAWGDPNSYNYKNVNLWDKNSQGGPAPREPNLPTPMTSKSASVWSKSTPPAPDNGTSAWGEPNESSPGWGEMDDTGASTTGWGNTPANAPNAMKPNSKSMQDGWGESDGPVTGARHPSWEEEEDGGVWNTTGSQGSASSHNSASWGQGGKKQMKCSLKGGNNDSWMNPLAKQFSNMGLLSQTEDNPSSKMDLSVGSLSDKKFDVDKRAMNLGDFNDIMRKDRSGFRPPNSKDMGTTDSGPYFEKLTLPFSNQDGCLGDEAPCSPFSPSPSYKLSPSGSTLPNVSLGAIGTGLNPQNFAARQGGSHGLFGNSTAQSRGLHTPVQPLNSSPSLRAQVPPQFISPQVSASMLKQFPNSGLSPGLFNVGPQLSPQQIAMLSQLPQIPQFQLACQLLLQQQQQQQLLQNQRKISQAVRQQQEQQLARMVSALQQQQQQQQRQPGMKHSPSHPVGPKPHLDNMVPNALNVGLPDLQTKGPIPGYGSGFSSGGMDYGMVGGKEAGTESRFKQWTSMMEGLPSVATQEANMHKNGAIVAPGKTRGGSPYNQFDIIPGDTLGGHTGPAGDSWLPAKSPPTNKIGSKSSNASWPPEFQPGVPWKGIQNIDPESDPYVTPGSVLGGTATSPIVDTDHQLLRDNTTGSNSSLNTSLPSPGAWPYSASDNSFTNVHSTSAKFPDYKSTWSPDPIGHNPTHLSNKMWKNHISSRNTTPLPRPPPGLTNPKPSSPWSSTAPRSVRGWGTQDSRLASASTWSDGGSVRPSYWLVLHNLTPQIDGSTLRTICMQHGPLLTFHLNLTQGTALIRYSTKQEAAKAQTALHMCVLGNTTILAEFATDDEVSRFLAQAQPPTPAATPSAPAAGWQSLETGQNQSDPVGPALNLFGGSTGLGQWSSSAGGSSGADLAGASLWGPPNYSSSLWGVPTVEDPHRMGSPAPLLPGDLLGGGSDSI

SEQ ID NO: 61674 - DNA, 5502 bp, Artificial Sequence
  derived and/or modified sequence
atgagagagaaggagcaggagagagaggagcagctgatggaggacaagaagagaaagaaggaggacaagaagaagaaggaggccacccagaaggtgaccgagcagaagaccaaggtgcccgaggtgaccaagcccagcctgagccagcccaccgccgccagccccatcggcagcagccccagcccccccgtgaacggcggcaacaacgccaagagagtggccgtgcccaacggccagccccccagcgccgccagatacatgcccagagaggtgccccccagattcagatgccagcaggaccacaaggtgctgctgaagagaggccagccccccccccccagctgcatgctgctgggcggcggcgccggcccccccccctgcaccgcccccggcgccaaccccaacaacgcccaggtgaccggcgccctgctgcagagcgagagcggcaccgcccccgacagcaccctgggcggcgccgccgccagcaactacgccaacagcacctggggcagcggcgccagcagcaacaacggcaccagccccaaccccatccacatctgggacaaggtgatcgtggacggcagcgacatggaggagtggccctgcatcgccagcaaggacaccgagagcagcagcgagaacaccaccgacaacaacagcgccagcaaccccggcagcgagaagagcaccctgcccggcagcaccaccagcaacaagggcaagggcagccagtgccagagcgccagcagcggcaacgagtgcaacctgggcgtgtggaagagcgaccccaaggccaagagcgtgcagagcagcaacagcaccaccgagaacaacaacggcctgggcaactggagaaacgtgagcggccaggacagaatcggccccggcagcggcttcagcaacttcaaccccaacagcaaccccagcgcctggcccgccctggtgcaggagggcaccagcagaaagggcgccctggagaccgacaacagcaacagcagcgcccaggtgagcaccgtgggccagaccagcagagagcagcagagcaagatggagaacgccggcgtgaacttcgtggtgagcggcagagagcaggcccagatccacaacaccgacggccccaagaacggcaacaccaacagcctgaacctgagcagccccaaccccatggagaacaagggcatgcccttcggcatgggcctgggcaacaccagcagaagcaccgacgcccccagccagagcaccggcgacagaaagaccggcagcgtgggcagctggggcgccgccagaggccccagcggcaccgacaccgtgagcggccagagcaacagcggcaacaacggcaacaacggcaaggagagagaggacagctggaagggcgccagcgtgcagaagagcaccggcagcaagaacgacagctgggacaacaacaacagaagcaccggcggcagctggaacttcggcccccaggacagcaacgacaacaagtggggcgagggcaacaagatgaccagcggcgtgagccagggcgagtggaagcagcccaccggcagcgacgagctgaagatcggcgagtggagcggccccaaccagcccaacagcagcaccggcgcctgggacaaccagaagggccaccccctgcccgagaaccagggcaacgcccaggccccctgctggggcagaagcagcagcagcaccggcagcgaggtgggcggccagagcaccggcagcaaccacaaggccggcagcagcgacagccacaacagcggcagaagaagctacagacccacccaccccgactgccaggccgtgctgcagaccctgctgagcagaaccgacctggaccccagagtgctgagcaacaccggctggggccagacccagatcaagcaggacaccgtgtgggacatcgaggaggtgcccagacccgagggcaagagcgacaagggcaccgagggctgggagagcgccgccacccagaccaagaacagcggcggctggggcgacgcccccagccagagcaaccagatgaagagcggctggggcgagctgagcgccagcaccgagtggaaggaccccaagaacaccggcggctggaacgactacaagaacaacaacagcagcaactggggcggcggcagacccgacgagaagacccccagcagctggaacgagaaccccagcaaggaccagggctggggcggcggcagacagcccaaccagggctggagcagcggcaagaacggctggggcgaggaggtggaccagaccaagaacagcaactgggagagcagcgccagcaagcccgtgagcggctggggcgagggcggccagaacgagatcggcacctggggcaacggcggcaacgccagcctggccagcaagggcggctgggaggactgcaagagaagccccgcctggaacgagaccggcagacagcccaacagctggaacaagcagcaccagcagcagcagcccccccagcagcccccccccccccagcccgaggccagcggcagctggggcggcccccccccccccccccccggcaacgtgagacccagcaacagcagctggagcagcggcccccagcccgccacccccaaggacgaggagcccagcggctgggaggagcccagcccccagagcatcagcagaaagatggacatcgacgacggcaccagcgcctggggcgaccccaacagctacaactacaagaacgtgaacctgtgggacaagaacagccagggcggccccgcccccagagagcccaacctgcccacccccatgaccagcaagagcgccagcgtgtggagcaagagcaccccccccgcccccgacaacggcaccagcgcctggggcgagcccaacgagagcagccccggctggggcgagatggacgacaccggcgccagcaccaccggctggggcaacacccccgccaacgcccccaacgccatgaagcccaacagcaagagcatgcaggacggctggggcgagagcgacggccccgtgaccggcgccagacaccccagctgggaggaggaggaggacggcggcgtgtggaacaccaccggcagccagggcagcgccagcagccacaacagcgccagctggggccagggcggcaagaagcagatgaagtgcagcctgaagggcggcaacaacgacagctggatgaaccccctggccaagcagttcagcaacatgggcctgctgagccagaccgaggacaaccccagcagcaagatggacctgagcgtgggcagcctgagcgacaagaagttcgacgtggacaagagagccatgaacctgggcgacttcaacgacatcatgagaaaggacagaagcggcttcagaccccccaacagcaaggacatgggcaccaccgacagcggcccctacttcgagaagctgaccctgcccttcagcaaccaggacggctgcctgggcgacgaggccccctgcagccccttcagccccagccccagctacaagctgagccccagcggcagcaccctgcccaacgtgagcctgggcgccatcggcaccggcctgaacccccagaacttcgccgccagacagggcggcagccacggcctgttcggcaacagcaccgcccagagcagaggcctgcacacccccgtgcagcccctgaacagcagccccagcctgagagcccaggtgcccccccagttcatcagcccccaggtgagcgccagcatgctgaagcagttccccaacagcggcctgagccccggcctgttcaacgtgggcccccagctgagcccccagcagatcgccatgctgagccagctgccccagatcccccagttccagctggcctgccagctgctgctgcagcagcagcagcagcagcagctgctgcagaaccagagaaagatcagccaggccgtgagacagcagcaggagcagcagctggccagaatggtgagcgccctgcagcagcagcagcagcagcagcagagacagcccggcatgaagcacagccccagccaccccgtgggccccaagccccacctggacaacatggtgcccaacgccctgaacgtgggcctgcccgacctgcagaccaagggccccatccccggctacggcagcggcttcagcagcggcggcatggactacggcatggtgggcggcaaggaggccggcaccgagagcagattcaagcagtggaccagcatgatggagggcctgcccagcgtggccacccaggaggccaacatgcacaagaacggcgccatcgtggcccccggcaagaccagaggcggcagcccctacaaccagttcgacatcatccccggcgacaccctgggcggccacaccggccccgccggcgacagctggctgcccgccaagagcccccccaccaacaagatcggcagcaagagcagcaacgccagctggccccccgagttccagcccggcgtgccctggaagggcatccagaacatcgaccccgagagcgacccctacgtgacccccggcagcgtgctgggcggcaccgccaccagccccatcgtggacaccgaccaccagctgctgagagacaacaccaccggcagcaacagcagcctgaacaccagcctgcccagccccggcgcctggccctacagcgccagcgacaacagcttcaccaacgtgcacagcaccagcgccaagttccccgactacaagagcacctggagccccgaccccatcggccacaaccccacccacctgagcaacaagatgtggaagaaccacatcagcagcagaaacaccacccccctgcccagacccccccccggcctgaccaaccccaagcccagcagcccctggagcagcaccgcccccagaagcgtgagaggctggggcacccaggacagcagactggccagcgccagcacctggagcgacggcggcagcgtgagacccagctactggctggtgctgcacaacctgaccccccagatcgacggcagcaccctgagaaccatctgcatgcagcacggccccctgctgaccttccacctgaacctgacccagggcaccgccctgatcagatacagcaccaagcaggaggccgccaaggcccagaccgccctgcacatgtgcgtgctgggcaacaccaccatcctggccgagttcgccaccgacgacgaggtgagcagattcctggcccaggcccagccccccacccccgccgccacccccagcgcccccgccgccggctggcagagcctggagaccggccagaaccagagcgaccccgtgggccccgccctgaacctgttcggcggcagcaccggcctgggccagtggagcagcagcgccggcggcagcagcggcgccgacctggccggcgccagcctgtggggcccccccaactacagcagcagcctgtggggcgtgcccaccgtggaggacccccacagaatgggcagccccgcccccctgctgcccggcgacctgctgggcggcggcagcgacagcatctag

SEQ ID NO: 61675 - DNA, 5502 bp, Artificial Sequence
  derived and/or modified sequence
atgagagagaaggagcaagagcgagaggagcagctcatggaggataaaaaacgcaaaaaagaagacaagaaaaaaaaggaagcaactcagaaagtgactgagcagaaaactaaggttcccgaagtcaccaaacccagtctgagccaaccgacagccgcatcaccaatcggatcatctccgagtccgccagtgaatggcgggaacaacgccaaaagggtggccgtgcctaacgggcagcccccttcggccgcgaggtacatgccaagagaggtgcccccccgcttccggtgccaacaggatcataaagtgctcttgaagcgcgggcagccgcccccgcccagctgtatgttactgggggggggggccggtccgcctccttgtacggctcctggggctaatcccaataatgcacaggtgaccggtgccctgttgcaaagcgaatcaggaactgcccccgatagtacactgggaggagctgccgcgagcaattatgccaacagtacctggggcagtggagcttcgtccaacaatggcactagtccgaaccccatacacatttgggataaagtgatcgtggatggttctgatatggaggagtggccttgtatcgcgtcgaaggataccgagtcctccagtgagaacacaaccgataataattctgccagtaaccctggaagtgagaagtcaacactgccggggtccaccacctctaataagggaaaagggtctcagtgtcaatcagccagctcaggaaatgaatgcaaccttggcgtttggaagagcgaccccaaagccaagtccgtgcagagcagcaactccactacagagaacaataacgggttgggtaattggcggaatgtgtctgggcaggacagaattggccctggcagcggcttctccaatttcaaccctaattccaacccttcagcctggccagctctcgtgcaagagggcacgagcagaaaaggggctcttgagacagacaactcaaatagttccgctcaagtcagtaccgtggggcagacctctcgggagcagcagtcgaagatggagaatgcgggagtgaatttcgtggtgtcaggccgcgaacaggcacagatccacaataccgacgggcctaagaacggaaacaccaactccctgaacctcagttctcctaacccaatggagaacaagggcatgccctttggaatggggttgggtaacacatccagaagcaccgacgcaccatctcagtctacaggcgaccgaaagacaggctccgtaggaagctggggcgcggcgagagggccctccggaaccgataccgtgtccggacaatccaactccggcaataacgggaataacgggaaggagcgcgaagactcttggaagggcgcatctgtacaaaagtccacggggtccaaaaacgattcctgggacaacaacaaccgctctactggtggttcatggaattttggccctcaggacagtaatgacaacaaatggggggagggcaacaagatgacctcaggcgtgtcccagggtgaatggaaacagccgactggttctgatgaattgaagatcggggaatggagtggacctaatcaaccgaatagtagtactggagcatgggataaccagaagggccaccccctgccagaaaatcaaggcaacgcccaagcgccctgctggggcaggagcagtagctcaactggcagtgaggtaggggggcagtctaccggctctaaccacaaagccggctcctctgatagccacaactctgggaggagatcttatagacccactcaccccgactgccaggccgtcttacagactttgctgagccgcacggacctggatcctagagtcctgtctaacacaggctgggggcagactcaaataaagcaggacaccgtttgggacatcgaagaggtgcctcgccctgagggaaaaagcgataagggaactgagggttgggagtccgcggcaacccagactaaaaactcgggcggctggggtgacgccccatcccagtccaatcagatgaagtcaggctggggcgaattgtctgcctccactgagtggaaggatcccaaaaataccggcggatggaacgattacaaaaataataactcatctaattgggggggcggccggcctgatgaaaaaacgccttcctcatggaatgaaaatccgagcaaagaccagggttggggggggggccggcagccgaaccagggctggtctagcggtaagaacggctggggcgaagaagtagatcagacaaagaattcaaattgggagagctcagcctcaaaaccagtaagcgggtggggcgaaggcgggcagaacgagattggcacctggggaaacggcggcaacgctagcctcgcttctaaaggcgggtgggaggattgtaagaggagcccagcttggaacgaaactgggcgccagccaaacagttggaataaacagcaccagcagcagcagccacctcagcagcccccacccccacagccagaagcctccggatcttggggtggccctccacctccccctccaggtaacgttcgaccatctaactcttcttggtcctcaggcccacagcccgccaccccaaaagacgaggagccgagcggatgggaggaaccttcaccccagtcaatatcaagaaaaatggacatcgatgacggaacttcagcctggggcgatccaaattcctacaactacaaaaatgtaaacctgtgggacaaaaattcccaggggggcccagccccacgcgagcccaatctcccaacacctatgacgtcaaaatctgcatccgtctggtcgaagtctaccccacctgcaccagataatggaacctccgcctggggcgaacctaatgagtcatcacccggatggggcgagatggatgatacaggggcatcgaccacaggatgggggaatactcccgcgaacgctcctaacgccatgaagccaaatagtaagtccatgcaggacgggtggggggagagcgatggtcctgtgaccggggctcgccacccttcctgggaggaagaggaagatggcggcgtgtggaacaccaccgggagtcagggcagcgctagctcccataactctgcctcttggggtcaagggggcaaaaaacagatgaagtgtagcctgaaggggggcaataacgacagttggatgaaccctctggcgaaacagttcagcaacatgggattattatcccaaacagaggacaatccctctagcaaaatggatttgtcagtaggctccctgtctgataagaagttcgacgtcgataagagagccatgaatctgggagacttcaacgatatcatgcgcaaagacaggtctgggtttcgcccgccaaactcaaaggacatggggaccactgatagcgggccgtactttgagaaactgaccctgccattctcgaatcaggacgggtgtttgggtgatgaagccccctgttccccattcagccctagcccatcttacaaattgagccccagcgggagcaccctgcccaacgtgtccctgggcgcaatcggaacaggtctcaatcctcagaactttgccgctagacaaggtggctcccacggcctatttggaaattccaccgcccagtctcgcggcttacataccccagtgcagcctctgaactccagcccctctctcagggcacaggtccccccacagttcatttcgccacaggtctcagcctcaatgcttaaacagttccctaattccgggttgagccctggtctcttcaacgtaggccctcaactgtcgccacagcagatcgccatgctcagccagttgccccagattccacagtttcagctggcctgtcaactcctgctgcagcagcagcagcagcagcagctactgcaaaaccagcgaaagatttcccaggctgtgcggcagcagcaggagcaacagttggctcgcatggtttctgccctccagcagcaacagcagcaacagcaacggcaacctggcatgaaacacagcccttcgcaccccgtcggacctaagccccatctcgacaatatggtgccaaacgcgctgaacgtgggcctcccagatctgcagacgaaaggacccatcccaggctacggaagtggctttagctctggggggatggattacgggatggttggcggaaaagaagcaggaactgaaagccgattcaaacagtggacatcgatgatggaagggcttccctctgtggctacccaggaagccaacatgcacaaaaacggagctatcgtagcccctggaaaaacccgcgggggctccccctataatcagtttgatattattcccggagacaccttgggcggccatactggtcccgctggtgactcatggctcccagctaaaagcccaccgaccaacaaaattggcagcaaaagtagcaacgctagctggcctccggaattccaaccgggcgttccctggaagggaatccagaacatagaccctgaatccgacccatacgttacccctggctccgtgctcggcgggaccgccacttctccaattgtggacaccgaccatcagctgctgagagataacactactgggtcaaactcctctctaaatacatctttacctagtccgggcgcctggccttactccgcctctgacaattctttcacaaacgtccatagcaccagcgcaaaattccctgattacaagtcaacatggtcacctgatcccatcggccacaatccgacacacctttcaaataaaatgtggaaaaaccacatttcttcacggaatacgacccctttgcctagaccaccacccggtttgacaaacccaaagcccagtagtccgtggtcaagtactgccccacgctccgtgagaggatggggtactcaagattcaaggttagcgagcgctagcacctggagcgatggaggatctgtgcggccaagctattggcttgttctccataaccttacccctcagatcgatgggtcaaccctgaggaccatctgcatgcagcacggccctttactcaccttccacctgaacctcacacaggggaccgctctaatccgctacagcactaaacaggaggccgccaaggcccagacggccctccacatgtgcgtcctgggtaatacaactatcctggccgagtttgcaacggacgatgaggtgtcaagatttcttgcgcaagctcagcccccaacccccgcggcaaccccctcagctcctgccgctggatggcagagcctggaaacaggtcagaatcaatccgaccctgtgggtcctgccttgaacttgtttggcggctcgaccgggctgggccagtggtcttcaagtgctggaggcagcagcggcgcggatctggccggagcctcactgtggggcccccctaactacagctcttctttatggggggttcccaccgttgaagatccgcacaggatgggaagccctgcaccactccttccaggggatttgctcggcggtggctcggactcgatctag

SEQ ID NO: 61676 - DNA, 5502 bp, Artificial Sequence
  derived and/or modified sequence
atgagggagaaggagcaggagcgggaggagcagctgatggaggacaagaagaggaagaaggaggacaagaagaagaaggaggccacccagaaggtgacagagcagaagaccaaggtgcctgaggtgaccaagcccagcctgagccagcccacagctgccagccccatcggcagcagccccagcccccctgtgaatggaggcaacaatgccaagagggtggccgtgcccaacggccagccccccagcgctgcccgctacatgccccgggaggtgcccccacgcttccgctgccagcaggaccacaaggtgctgctgaagaggggccagcccccaccacccagctgcatgctgctgggcggcggggccggccccccaccctgcacagcccctggggccaaccccaacaatgcccaggtgactggagccctgctgcagagcgagagcggcacagccccagacagcaccctgggcggggccgccgccagcaactatgccaacagcacctggggcagcggggccagcagcaacaacggcaccagccccaaccccatccacatctgggacaaggtgattgtggatggcagtgacatggaggagtggccctgcatcgccagcaaggacacagagagcagcagcgagaacaccacagacaacaacagcgccagcaaccctggcagcgagaagagcaccctgcccggcagcaccaccagcaacaagggcaagggcagccagtgccagagcgccagcagtggaaatgaatgcaacctgggcgtgtggaagagtgaccccaaggccaagtctgtgcagagcagcaacagcaccacagagaacaacaacggcctgggcaactggagaaatgtgtctggccaggacagaattggccctggcagcggcttcagcaacttcaaccccaacagcaaccccagcgcctggccagccctggtgcaggagggcaccagcaggaagggggccctggagacagacaacagcaacagcagcgcccaggtgtccacagtgggccagaccagccgggagcagcagagcaagatggagaatgccggcgtgaactttgtggtgtctggccgggagcaggcccagatccacaacacagatggccccaagaatggaaacaccaacagcctgaacctgagcagccccaaccccatggagaacaagggcatgcccttcggcatgggcctgggcaacaccagccgcagcacagatgcccccagccagagcactggagacaggaagacaggctctgtgggctcctggggcgccgcccggggccccagcggcacagacacagtgtctggccagagcaacagcggcaacaacggcaacaacgggaaggagcgggaggacagctggaagggggcctctgtgcagaagagcacaggcagcaagaatgacagctgggacaacaacaacagaagcactggaggctcctggaactttggcccccaggacagcaatgacaacaagtggggcgagggcaacaagatgaccagcggcgtgtcccagggcgagtggaagcagcccactggaagtgatgagctgaagatcggggagtggagcggccccaaccagcccaacagcagcactggagcctgggacaaccagaagggccaccccctgcctgagaaccagggcaatgcccaggccccctgctggggccgcagcagcagcagcactggaagtgaggtgggcggccagagcacaggcagcaaccacaaggccggcagcagtgacagccacaacagcggccgccgcagctaccggcccacccacccagactgccaggccgtgctgcagaccctgctgagcaggacagacctggacccccgggtgctgagcaacacaggctggggccagacccagatcaagcaggacacagtgtgggacatcgaggaggtgcccaggcctgagggcaagagtgacaagggcacagagggctgggagagcgctgccacccagaccaagaacagcggcggctggggagatgcccccagccagagcaaccagatgaagagcggctggggcgagctgagcgccagcacagagtggaaggaccccaagaacacaggaggctggaatgactacaagaacaacaacagcagcaactggggcggcggccgcccagatgagaagacccccagctcctggaatgaaaaccccagcaaggaccagggctggggcggcggccggcagcccaaccagggctggagcagcggcaagaatggctggggcgaggaggtggaccagaccaagaacagcaactgggagagcagcgccagcaagcctgtgtctggctggggcgagggcggccagaatgagatcggcacctggggcaatggaggaaatgccagcctggccagcaagggcggctgggaggactgcaagaggagccctgcctggaatgaaacaggccggcagcccaacagctggaacaagcagcaccagcagcagcagcccccccagcagcccccaccaccccagcctgaggccagcggctcctggggcggccccccacctcctcctcctggaaatgtgcggcccagcaacagctcctggagcagcggcccccagcctgccacccccaaggatgaggagcccagcggctgggaggagcccagcccccagagcatcagcaggaagatggacattgatgatggcaccagcgcctggggagaccccaacagctacaactacaagaatgtgaacctgtgggacaagaacagccagggcggccctgccccccgggagcccaacctgcccacccccatgaccagcaagagcgcctctgtgtggagcaagagcaccccaccagccccagacaatggcaccagcgcctggggcgagcccaatgaaagcagccctggctggggcgagatggatgacaccggggccagcaccaccggctggggcaacaccccagccaatgccccaaatgccatgaagcccaacagcaagtccatgcaggacggctggggcgagagtgatggccctgtgactggagcccggcaccccagctgggaggaggaggaggatggaggagtgtggaacaccaccggcagccagggcagcgccagcagccacaacagcgcctcctggggccagggcggcaagaagcagatgaagtgcagcctgaagggcggcaacaatgacagctggatgaaccccctggccaagcagttcagcaacatgggcctgctgagccagacagaggacaaccccagcagcaagatggacctgtctgtgggcagcctgagtgacaagaagtttgatgtggacaagagggccatgaacctgggggacttcaatgacatcatgaggaaggacaggagcggcttccggccccccaacagcaaggacatgggcaccacagattctggcccctactttgagaagctgaccctgcccttcagcaaccaggacggctgcctgggagatgaggccccctgcagccccttcagccccagccccagctacaagctgagccccagcggcagcaccctgcccaacgtgtccctgggcgccatcggcaccggcctgaacccccagaactttgctgcccggcagggcggcagccacggcctgtttggaaacagcacagcccagagccggggcctgcacacccctgtgcagcccctgaacagcagccccagcctgcgggcccaggtgcccccccagttcatcagcccccaggtgtctgcctccatgctgaagcagttccccaacagcggcctgagccctggcctcttcaacgtgggcccccagctgagcccccagcagatcgccatgctgagccagctgccccagatcccccagttccagctggcctgccagctgctgctgcagcagcagcagcagcagcagctgctgcagaaccagaggaagatcagccaggccgtgcggcagcagcaggagcagcagctggccaggatggtgtctgccctgcagcagcagcagcagcagcagcagaggcagcccggcatgaagcacagccccagccaccctgtgggccccaagccccacctggacaacatggtgcccaatgccctgaatgtgggcctgcctgacctgcagaccaagggccccatccctggctacggcagcggcttcagcagcggcggcatggactatggcatggtgggcggcaaggaggccggcacagagagccgcttcaagcagtggacctccatgatggagggcctgcccagcgtggccacccaggaggccaacatgcacaagaatggagccatcgtggcccctgggaagacccggggcggcagcccctacaaccagtttgacatcatccctggggacaccctgggcggccacactggacctgctggggacagctggctgcctgccaagagcccccccaccaacaagattggcagcaagagcagcaatgcctcctggcccccagagttccagcccggggtgccctggaagggcatccagaacatcgaccctgagagtgacccctacgtgaccccaggctctgtgctgggcggcacagccaccagccccatcgtggacacagaccaccagctgctgcgggacaacaccaccggcagcaacagcagcctgaacaccagcctgcccagccctggggcctggccctacagcgccagtgacaacagcttcaccaacgtgcacagcaccagcgccaagttcccagactacaagagcacctggagcccagaccccatcggccacaaccccacccacctgagcaacaagatgtggaagaaccacatcagcagcaggaacaccacccccctgcccaggcctcctcctggcctgaccaaccccaagcccagcagcccctggagcagcacagcccccaggtctgtgcggggctggggcacccaggacagccggctggccagcgccagcacctggagcgatggcggctctgtgcggcccagctactggctggtgctgcacaacctgaccccccagattgatggcagcaccctgcggaccatctgcatgcagcacggccccctgctgaccttccacctgaacctgacccagggcacagccctgatccgctacagcaccaagcaggaggccgccaaggcccagacagccctgcacatgtgtgtgctgggcaacaccaccatcctggccgagtttgccacagatgatgaggtgagccgcttcctggcccaggcccagccccccaccccagctgccacccccagcgccccagctgctggctggcagagcctggagaccggccagaaccagagcgaccctgtgggccctgccctgaacctgtttggaggcagcacaggcctgggccagtggagcagcagcgctgggggcagcagtggagctgacctggccggggccagcctgtggggcccccccaactacagcagcagcctgtggggcgtgcccaccgtggaggacccccacaggatgggcagccctgcccccctgctgcccggggacctgctgggcggcggcagtgacagcatctag

SEQ ID NO: 61677 - DNA, 5502 bp, Artificial Sequence
  derived and/or modified sequence
atgcgggagaaggagcaggagcgggaggagcagctgatggaggacaagaagaggaagaaggaagataagaagaaaaaggaagccacccaaaaagtcacagaacaaaagaccaaggtgcccgaagtgaccaagccaagcttgtcacagccgactgccgcctcgccaattggcagctcaccttcacctcccgtcaacggcggaaacaatgccaagcgtgtggccgtcccgaacggacagcctccgtctgcggcccgttacatgcccagagaggtgcccccccggtttcgctgtcaacaggatcacaaagtcctactcaaacgcgggcagccacccccgcccagctgtatgctgctaggaggtggtgccggtccccccccttgcacggcccccggcgctaacccaaacaatgcccaagtaacgggtgccctcttgcagagcgaaagtgggacggcacctgactccacacttggaggcgcagcagcctccaattacgccaattcgacctggggatcaggagcatcaagtaacaacggcacctctcccaaccctatccatatttgggataaggtgattgtcgatgggtctgacatggaggaatggccctgcatcgcatccaaagacacagaatcgagtagtgagaataccacagacaacaattccgcctcaaatcccggaagtgagaagtctacactgccgggaagcactacgtcaaataaagggaaaggaagccagtgtcagtcggcaagtagcggcaacgagtgtaatttgggcgtctggaagagcgatccaaaggccaaatccgtgcagagctctaacagcactactgaaaacaacaatggcttaggtaactggcgcaacgtgtctggacaagatcggatcggaccgggaagcggctttagcaactttaaccctaactcaaatccttcggcttggcccgctctagtgcaggagggcacatcccgaaagggagccctggaaaccgataatagtaacagttcggcgcaggtgtctacagtgggacagacttctcgcgagcagcagtccaagatggaaaacgcaggggtcaacttcgtggtgtctggacgtgagcaggcgcagattcacaatacagacgggccaaagaacggcaatacaaacagcttaaatctcagctccccaaacccaatggagaacaaagggatgcccttcgggatgggactcgggaacacgagtagatccacagatgccccctcgcagagcactggagatagaaagacaggctctgtgggaagctggggagctgctcggggcccctctggcaccgataccgtctctggtcagtccaactccggcaacaatgggaacaacggtaaagagagagaagacagctggaaaggggcctctgtacagaaaagtacgggcagcaagaatgattcatgggataataataaccgaagcacgggcggctcgtggaacttcggtccacaggatagtaatgacaacaagtggggcgagggaaataagatgacctctggggtctctcagggggagtggaagcagcctaccggatctgatgagctaaagattggggaatggagtggccccaaccagcctaacagctcaacaggcgcctgggacaaccagaagggacaccctctgcccgaaaaccagggtaatgctcaggctccctgttggggcagaagcagctccagcactggctctgaggtcggaggccagtcgaccgggagcaaccacaaagcgggcagttccgactctcacaatagcgggagaagatcctaccggccaactcaccctgactgtcaggccgtgctacaaacattgctgtcacgtacggacttggacccaagagtgctatcaaacacaggctggggacagactcagatcaagcaagatacggtctgggacattgaggaggttcctaggcccgagggcaaaagcgacaaaggcaccgaggggtgggagtcagctgcaacacagacaaagaacagcggcggatggggcgatgcaccatctcagtccaaccagatgaaaagcggatggggggaactcagtgcgtccaccgagtggaaggatcctaaaaacactggtggttggaatgactataagaacaacaattcctccaattggggcggcggaaggcctgatgagaagacccctagtagctggaatgagaacccatccaaggatcagggatggggcgggggaaggcagcctaatcagggctggtcaagcggcaaaaatggttggggagaggaggtggaccaaaccaagaattctaactgggagagctctgcgtcgaagccagtcagcggctggggagagggaggacagaacgagatcggcacttggggaaacggcgggaacgccagcctggccagcaagggggggtgggaagactgtaaacgttcacccgcgtggaatgagaccggcagacagcccaactcctggaataagcaacaccagcagcaacagcccccacaacagcctcctcccccccagcctgaggcgagcggcagctggggcggccctccccctcctcctcctggcaacgtgagaccatccaattcaagttggtcgtcggggcctcagcccgccacccctaaagacgaggagccaagtggctgggaagagccctcaccacaaagcattagcagaaagatggatattgacgacggtacatctgcatggggcgacccaaactcatacaactataagaacgtcaacttatgggacaagaacagccagggtggtcctgcgccccgcgagcctaacctgccaactccaatgacaagcaaaagcgcctctgtgtggagcaaaagcacacctccagcgccagacaacggcactagcgcatggggagagcccaacgaatccagtcctggttggggtgaaatggacgataccggggcaagcaccaccggctggggaaatacaccagccaatgcccctaatgctatgaagcccaacagtaagtcaatgcaggatggatggggcgaatccgacggaccagtcacaggagcacggcatccaagttgggaagaagaagaggatggaggtgtctggaatactaccggctcacagggttcagccagtagccacaatagtgcatcttggggccagggcgggaagaagcagatgaaatgctccttaaagggcggaaataacgactcctggatgaatcccctggccaaacaattctccaatatggggctcctttcccagaccgaagacaatccgtcatctaagatggacctgtctgtggggagcctgtccgataaaaaattcgatgtagataaaagagcaatgaatctgggggattttaatgacattatgaggaaagatagatcaggtttcaggccaccgaattccaaagatatgggcactaccgattctggcccctactttgagaagcttaccctgccgttcagtaaccaggacggatgtcttggcgacgaagctccttgttcccccttttcaccttcaccgagctacaaattatccccaagcgggtctaccctccctaacgtctccttaggcgccatcgggactggtctgaatcctcagaattttgctgcgaggcagggaggctcacacggcctgttcggaaattccactgcccagtccagaggcctccacaccccagtgcagcctcttaattctagcccctccctgcgagctcaagtgccaccgcagttcatctctcctcaggtctctgccagtatgctgaagcagtttcctaacagcggattgagccccgggctatttaacgtcggcccccagttgtctcctcagcagatcgccatgctgtctcagctccctcaaatacctcagttccagctggcctgccaactactcctgcagcagcagcaacaacagcagctgttgcagaaccagcgaaagatatctcaggcagtacggcagcaacaggaacaacagttggcccgtatggtgtccgctctccaacagcagcagcagcagcagcagcgacaacctggcatgaagcactctccgtctcatccggtaggaccaaaacctcacctggataatatggtgccaaatgctctaaacgtaggcttgcctgacctgcaaaccaagggcccaatccccggatacggtagcggttttagttctggcggcatggactacggcatggtcggtggcaaggaggcaggaacagaatcccgcttcaaacaatggaccagcatgatggaaggactcccatcagtggctacgcaagaggccaatatgcataagaatggtgctattgtcgcgcccggcaagacaagaggcggtagcccatacaatcaattcgacattatacccggggacactttgggcggacacaccggtcccgcaggcgatagttggttgcccgcaaagtcacccccaaccaataaaatcggatcaaaatcatcaaacgcaagctggcctcctgagttccagccaggggtgccttggaaagggatccagaacatcgaccccgaatctgacccttatgtgaccccagggtctgttctgggcggaacagccaccagccccatagtcgacacagatcaccagctgctgagagacaacactacgggctctaactcttcactaaacacctcgctgccaagtccaggtgcctggccttattctgcctctgacaacagcttcaccaatgtccatagcacttccgcgaagttccctgactataagagcacatggtccccggatccgatcggccataatccaacacacttaagtaataagatgtggaagaatcatattagctcgcgcaacacgacgccgctcccccgccctccccctggtctaaccaatcccaaaccttcctccccgtggtcgtcaactgctccacgatctgtgcgtggctggggtacacaggactcgagactggcctccgcgagtacttggagtgacggcggctccgtgaggccctcctattggctagtgctacataacttaacccctcagattgatggctcaactctcagaaccatctgtatgcagcacgggccactgctgacctttcatctgaatcttacccaagggaccgccttgataagatactcaacaaaacaggaggctgctaaagcccaaaccgctcttcacatgtgtgtcttagggaataccacgattttagccgagttcgccacagatgacgaggtctcacggtttttagctcaggcgcaaccacccacccccgctgccactccatccgcgccggctgcaggttggcaatccctagaaactggccaaaaccagtccgatcctgtgggacccgctttaaatctgtttggaggatccacaggactgggacaatggtcctcctccgccggaggcagctcaggggctgacctggcaggcgccagtctgtggggcccccccaactattcctctagcttatggggggtgccaacggtggaagatccgcataggatgggcagtcctgcaccactgttgcccggcgatttactggggggcggatccgatagtatttag

SEQ ID NO: 61678 - DNA, 5501 bp, Artificial Sequence
  derived and/or modified sequence
atgagggaaaaagagcaggagcgtgaggagcagctcatggaagataaaaagcgaaaaaaggaagataagaaaaagaaggaggctacccagaaggtgacagagcagaagaccaaggtacccgaggtgaccaagccgagtctttctcagccaacagccgcatctccgattggaagcagcccatctcctcccgtgaatggcggaaataatgcaaaacgagtagcagttccaaatggacagcctcccagcgcagcacgttacatgccacgtgaggttcctcctcgattccggtgccagcaagatcataaggtcctgctgaagcgcggacaaccacccccaccatcctgcatgctattgggtggaggtgcaggacccccaccgtgcacagctcccggagctaacccaaacaacgctcaggtgaccggcgcattactccaatccgaatcaggaacggcacctgattccacactgggtggtgccgcagcttccaattatgcaaactcgacatggggaagcggcgcttcttcaaataatggcaccagcccaaacccgattcatatctgggacaaggtgatagtggatggctctgatatggaggaatggccttgtattgcctccaaagatactgagtcctcctccgaaaataccacggacaacaatagtgcaagtaatccaggctccgagaaaagcaccctgccaggctcaactaccagcaataaaggaaagggctctcagtgccagtccgcctcttccggtaacgagtgtaacttgggtgtctggaaaagcgaccccaaagccaaaagcgtgcagagttcgaactcgactaccgagaataacaatggcttggggaattggcgcaacgttagtggccaggatagaatagggccagggagcggctttagcaattttaaccctaactccaacccttccgcctggcctgcactcgtacaggaaggaacaagtagaaaaggagctctcgaaaccgataacagtaactcttccgctcaggtgtcaaccgtcggccagacctcacgggagcagcaatccaaaatggagaatgccggagttaatttcgtcgtgagcggcagggaacaggcgcagattcacaacaccgacggcccaaaaaacgggaacactaattccctcaatctgtcgtctcctaaccccatggaaaacaagggtatgccatttggcatgggtctgggcaatacatctcggtctaccgacgccccttcccagtccactggtgaccgcaagactgggtccgtgggctcttggggagctgcccgtggcccttccggtaccgataccgtcagtggccagtcaaattcaggcaacaatggaaacaacggaaaggagcgtgaggattcctggaagggggctagcgtccagaaaagtaccggatctaaaaatgattcctgggataataacaataggagtaccggtggatcatggaactttgggccacaggactctaacgacaataagtggggggaagggaacaaaatgacgagtggcgtatcccagggcgagtggaagcagcccacgggttcagacgagctgaaaattggtgagtggagcggaccaaaccagcctaactcatctacgggagcttgggacaaccagaagggtcaccctcttcccgagaatcaggggaatgcgcaggccccttgctggggccgttcttcttcatccactgggtcagaagttgggggtcaatccaccggaagcaatcacaaggcgggaagcagcgatagtcacaactcaggccgtcggagctacagaccaactcatcctgactgccaggctgttctgcagaccctgctctcccggactgacctggatcctcgagtgctctccaacaccggttggggccagacccagattaaacaggacaccgtatgggacatcgaggaagtgccgaggcctgagggaaaatcggataagggcacagagggttgggagtctgccgcaacccagaccaagaacagtgggggatggggtgacgcgccttctcagtctaaccagatgaagtcaggttggggagagttaagtgccagcacagagtggaaggatcccaagaacacaggtggttggaacgattataagaataataattctagtaattggggtgggggacgccctgatgaaaagactccaagttcctggaacgagaatcctagcaaggatcaaggctggggcggaggacggcaaccaaaccaggggtggagctcaggcaagaacgggtggggcgaggaggtggatcaaacaaaaaactcaaattgggaaagtagcgcaagcaagcccgtaagtgggtggggagaaggaggccagaacgaaatcggtacctggggaaatggaggaaacgcttccctggcttcgaagggaggttgggaggactgcaaaaggagccccgcatggaacgaaacaggtaggcagcccaattcgtggaacaaacagcaccaacagcaacagccaccgcaacagcctccaccccctcagcccgaagccagcgggtcatggggaggtccgcctccgccacctcccggaaacgtgcggccatcaaattcctcatggtcctccggcccacagccagccacaccgaaggacgaagagccatcgggttgggaggaaccctcacctcagagcatctcgcggaagatggatattgacgacggcaccagcgcatggggcgatccaaatagctacaattacaaaaatgttaatctgtgggacaaaaatagccaaggtggccctgctcctagagagccgaacctgccaacaccaatgacctcaaagtccgcttccgtctggagtaagtccaccccacccgcaccagacaacggtacctccgcatggggcgagccgaacgagtcttcccctggttggggcgagatggatgacacaggcgcttccaccactggatggggcaacacccctgcaaacgcgcctaacgcaatgaagccaaatagcaagtcaatgcaggacggatggggcgagtccgacggccctgtgacaggagcaagacacccctcttgggaggaagaagaagacggcggagtatggaatacgactgggtcccagggctccgcatctagccacaactctgcgagctgggggcagggcggtaagaagcagatgaagtgcagcttgaagggtggtaataatgactcatggatgaacccactggcaaagcaattcagtaacatgggacttctgtcacagacggaagacaatccatcctcgaaaatggacctgagcgtgggttccctctccgataagaaatttgatgtcgacaagcgggcaatgaatctcggggacttcaacgacattatgaggaaggataggagcggatttaggcctccaaactctaaggacatgggaactaccgattcaggaccatatttcgaaaaactgaccctgcccttctccaatcaggacggatgcctcggtgacgaggctccctgttccccattttcacccagcccctcctacaagttgtcaccctccgggtccactcttccaaatgtgagcctgggcgcaatcggaaccggattaaacccccaaaatttcgctgctcggcagggaggcagccatgggctgttcggcaattccactgcccagagtcgaggcttgcataccccggttcagcccctgaacagcagtccaagtctccgggcacaggtgcctccgcagttcattagcccccaggtctcggcatctatgctcaaacagttccccaattcaggactcagcccaggcttgttcaacgtcggaccacaactctcacctcagcagatagcaatgcttagccagttaccacaaatcccgcagttccaactggcctgccaacttctcctgcaacagcagcagcaacagcaattactacagaaccaaagaaaaatttcacaggcagtacgccagcaacaagagcagcaacttgccaggatggtgtccgcattgcaacagcagcaacagcaacagcagcggcagcctggaatgaagcactcacccagtcatccagtgggcccaaagcctcatctggacaacatggtgccgaacgctctaaatgtgggtctgcccgacctgcagacgaaaggcccaattcctggatatgggtccggcttcagtagcggcggtatggattacggcatggtgggcggaaaggaggctggtaccgaatctcgctttaaacagtggacatcaatgatggaggggctcccaagcgtagcaacccaggaggcgaatatgcacaagaatggcgctatagtcgcgccaggcaagacccgcggaggcagcccttacaaccagtttgacatcatacccggtgacaccttggggggtcacacaggacctgcgggagacagctggttacctgcaaaatctcctccgacaaacaaaatcggttcaaagtctagcaatgcatcttggccccctgagttccagcccggagtaccctggaagggcattcaaaacatagatccagagagcgacccctatgttaccccaggatccgtactggggggaaccgcaactagcccgatcgtcgacacagatcaccagctgctcagagataatacgaccggcagcaatagttccttgaatacttctctcccatcacctggcgcatggccttatagcgcttcggataactcttttacaaatgttcactctactagtgccaaattcccagattacaagtccacttggagccccgatccaatcggacacaaccctacccacttgtctaacaagatgtggaagaaccacatctctagtcggaacacgacccctctgcctcgcccacctcccggattgacaaatccaaagccgagttcaccgtggtctagcactgcccctaggagtgtgcgaggctgggggacccaggacagccgcctcgccagtgccagtacatggagtgatggtggttctgttcgccctagctattggctggtgttgcacaacctgaccccccagattgatggcagcaccctgcggacaatatgcatgcagcacgggcctctcctgaccttccatctgaacctcacacaaggcactgccctgatccggtacagtacaaagcaagaagcagccaaagcacaaaccgcccttcatatgtgcgtcctaggtaacacaactatcctcgcagagtttgctacagacgatgaggtatctcgatttctcgcccaggctcagcccccaacccccgcagccaccccatcggccccagctgcaggttggcagtcacttgagaccggccagaaccagtctgaccccgtcgggccagccctcaatctatttgggggatcaaccggactcgggcagtggtctagcagcgcaggaggcagctctggggcagatctggccggagcctcgctctgggggcctcccaactactcaagctctctctggggggtgccaacagtggaagatccacatagaatggggagtcctgcaccactcctgccaggggatctcctgggagggggtagtgattccatcta

SEQ ID NO: 61679 - DNA, 18279 bp, Artificial Sequence
  derived and/or modified sequence
agagacagagagggagagagagagcaagagggagagtgtgtgagagagagttagttcaagccaaaatggccgacagagtctctgctggtttctgaatatttaaaatacaaaaaaacagatagacaaaaagaattcattttttggaccttttttcatttccatttctaccttgtatgcctcaatttgctggatttaagcactgctgcactttatgagagagaaggagcaagaaagggaagaacagttaatggaagacaagaaaaggaagaaagaggataaaaagaaaaaagaagccactcagaaggtcacggaacaaaaaaccaaagtgcccgaagtgacgaaaccaagtttaagccaaccaacggccgccagcccaattggcagctctccatcgccaccagtcaatggtggcaacaatgccaaaagggtggcagtgccgaacggacaaccgccaagcgccgcccgctacatgcctcgggaggtgccgccgcgattccgttgccagcaggaccacaaagtgttactaaaacgtgggcagccccctccaccgtcctgcatgctccttgggggtggggcagggcctcctccctgcacagcacctggagcaaacccaaacaacgcacaagtgacaggagcgctgctgcagagtgagagtgggactgcgccagactcaacccttggaggtgctgctgcttcaaattatgcaaattccacttggggctcgggagcctcctccaacaacggcacctcccccaacccaattcacatctgggacaaggtgattgtagacgggtctgacatggaagagtggccttgtattgccagcaaagacactgaatcttcttccgaaaacaccaccgataacaacagtgcctcgaaccctggctctgagaagagcactctgccaggaagcaccactagtaacaaaggaaaagggagccagtgccagtctgcaagttctgggaacgaatgtaatcttggggtctggaaatctgaccctaaggctaaatctgttcaatcttccaactctactacagagaacaacaatggactaggaaattggaggaatgtgagtggtcaggatagaattggacctggctctggcttcagcaactttaacccaaatagcaacccatctgcctggccagcactggtccaagaaggaacttctaggaaaggggcattggaaacagataatagtaattccagtgcacaggttagcacagtaggtcagacatccagggaacagcagtcaaagatggaaaatgcgggtgttaattttgttgtctctggcagagaacaggctcaaattcataacactgatggaccaaaaaatggaaacactaactccttgaacttaagttcaccaaaccccatggagaataagggaatgccctttggaatgggcttggggaacacctccaggagcactgatgccccttcacaaagcactggagatcgaaagactgggagtgttggatcttggggtgcagctagggggccttctggaactgacacagtctctggacaaagcaattctggaaacaatgggaacaatggaaaagagagagaggactcctggaaaggagcttctgttcagaaatcaactgggtcaaaaaatgactcttgggacaacaataacaggtctacgggtgggtcctggaactttggcccccaggactctaatgacaacaaatggggtgaagggaacaaaatgacatctggggtctctcagggagaatggaaacagccgactgggtctgatgagttgaaaattggagaatggagtggtccaaaccaaccaaattctagcactggagcatgggacaatcaaaagggccaccccctccctgaaaaccaaggcaatgcccaggctccctgttggggaagatcttccagctccacaggaagtgaagttggaggtcaaagcactggaagcaaccacaaagcaggaagtagtgacagtcataactctggccgtcggtcgtacaggcccacacatcctgattgtcaggctgtcttgcagactcttttgagccgaactgatttggaccccagggtgctctcaaacactggctggggccaaactcaaattaagcaggacacagtgtgggacattgaagaggtgccaaggcctgaggggaaatctgacaaaggaactgaggggtgggagagcgctgccacacagaccaagaactcagggggctggggagatgcacccagccaaagcaatcaaatgaagtctggatggggggagctctcagcctctacagagtggaaagaccccaagaacacaggaggctggaatgactacaagaacaacaactcttccaactggggaggaggacgacctgatgaaaagacaccttcctcttggaatgagaatcccagcaaggatcaggggtggggaggtggacgccagcccaatcaaggatggtcttctggaaagaatggttggggggaggaagtcgatcagacaaaaaacagcaattgggaaagttctgcaagtaaacctgtgtctgggtggggtgaaggagggcagaatgaaatcgggacttggggtaatggtggcaatgcaagcctagcttcaaaaggtgggtgggaggattgcaaaagatccccagcatggaatgagacgggccgacagcccaattcctggaataaacaacaccaacagcagcagcccccacagcagccgccgccaccacaaccagaggcttctggttcgtggggaggcccacccccaccacctccaggcaacgttcgaccttccaattccagctggagcagcgggccacagcctgcaacacctaaggatgaggaacccagtggttgggaagagccatccccacagtcaattagtcggaaaatggacattgatgatggcacttcagcatggggagaccctaacagttataactacaagaatgtgaatctgtgggataagaattcccaagggggcccagcacctcgagaaccaaacctgcccaccccaatgaccagtaaatcggcatcagtctggagcaaaagcacaccacctgctccagataatggtacttccgcttggggtgagccaaatgaaagcagtcctgggtggggcgagatggatgatacaggagcatcgaccacaggctgggggaacacgcccgccaacgctcccaatgccatgaagcctaattccaaatctatgcaagacggctggggggagagtgacgggccagtcacaggagctcgccatcccagctgggaagaggaggaggatggaggagtctggaacaccactggctctcagggcagtgcttcctcccacaactcagcaagctggggacaaggaggaaagaaacaaatgaagtgctcactcaaaggaggaaacaatgattcatggatgaatcctcttgccaaacagttttcaaatatgggattgctgagtcagactgaagataatccaagcagcaaaatggatttgtctgtaggaagcctttcagataaaaaatttgatgtggacaagcgagcgatgaatctcggggattttaatgatatcatgaggaaggatcgatctgggttccgtccacctaattccaaagacatgggaaccacagatagtgggccttattttgagaagctgactttgcctttctccaatcaagatgggtgccttggggatgaggctccctgctctcccttctccccttctcccagctacaagctgtctccctctggttccacactacccaacgtcagccttggagcaatcggcacagggctcaacccccaaaacttcgctgctagacaaggcggtagtcatggtttgtttggaaacagcacagcacaatcgagaggtctgcacacacccgtgcagccactaaattcttctcccagtctccgggcgcaagtgcctccccagtttatttccccccaggtttctgcctcaatgctcaagcagtttcccaacagtggcctgagtccaggtcttttcaatgtggggccccagttatctcctcaacaaattgccatgctgagccagcttccacaaattccccagtttcagttggcatgtcagcttctcttgcagcagcagcaacagcagcagttgttacagaaccagagaaagatttctcaagctgtacgccaacagcaagagcagcagctggctcgaatggtgagtgcactgcagcagcagcagcagcagcagcagaggcagccaggcatgaagcactcgccctctcatcctgttgggcccaagccgcatctggacaacatggtacccaacgcattgaatgtggggctcccagaccttcaaaccaaagggccaatacctggatatggttctggcttcagctctggcggcatggactatggcatggttggtgggaaggaggctggaaccgagtctcgctttaaacagtggacctccatgatggaggggctgccctctgtagccacacaggaagccaatatgcacaaaaatggcgctatagtggcccctggtaaaacccggggagggtcaccgtacaaccagtttgatatcatccctggtgacacactgggtggccatacgggtcctgctggtgatagctggttacctgccaaatctccaccaacaaataaaatcggaagtaaatccagcaatgccagttggcctccagaattccaaccaggagtgccatggaaaggtatccaaaacattgaccctgaatctgacccctatgtcaccccaggaagtgtgctggggggtacagccacatctcccattgtagatactgaccaccaactgctgcgggataacaccacagggtctaattcttccctcaacacctcgctgccttcacctggtgcctggccctacagtgcctctgacaactcctttaccaacgttcatagcacttcagcaaagttccctgattacaaatcaacatggtccccagatcccataggacacaaccccactcatctctccaacaagatgtggaaaaaccatatttcctccaggaacactacaccgctgccccgcccacctcctggtctgaccaaccccaaaccatcatctccctggagcagcacagcaccccgatcagtcagggggtgggggacacaggactcacggctcgcctcggcctctacctggagtgatggtggctcagttcgtcctagttactggctggttcttcacaatctcaccccacagattgatgggtcaaccttgagaacgatctgcatgcagcatggcccactgctgacattccatctgaatctaacccagggcactgccctgatccgatacagcaccaaacaggaggcggccaaggcccaaactgcactgcacatgtgtgtgttgggaaacactaccatccttgctgagtttgccactgatgatgaagtcagccgctttctggcacaagctcagccccctacacctgcagcaaccccaagtgcgccagctgcggggtggcagtcgctggagaccggccagaaccagtcagatcccgtgggacctgctctgaatctttttggtgggtccactgggctcgggcagtggagcagcagcgctggtggcagcagcggggccgatcttgctggcgcttcattgtgggggcccccaaactattcttctagcttatggggagtcccaacggtggaagatccccataggatgggcagccctgctcctttactacctggtgaccttctgggaggagggtcggattcaatctgaacttagaactttcaactctgacctcgtgaccttttttggaacagcagcagcactaacttgaccttttcgttttttttttcaacttgcaataaatacatttttaaaaggaaaaaagaaaacggagagaaaaaaaggtgggtcattgacagactgtctgagcacatagttgcctcccttataacttcagttttttcgtttggaatatgaatccaaaaagagaacatatcactcttgaaatacttgaatcatgaacgccaacctagaaagacaatgtgaagcaagtacacataccatttaaatttaaacacaaaaaaattaaaaaaattagtttctagtttttcacttttttcatgttatatggaagttgttgctaagaaacatatatactgaaaaaaaatagctttttaactttgtttgcactgggtgtgtttccgtccttaggtctaccatgtttgggagggagggaaattcaaaagaattgttgggggaggggggagggaagacttgacggagcctcactttaaaaacaaaaacacaaaaaacctaaaaaaaaaaaaaaggaaaaaatttgtgattggctggttgataaataccagtgtgttctggcacatgtaactgcccaggcatgctcgttctggtgtgtgtgtgcacgtgtgttcatgtgcattcgcgtgcatccttctctgtctctgtgtgtgtgcctgtgttcttcccttctcccctgccccaccctgacttctcagaaagctgcatcgctgacagtctgcaggctggctggccggcccatctgctttttattttatttttttaactatgagaacacacaggcccggagagccactgctactaaagcaactccattgggctgcattaagatgaacagagtgctttttaatgatgaaagcagggagctcctttccatttgcaacttagcctgaatgtggggtttctctggctgttcttttgacctagcagtagagtggagcactgccaagtccaaaaaactagagcaggaggtacctcttggagcaacggtgtgtttatttctgtttttttttttttttaagtgaatggccaccaggcacatctgagtatctgttaagtttcatgcaggccttttcgttagtttgaaatgggaacggaagataacttttgatgatgcgatgtctcaaaaacagagaaactttgttccctctttccttatgatcaggtttgagaaattcttcaaaaaattaggtgaagttgagttacatatttctgttggttggttctctttttcattttatgaaaacagaaaagaataagtggtgagcagcctcctgaaagcatctgcagctactccctctgctcctttctcgccgagcgttacctgtgccaggccgtggcgcgttacagcaccaggccatcactgacagaaacgtttacttaacgaatgttcttaaaccagtgtgtacttcaagcgtttccttttgtttctctgtgttgtgtatttcctgtgtatgtggttttgcttaggcaggtataacttagcgaagacttttaagtattgcacctttttttgatttttgacctcttccccccaccttgtaattttgcttttttaatttcggtatttaaatacttttttttttttttaagcatcaatgtagtagtactctgggccgaacaggggtcaacgtttaatctacagttatcaccaacatgtatgtacttatgtcggaatcaaaatgtatcaaactgcttattgtgaagagaattatagcagacctgaagggggcgaaaaaccagatagggtggggggatggatgccggtgacgtgctagcacttgtgtggacatcccagtctgcattatgctgtttaacataaagtgccgacattttgtaccagcaaatacctgcccattccaacccttggtgggagcagacctctactgtcctctgtaacttgctgctattgaggacaagggagtttttctttctttagcgtcttcagtgaaggatacaatacaacaatgcctaatgtatttgactttttagcttgtgtctgtgtgtaggtgggtgggtgggtgtgtataggaaaagcctaaaacaagttatttgcatttcagtggttttgtgagacaaagaatgggaaattctgtagcccttctggcttaccctgttgattataaacctagcctcaaaagagattgacaggcatgactcaagtgagtgttcacatatacaagcctgcatgagccctctgtgggtaggtggtcacacttggcatctgcagcattgacgtggccccgctgggtgccttgagcatgccctcttcctgctctgcaatttgaatcaccaccgtgccccttccaccactgttccccatgcaaaagctctgcttccagcagcccccactgaccgctctctgtgtggagcaaagtgctgtcgtgcggtgaccaccaggtgaagagcagcttgtattcagacatctagagaaggttaaatcttagtgtccctgggccaggagcatatcccaaggctcctgcgagccagtggcgaccctgtccactgccgctcttggttcactgctgtgtcctgccccaccctcctctcctcctgcctgttggttccttgacctgcactatgggttagttgagttccttacgatactacggtgaaagccgggtgctagagcccctcttgtttacaagacataatgagggatttgaaatatgtaaaaataaacatgagaagctaaaatgttcttccatcataagcttaaagggaaaaaaactaaaaactttaaaaaaaaaagaccaaaaagtgcgtatatatatacatataaatatatattttagatgaagactaactctgggagcatttaacagtgttttttgtttctgtttttaacatttgttttcctgctttaaaatttgcaagcattctcaggaattctagggtaggaagccagttttttgaagatggtttatttaaccatatcttatcctagagagatggctgtttctttcctgttaataaacttttacaagttcctgaaacttcagaaagtttaaacaatttttacttaaaaaaatgtaaaaagaaaagtctccaaacattattgtcatactggggatcacacattttaaaacacatagaaatattttttaaaaattatcaatttagcagcaacaggtaaattcattatcttaaaaatatgggagaaggattaagctttgtaagagctcgatcatggattcttttgaaattgtgtgtagtttaatgggagagtgtttggtgtatatagatgagaatgccatcactttgttcctttccatttgagactgaactgaaatctcccctagtaatttttatttttttaaaggaacccttctccttgtccccacaaccccagcaacaaaagaaaggaaggaaggaagaaacaacagcttaaaaaaaaaagtaatctgtaaaatagtacagttggattgctgagaatctatgtaaagagttaggaaatataggttaataatttttggaacaaattttaaatataggcattactagaggaaaattatctatggactgtcctattaatgaagaatgtctgtcttacctccgtttgttttgggaggaggagaaaatatagaagaatctaataaggaacaagtgattttacttttttagctcccagctactgttgtgctcgttttaattgctgttttgaagatctgctgcttaattatccccatcccttagccggagatgtggagtgtttcctttcagtttttggtgatgttgaattcttttgtattccctcctggggccaggggtcagaattcccaagcatgaccacagcttcttttaaacattaagcttcccagtgggaaggaaactccagctcgacaggtaaagggagtgggtggggttgctgcctgcaatttctctaaaaccgctttagtgccttcgtacatacacccagacatcctgagcaagggggacgcacatgtgtgtgtgtgtggtccagtcactccacagatgtaagatactcacccataaaggaaattggagtggttctggacaggccccaaaggcagtgggctgaatttaaaataaataaacaaacgtcaagcaagttaatatgcttatgtctcagtaatgtagaatgccaagttccttcctgtgtcgtgtgccctccattactgtgcattgattcctccaggtgtgtaattgtgacaactgcagtgatttggaaagtctctttgtcttgggcaaatagaaggggttcctgttgttctgctcttgtccttcgtctcctccccttttcccccagacctcccccttctttttgtcaacttgctgggagctttgctttattggttggcagtgacctaagaacaggatatggtgaggatgtcatggaagagaagagctctttccgtggtattctttggcaagagccatgtctactaagaggttagatgacttcagtatacttataaaattcagtgagagtgccttcttctcttctaccacactctggcatagatacaggcttgctggtcacctctcattacatagatttattttaaaaacattttgattatgttaatttgagctttcccttttttttttttaactactttttaaaacacttgattactagtggcttagaggtgtgtacatctcctgaacatcacaaacttggtttctacctaccacacgagtagccaaaagaaaagaagcactaatagagaaaggggtgtctcacaccagacagaggacctctgctgtcaattagatccagtatcatgacctaactttaagtgtggaaaagagttcagatctctgagacactgtgaagaaatggatggctcatgtaacatctctgatccctcagtccccaaccctggacgtgtttcatttacaacattcataggagttaacttagcagtgttgcaagttaaggttccaaaccaaattatttaatcagtgtccccccaataaatcacttatccatttattgctagttagttttatttatagcaacttgatttcctatgagtatggctcctgttgtaagaattttcccacctcttctgacatgaatgtagcataagttagcaatcggttcttccaaactcctgtgggttgaatatggtatagaaggtatgcaagaggaaaaagaaaggaaaagataaaactcctgcctgagaatttggaagcacctttattaacacatatatctcgcagaaactagaagctcataggctgttaactttttgcaactattcactcatttttaccacttttttttttgggtgagggggtgatttttgtaaggttaacagccagattccattttgacctcagatgctgtgtactttttaatttcattttttatattctgccatcttgactcttctctaaaacagaatgaaaatgtctgcatgctgagcaaaatgcttacgccaagcctgtttttctctgcagagtaaacaggatgttttcagcagacttggctctaatagccatctctaagattagggaacaattgagtctttatgtagaaaagatccattttttccccatcctcagagttaaaattcaacatttaaagctttatcggttattgttttagatttgagatttttgtttttaagtatctataagatctttagaagtgagataaatttttcgctggttaaaaaaaatcaaactttcctctgcagtgtttttgccaagttttgtcacacttcatgtgtatgcattaactatacttcttagtgttactgcaaaaaaaaaaaacaaaaacaaaacaaaaaaaagccttgttctttaattgtgtttttcctcctgtgagtggacaactaaagccgcgtgatgatgcggatgaaaatattctggtctgtgtgtatacaatgaattgtcagtcttcagacctcatggtcgttaagaaaatagggaactcacaaaccctgctgcgcactacatttacttctttatctgcaagtacagggagtccatacagtcaagaaacacacagatacacataatgctattgaggacattgtcattctgtaagaaaacagaatattatctagatttccagagttagtgcagaccctgtgataacagtctgtgggtttgtggccagcgccaaaggtgtgtgtattttcagaaatggtccctatttgtcagtgatagtgttttttttttcttaagtttgacaaagggggtggtaatatcacattctttagatttgaaataattatcagctccaagaatctgtgaacatagtaataacaataaaaattcaacatcgaccctccctaacctgctcaccatacctccccaccccatgcctctgaagaaagaggccatgaacctacgaggtggtaaagggggacacaggtcagggagtggagagctactcctccagcagctcagcacccacactgcccgcatgcgtgtggccaccgggaccagatcccgagtgattgtggcatacccctaatatttgagtagtttttaagctgtcagtctcttgtcataacctcctaccgccacccaaaaaagtaacgaaagttgcagtaactgccagtgtttgcctcaccaaatttaaatcgttcccttttcagttagctatatacctgaatttgtttttaacaagaaactgtacatggccaggaaaaatggtactaccttggccaaagggtctttgcaaaaagctcagtcttcagttcttcactgtgacaaatgcttatcttgttcatgggaggggaaagatcagataaataggcaagaagtactctgttttaaataaagaataaatagtgtccgtttaaagcactttgtgcctcaacttcatttttaaactgtaaatcattgctttggaaataaattcccaattataattgacccatatctagccaatatcaacaagttgggatggtttttgtttttttcttttttttcaaaaagggaaattcctctttactgctcacagtaagctgcaaaagaaagttgtcaaggtggcttatgatgctgttgtagcagagctgtgaaaggaagtgctttgctttctctcccgccttccggaatctggcgttccttccccttcggctactgaaaggtgtgtacaactcccagaggggtggctgtaaaagttgactggaggcaaagtggagtggccttattgccaggactagccctacagaagagctttacagagaggaggacagtacatcctatgtgtgttcgccaaaaatgggaaaggtgggtatttaggcaaaacaaaataaaaacctttggaaccctttaagaagttacataccttttaaaggtagtatagtttctcaccaagtgatgcattttagcatgacacttcttgccagaaattttgggataagttggaataaatgtgtttaaaacatcatccaccgccctttttaaattttgtctaaggaattacttaagtatagtatttctgaatgtgcctttgtgagtacagagaccgtccgttctaggaagaagctatccgttggatacaaacaaacagacggtcagctttagtcattagggaagtcaaagttcctcctggaagtcccaggagcagctgttgagatttcattagcatcaatattgcacagtgtagagttgagtggaagagattctgggacttgggagaggagacaggggaaggtacccaggcgacgcagacccacgttagtccaagagcgcaggtttacacatctgcattccctagttttctccgtctgtatgtttgtgctcatgtggctttggctgttttgttttttgtttttctgtaagcactggagaattggaatatggtgatacttgtgacacattcatgcatgtaaacaaggcattttccagcttctgccgtgtgcagagcgggcagcacgcttttaccctttgagtctgtgtcctgaggcggccattacattcccacatgggcgtcacatcacgttgctgttgatgcaaacagggtattacacacaaggaaaaggggttttgaagagttaagattgaagtgtttgagaaagaaaagagaaaaatctgaaatcatattttatttcttcagagctattatagttgaacacagaaatctgcagtgtctttatttgtttttatgttttaaacaatttcacctcttctccccactcctatcttctaaagaaatatcaagcaaatgctaagggccatttccatgattcctcagagctcccccaaagaggagaacagtccctcccactcgattccttcagcttcattcaggaagacacagggaggagagatgctgcttctgcgctttgctctcattcctctctcatggccttgaaatgtattattatgcaaatgtgaattttgatactgaatttaagaagaggttgttggatttttttttttttttttttttttttcaaaaaaaaaagtcccacatgtggtcatcgtcgcttctttatgttgtaaggtgaattgtaactatgcattctgcaaagggggtggggaggagagggcagaaaggggaagggagtagcgttgcatccttgttcttcagtttctgtgtccatggtgtccccgtgtcctggaggggaaggggagtgagagacgaatgtggtaaggtcagcacagtgagatagagacctctgagtcctcttgccactgttgctggcaggtctgatggccaggtaaattccagggggcctgcagttcctgtcaaccaatgtggttcaggattcttgatcctagccgtgcagtgttaatccagtgcagcaatggaactccacaggctccagtgttctctggaaaaagtactcatcctttcctgaattcagagcccttcaagctcaggaaaccacgcttcactcgtgctgacctgaaagttaatctttaggtcgattttgaaaaactccgcctcctctctcctttttaatatttctttcttcctttttaatcatgtttaagtgaacttactcttagttataaggaactgtcctgctttgtggggaagagggctgttgcttgtcaggcaaaaaagttttctcttcctacccaccatccctctctctgcttcccttgcatttggcaggctgtatgaagccaatgagctgcgaggtgttttgacaggggaggtctgcatgcagcctcttctttgtcctaacaattcctttgttgatcttgcctgtgatgaatcatagcgcctgcattgctctggtctaggcattatttgcaacacacagtatcgtaagcgagagattgttctgcctatattcagtgttttccatgcagcaattcttcttgttgacgttcacagtactgtaacgagtaacagacttgatcacagtctcctcgtgcctgtgcagggctgcacaggcatgatcttatcagggttccaatctgttagattgcctttaaacaaaaaaaacaacaaaaaaataaaatcctgacgtttcaactgtctcacacaaaataatacctcgaggtacatttccccctgcaatgtaaacccttaactcctctctcctttctgacatcagtggattatcctttttaaaatatgaacatgtaaatagcaggataactttaaaaaacattttctttgctgtgaaagtaaccctaaaatatgttttcttcttttgtatttttttggtttttgtttttaagccatcagaagtttcagatctttactctttcatgtttaagaagaaagagcagaggaggtcgggggagccggtttgcatttgtgttggaggggtgttatctccattgcctcccacacagtgacagcagaccagtatgtaaaccctgtcttggctgggcgcggtggctcacaccagtaatcccagcactttgggaggctgaggcaggcagatcatctgaggtcaggagtttaagaccagcctggccaacatggtgaaaccccgtctctactaaaaaattagccggacgcagtggcgcgcgcctgtggtcccagctgctcgggaggctaaggcaggagaattgcttgaacccgggagacggaggttgcggtgagccgagattgcaccactgcactccagtgtgggcaacagagcaagacttcgactcaaaaacataaaataaacaaaagacacacacacacacaaaaaccctgtcttaaatagctgccatctcttccagcaatctagtgccagggtaagaagtgtctgaatttctctcttccagcagatccatcccctgcagggactccagaatgttctccacacaatacctggagctctcaacctttcttggttcagacacacacatacacaccccttgagtaactcagtatcattttgtagttcacagaaggatgtagtccctggcattttggtttgcactgtagaatccatagccttgtcactttgttatgctctggaaatgtactgatttcttacttgggaggaaacttgtgtaaggagatgtgcaaaccaccctgaaagccatgtgcatcctcacctcttccattaccccctccatgagctcgaagcgacattaagtagagggaaatgcttttaacaaatgctgctcatgtggatctgtcagctattgcttgcctagatttgggcacccatgaagcagggttggaatggatcattttgaattgcttctttgcagacacccccttcgcccccatctttaagataaaccctttactagtcaagaagcccttttcagttggatctcactgatcttgtatagtgacgacttcctttgaaggaagaagcttgattataagtgcatgcatattatccacccaccttctgatttgggcactgttcaccttggaattttatttattttgtttatctggaggccctttttctatcagtctctgatccctcatgggttctgcctgcccttgtatctcttgtacaatgctcccaaagggctttgctgatctctgcacttctttcctgggacactccccccaccaccaccctttgcacacaccagtgaccaaagtgtatgcagtgatctcacagaagacatcaaaaatggtgcatgcaccgtgaatgtgctcacagagacacgtgcacaagattctgcacccttggccttaatctcagtatgacttaaggtgcaggaacatttttaacaggttttaaaaaaacaaaaaacccttctgggaggaaaaaaataaaaagcagatacaacagctcaactgttcccactcctaactctccactatgtgcttataacttcacattctatgccctccccgccacccacctcatccctgttctgcgtaaccaaaaaacagacaacaaaagcaacctgaggagaggtttctggactattttatctgtctccatttagatggagatataaatgctgctttgggttccataatcctagggggctatgtttacatagtaaaatacatcctaccaaatcaggaaacagtgaataatgggagtcacttcacagagacgcaggaggacctggggggcgtagcagaggaggataggtagagaagtaccattttaattatttgtgacttgtggcttccttcctcctctcctcctccctccacgtctctctttgccccctttagacagaaggtgcagaaaagggcatcaaaaagaggctggattttttaaaaggcagctttccaactttgcacacaaacaggtaacaggaaggtacagcaaaaatcctctcatctgaaacactgtcagcagaaacaaaacctgtaaaaatgactaatcagctgcacatattgatgctctctgcaagttacctttaagtgttttttttttcttatacttgaagttgcttttacgatattattttggtggctttcttttctctctttgatgggcaatagaggaagtagataatgggatttaaggacgcctgggggagaaaagggaggatgtggcattgtctttttttttttttttttttttttttttagcatagaggtttaatcaaactcccatatgttgaaattgctcctcatattactggttttacatggacacagaaactaggcactttagaggtgcacttgcatggcaggctgggcccccttttctatattttattttcctttttagtatagtggtacttaaaatcactggttcacttaaaaaaacaaacaataaaatgttaaactctactaatgtacaaataagctgaaaagttgcattttatgtgtattttttgccatagcaggtactgtatttctcatgctggatttcaaaaaaaaaaaaaaaagtatcaaaaacaaaaaaaactaaagggtggtgttttattggattgtgacaggttgagtaataaggaattaagtcgtcgtcatttcattaaaactgagagatgatgtaatgcatatataagagttttctgaagggttttttttgggcttttaaacagcttatttttgtttttgtttagtttttttattttattttattttggaaagatatgattgtattatgtgcaactcagttgcttacattataactacaaaatatttttgggttcctggaaaaaaaagaaaaaagactaataaatgtgtttggctgctaagc

SEQ ID NO: 61680 - protein, 267 aa, Artificial Sequence
  derived and/or modified sequence
MAGAENWPGQQLELDEDEASCCRWGAQHAGARELAALYSPGKRLQEWCSVILCFSLIAHNLVHLLLLARWEDTPLVILGVVAGALIADFLSGLVHWGADTWGSVELPIAFIRPFREHHIDPTAITRHDFIETNGDNCLVTLLPLLNMAYKFRTHSPEALEQLYPWECFVFCLIIFGTFTNQIHKWSHTYFGLPRWVTLLQDWHVILPRKHHRIHHVSPHETYFCITTGWLNYPLEKIGFWRRLEDLIQGLTGEKPRADDMKWAQKIK

SEQ ID NO: 61681 - DNA, 804 bp, Artificial Sequence
  derived and/or modified sequence
atggccggcgccgagaactggcccggccagcagctggagctggacgaggacgaggccagctgctgcagatggggcgcccagcacgccggcgccagagagctggccgccctgtacagccccggcaagagactgcaggagtggtgcagcgtgatcctgtgcttcagcctgatcgcccacaacctggtgcacctgctgctgctggccagatgggaggacacccccctggtgatcctgggcgtggtggccggcgccctgatcgccgacttcctgagcggcctggtgcactggggcgccgacacctggggcagcgtggagctgcccatcgccttcatcagacccttcagagagcaccacatcgaccccaccgccatcaccagacacgacttcatcgagaccaacggcgacaactgcctggtgaccctgctgcccctgctgaacatggcctacaagttcagaacccacagccccgaggccctggagcagctgtacccctgggagtgcttcgtgttctgcctgatcatcttcggcaccttcaccaaccagatccacaagtggagccacacctacttcggcctgcccagatgggtgaccctgctgcaggactggcacgtgatcctgcccagaaagcaccacagaatccaccacgtgagcccccacgagacctacttctgcatcaccaccggctggctgaactaccccctggagaagatcggcttctggagaagactggaggacctgatccagggcctgaccggcgagaagcccagagccgacgacatgaagtgggcccagaagatcaagtag

SEQ ID NO: 61682 - DNA, 804 bp, Artificial Sequence
  derived and/or modified sequence
atggcaggggctgagaattggcccggccagcagctcgagctggacgaagacgaagcctcttgctgcaggtggggcgcccagcatgcgggagcaagagaactcgctgcactgtactcccctggcaagagattgcaggaatggtgtagcgtcatactttgtttcagtcttatagcacacaacctagtccacctgctgctgctcgcacggtgggaagataccccgctggtcattttgggggtggtggcaggcgccctcatcgctgatttcctttctggattggttcactggggggctgatacctggggaagtgtggagctgccaatcgcattcatacgcccttttcgcgaacaccacatcgatcctactgcaatcactcgccacgactttattgagaccaacggggacaactgcctggtaaccttattgcctctcctgaatatggcttacaaatttcgcacccattcccctgaggccctggagcagctgtacccttgggagtgtttcgtcttctgccttatcatcttcggcacctttaccaaccagattcacaaatggagtcatacgtattttggcctccctaggtgggtgacactgttgcaggattggcacgtaattctgccacgcaaacatcatcgtatacatcatgtgtccccacacgaaacctatttttgcattactacaggttggctcaattacccattggaaaagattgggttctggcggaggctggaagacttgattcagggcttgacgggtgaaaagccacgggcggacgatatgaaatgggcccagaagattaaatag

SEQ ID NO: 61683 - DNA, 804 bp, Artificial Sequence
  derived and/or modified sequence
atggccggggctgagaactggccaggccagcagctggagctggatgaagatgaggccagctgctgccgctggggcgcccagcacgccggggcccgggagctggccgccctgtacagccctgggaagaggctgcaggagtggtgcagcgtcatcctgtgcttcagcctgattgcccacaacctggtgcacctgctgctgctggcccgctgggaggacacccccctggtgatcctgggcgtggtggccggggccctgattgctgacttcctgagcggcctggtgcactggggcgctgacacctggggctctgtggagctgcccatcgccttcatccggcccttccgggagcaccacatcgaccccacagccatcaccaggcatgacttcatcgagaccaatggagacaactgcctggtgaccctgctgcccctgctgaacatggcctacaagttccgcacccacagccctgaggccctggagcagctgtacccctgggagtgctttgtgttctgcctgatcatcttcggcaccttcaccaaccagatccacaagtggagccacacctacttcggcctgccccgctgggtgaccctgctgcaggactggcacgtgatcctgcccaggaagcaccaccgcatccaccacgtgagcccccatgagacctacttctgcatcaccaccggctggctgaactaccccctggagaagattggcttctggaggcggctggaggacctgatccagggcctgactggagagaagcccagggcagatgacatgaagtgggcccagaagatcaagtag

SEQ ID NO: 61684 - DNA, 804 bp, Artificial Sequence
  derived and/or modified sequence
atggccggcgccgagaactggcccggccagcagctggagctggacgaggatgaggcgtcttgctgccggtggggtgcacagcatgctggcgcccgagaactcgcagctctctactctcctggaaaaagattgcaggagtggtgcagtgtcattctttgtttctctctgattgctcacaatctggtgcacttgttattgcttgctcgctgggaggacacacccctggtgatcctgggggttgtggctggggctctgattgctgacttcctttccggtctggtgcattggggagccgatacctgggggtccgtagaactgcccatcgctttcatccgaccttttcgcgagcatcacatagaccccactgcaattacgcgccacgactttatcgagaccaacggagacaactgtttagtgacactgttacccctgctgaacatggcctataaattcagaacacactcccccgaggcactggaacaactctatccttgggaatgttttgttttttgtttaatcatatttggcacgttcaccaatcagatccacaagtggtctcacacctattttggcctgccccgctgggtgacacttctgcaggactggcacgtaatattaccccgcaagcatcatcgaatccaccacgtgagccctcatgaaacgtatttctgtattaccactggctggctaaactatccactcgaaaaaatcgggttttggagaagactcgaagacttgatccaggggctgaccggagagaagccccgggctgacgatatgaaatgggcacagaagataaagtag

SEQ ID NO: 61685 - DNA, 804 bp, Artificial Sequence
  derived and/or modified sequence
atggctggcgctgaaaattggcctggtcagcagctggagctggatgaggatgaagctagttgctgccggtggggagcacaacatgcaggagccagagagctcgcggctctatacagccccggaaagaggctgcaggagtggtgctccgtaatactttgtttctctcttattgcccataatctggtccatttgctgctcctcgccaggtgggaagatacccccctcgtcatcctgggggtagtggcaggcgcactgattgccgatttcctttcgggtctcgtgcattggggcgctgacacatgggggtcggtcgaactccctattgcgtttatcaggcctttcagagagcaccacattgacccaacggcaattactcggcatgatttcatagaaaccaatggggacaactgtcttgttacattgttgcctctcctcaatatggcctacaaatttcgcacgcatagcccagaagcccttgaacagctctatccatgggagtgcttcgtgttctgtctgatcattttcgggacatttacaaaccagatacataaatggtcccatacttatttcggcctgcctaggtgggtgacactgttgcaggattggcatgttatccttccgagaaagcaccacaggatccatcacgtaagtccccatgagacctacttttgtataaccaccggttggttgaactatcctctggagaaaatcggcttctggcgccgattagaggacctaatccaaggactgaccggcgaaaagcctcgagcagacgacatgaagtgggctcagaagataaagtag

SEQ ID NO: 61686 - DNA, 2222 bp, Artificial Sequence
  derived and/or modified sequence
gctgggcggtcattgggcggcgtgatctcgccgcggttccgcggccctgccgccgccgccgccagcagagcgcaccgggccgatcgggcgagtggccatggcgggcgccgagaactggccgggccagcagctggagctggacgaggacgaggcgtcttgttgccgctggggcgcgcagcacgccggggcccgcgagctggctgcgctctactcgccaggcaagcgcctccaggagtggtgctctgtgatcctgtgcttcagcctcatcgcccacaacctggtccatctcctgctgctggcccgctgggaggacacacccctcgtcatactcggtgttgttgcaggggctctcattgctgacttcttgtctggcctggtacactggggtgctgacacatggggctctgtggagctgcccattgctttcatccgacccttccgggagcaccacattgacccgacagctatcacacggcacgacttcatcgagaccaacggggacaactgcctggtgacactgctgccgctgctaaacatggcctacaagttccgcacccacagccctgaagccctggagcagctatacccctgggagtgcttcgtcttctgcctgatcatcttcggcaccttcaccaaccagatccacaagtggtcgcacacgtactttgggctgccacgctgggtcaccctcctgcaggactggcatgtcatcctgccacgtaaacaccatcgcatccaccacgtctcaccccacgagacctacttctgcatcaccacaggctggctcaactaccctctggagaagataggcttctggcgacgcctggaggacctcatccagggcctgacgggcgagaagcctcgggcagatgacatgaaatgggcccagaagatcaaataacttctccgagcctgctacctggttgccaaccttccctagcccccaaaccgaagccatctgccaaattccagcctctttgagctggcccctccagatggagaggacatctcctgggctgggcccaggtaccccagcccacccctcatgacacagaatacttgagccactgatttttcatttcttttttttttttttcctcggcccctcctcagccacctgagttgctctatctgcaagcctgactctgccagcctcccctggtagagaggaggtttacccactccctgcacgcctgccgtccctgccccgctgggcagcccttcagtgtggctggcgttggggccagtgagttgcctctttccctccttgtctggccccagtggtctggggagcccccaggcacacctaagcgtcgtggagcattgttctgccacagccctgcatactgaccccgggaggctgggcaggtggacagccccagccaccaccttcagcctagcctgtcccccaaggatggtgaagctcagcaggggtctgagggtagccggccagaagaggctggaacctcctgctcaagtctagacccctacttctctgctgcccccaccctgccagagctgatgtttccaataccaagatgtcttcacagggcacagcccctgcagagcatcttggtcatttggaagaggacacggtatcccctctggccagagtatgtcagagaaggaagagtagggcttttttgttttgtttttttttaaaggtgcttgcttgtttaatgtaaataatagaaagccttaatatcttttctgtaacacggagtaatattttaatgtcatgttttggatgtacataatatatttataacaaagcagcaagagtctacttaaccttggctgcctcgtggtgtttcctggctgggtggggtggggggtatcaaggagcctgggacgtgaggccccactctcgccccattcccagctccccccaaccctggcctcaggatgagagctgtcacctgagacagtgaattaatgttgacatctgctccaaagccttttggaggggattgggtgaggacagtggtctttcctgttgatcatgatgataaagtaatgatggctgatccctatttgtgacttccttcagcaaatattcactggcacctggtgtgtgccaggctctgtcctgtacacaggtacagcggtgaaagaaccaacaaagacctatcctggtggagctgacctcctgggaaaagagtcaataaacaaataaatgcacatggaaattcaggtggtgatttgtgaagaaaatcaaacag

SEQ ID NO: 61687 - DNA, 234 bp, Artificial Sequence
  derived and/or modified sequence
atggtgagagagctgtggatgtggaacgtggaggaggaggagcacgaggtgggcatctgcacctggggcggccagcactgcggctgccccgccaagagcctgcccggcccccaccccggcggcgtgagcgccccccagagcgccagccagctgatggtgaagctgctggtgtggcagaagagcgtgcacaagctgagaaagaacagaaacgcctacagctgcggccccctgtag

SEQ ID NO: 61688 - DNA, 234 bp, Artificial Sequence
  derived and/or modified sequence
atggtcagggaattatggatgtggaacgtggaagaagaggagcatgaggtgggcatctgtacttggggcggacagcactgcggctgccccgctaaatccttgcctggccctcatccaggaggcgtgtcagccccacagtctgcatcccaactcatggtgaagctacttgtgtggcagaagtccgtgcacaagctgaggaaaaatcggaatgcctattcctgtggcccactttag

SEQ ID NO: 61689 - protein, 1515 aa, Artificial Sequence
  derived and/or modified sequence
MTEVQAMVEFSVELNKFYNVDLFQRGFYQIRASMKIPSRIPHRVEASLLHATGMTLAFPASVHDSLICSKTFQILYKNEEVVLNDVMIFKVKMLLDERKIEETLEEMNFLLSLDLHFTDGDYSADDLNALQLISSRTLKLHFSPHRGLHHHVNVMFDYFHLSVVSVTVHASLVALHQPLISFPRPVKTTWLNRNAPAQNKDSVIPTLESVVFGINYTKQLSPDGCSFIIADSFLHHAYRFHYTLCATLLLAFKGLHSYFITVTEEIPSCQKLELEEMDVEARLTELCEEVKKIENPDELAELINMNLAQLCSLLMALWGQFLEVITLHEELRILLAQEHHTLRVRRFSEAFFCFEHPREAAIAYQELHAQSHLQMCTAIKNTSFCSSLPPLPIECSELDGDLNSLPIIFEDRYLDSVTEDLDAPWMGIQNLQRSESSKMDKYETEESSVAGLSSPELKVRPAGASSIWYTEGEKQLTKSLKGKNEESNKSKVKVTKLMKTMKSENTKKLIKQNSKDSVVLVGYKCLKSTASNDLIKCFEGNPSHSQKEGLDPTICGYNFDPKTYMRQTSQKEASCLPTNTERTEQKSPDIENVQPDQFDPLNSGNLNLCANLSISGKLDISQDDSEITQMEHNLASRRSSDDCHDHQTTPSLGVRTIEIKPSNKDPFSGENITVKLGPWTELRQEEILVDNLLPNFESLESNGKSKSIEITFEKEALQEAKCLSIGESLTKLRSNLPAPSTKEYHVVVSGDTIKLPDISATYASSRFSDSGVESEPSSFATHPNTDLVFETVQGQGPCNSERLFPQLLMKPDYNVKFSLGNHCTESTSAISEIQSSLTSINSLPSDDELSPDENSKKSVVPECHLNDSKTVLNLGTTDLPKCDDTKKSSITLQQQSVVFSGNLDNETVAIHSLNSSIKDPLQFVFSDEETSSDVKSSCSSKPNLDTMCKGFQSPDKSNNSTGTAITLNSKLICLGTPCVISGSISSNTDVSEDRTMKKNSDVLNLTQMYSEIPTVESETHLGTSDPFSASTDIVKQGLVENYFGSQSSTDISDTCAVSYSNALSPQKETSEKEISNLQQEQDKEDEEEEQDQQMVQNGYYEETDYSALDGTINAHYTSRDELMEERLTKSEKINSDYLRDGINMPTVCTSGCLSFPSAPRESPCNVKYSSKSKFDAITKQPSSTSYNFTSSISWYESSPKPQIQAFLQAKEELKLLKLPGFMYSEVPLLASSVPYFSVEEEDGSEDGVHLIVCVHGLDGNSADLRLVKTYIELGLPGGRIDFLMSERNQNDTFADFDSMTDRLLDEIIQYIQIYSLTVSKISFIGHSLGNLIIRSVLTRPRFKYYLNKLHTFLSLSGPHLGTLYNSSALVNTGLWFMQKWKKSGSLLQLTCRDHSDPRQTFLYKLSNKAGLHYFKNVVLVGSLQDRYVPYHSARIEMCKTALKDKQSGQIYSEMIHNLLRPVLQSKDCNLVRYNVINALPNTADSLIGRAAHIAVLDSEIFLEKFFLVAALKYFQ

SEQ ID NO: 61690 - protein, 31 aa, Artificial Sequence
  derived and/or modified sequence
MTEVQAMVEFSVELNKFYNVDLFQRGFYQIR

SEQ ID NO: 61691 - protein, 505 aa, Artificial Sequence
  derived and/or modified sequence
MTEVQAMVEFSVELNKFYNVDLFQRGFYQIRASMKIPSRIPHRVEASLLHATGMTLAFPASVHDSLICSKTFQILYKNEEVVLNDVMIFKVKMLLDERKIEETLEEMNFLLSLDLHFTDGDYSADDLNALQLISSRTLKLHFSPHRGLHHHVNVMFDYFHLSVVSVTVHASLVALHQPLISFPRPVKTTWLNRNAPAQNKDSVIPTLESVVFGINYTKQLSPDGCSFIIADSFLHHAYRFHYTLCATLLLAFKGLHSYFITVTEEIPSCQKLELEEMDVEARLTELCEEVKKIENPDELAELINMNLAQLCSLLMALWGQFLEVITLHEELRILLAQEHHTLRVRRFSEAFFCFEHPREAAIAYQELHAQSHLQMCTAIKNTSFCSSLPPLPIECSELDGDLNSLPIIFEDRYLDSVTEDLDAPWMGIQNLQRSESSKMDKYETEESSVAGLSSPELKVRPAGASSIWYTEGEKQLTKSLKGKNEESNKSKVKVTKLMKTMKSEN

SEQ ID NO: 61692 - DNA, 4548 bp, Artificial Sequence
  derived and/or modified sequence
atgaccgaggtgcaggccatggtggagttcagcgtggagctgaacaagttctacaacgtggacctgttccagagaggcttctaccagatcagagccagcatgaagatccccagcagaatcccccacagagtggaggccagcctgctgcacgccaccggcatgaccctggccttccccgccagcgtgcacgacagcctgatctgcagcaagaccttccagatcctgtacaagaacgaggaggtggtgctgaacgacgtgatgatcttcaaggtgaagatgctgctggacgagagaaagatcgaggagaccctggaggagatgaacttcctgctgagcctggacctgcacttcaccgacggcgactacagcgccgacgacctgaacgccctgcagctgatcagcagcagaaccctgaagctgcacttcagcccccacagaggcctgcaccaccacgtgaacgtgatgttcgactacttccacctgagcgtggtgagcgtgaccgtgcacgccagcctggtggccctgcaccagcccctgatcagcttccccagacccgtgaagaccacctggctgaacagaaacgcccccgcccagaacaaggacagcgtgatccccaccctggagagcgtggtgttcggcatcaactacaccaagcagctgagccccgacggctgcagcttcatcatcgccgacagcttcctgcaccacgcctacagattccactacaccctgtgcgccaccctgctgctggccttcaagggcctgcacagctacttcatcaccgtgaccgaggagatccccagctgccagaagctggagctggaggagatggacgtggaggccagactgaccgagctgtgcgaggaggtgaagaagatcgagaaccccgacgagctggccgagctgatcaacatgaacctggcccagctgtgcagcctgctgatggccctgtggggccagttcctggaggtgatcaccctgcacgaggagctgagaatcctgctggcccaggagcaccacaccctgagagtgagaagattcagcgaggccttcttctgcttcgagcaccccagagaggccgccatcgcctaccaggagctgcacgcccagagccacctgcagatgtgcaccgccatcaagaacaccagcttctgcagcagcctgccccccctgcccatcgagtgcagcgagctggacggcgacctgaacagcctgcccatcatcttcgaggacagatacctggacagcgtgaccgaggacctggacgccccctggatgggcatccagaacctgcagagaagcgagagcagcaagatggacaagtacgagaccgaggagagcagcgtggccggcctgagcagccccgagctgaaggtgagacccgccggcgccagcagcatctggtacaccgagggcgagaagcagctgaccaagagcctgaagggcaagaacgaggagagcaacaagagcaaggtgaaggtgaccaagctgatgaagaccatgaagagcgagaacaccaagaagctgatcaagcagaacagcaaggacagcgtggtgctggtgggctacaagtgcctgaagagcaccgccagcaacgacctgatcaagtgcttcgagggcaaccccagccacagccagaaggagggcctggaccccaccatctgcggctacaacttcgaccccaagacctacatgagacagaccagccagaaggaggccagctgcctgcccaccaacaccgagagaaccgagcagaagagccccgacatcgagaacgtgcagcccgaccagttcgaccccctgaacagcggcaacctgaacctgtgcgccaacctgagcatcagcggcaagctggacatcagccaggacgacagcgagatcacccagatggagcacaacctggccagcagaagaagcagcgacgactgccacgaccaccagaccacccccagcctgggcgtgagaaccatcgagatcaagcccagcaacaaggaccccttcagcggcgagaacatcaccgtgaagctgggcccctggaccgagctgagacaggaggagatcctggtggacaacctgctgcccaacttcgagagcctggagagcaacggcaagagcaagagcatcgagatcaccttcgagaaggaggccctgcaggaggccaagtgcctgagcatcggcgagagcctgaccaagctgagaagcaacctgcccgcccccagcaccaaggagtaccacgtggtggtgagcggcgacaccatcaagctgcccgacatcagcgccacctacgccagcagcagattcagcgacagcggcgtggagagcgagcccagcagcttcgccacccaccccaacaccgacctggtgttcgagaccgtgcagggccagggcccctgcaacagcgagagactgttcccccagctgctgatgaagcccgactacaacgtgaagttcagcctgggcaaccactgcaccgagagcaccagcgccatcagcgagatccagagcagcctgaccagcatcaacagcctgcccagcgacgacgagctgagccccgacgagaacagcaagaagagcgtggtgcccgagtgccacctgaacgacagcaagaccgtgctgaacctgggcaccaccgacctgcccaagtgcgacgacaccaagaagagcagcatcaccctgcagcagcagagcgtggtgttcagcggcaacctggacaacgagaccgtggccatccacagcctgaacagcagcatcaaggaccccctgcagttcgtgttcagcgacgaggagaccagcagcgacgtgaagagcagctgcagcagcaagcccaacctggacaccatgtgcaagggcttccagagccccgacaagagcaacaacagcaccggcaccgccatcaccctgaacagcaagctgatctgcctgggcaccccctgcgtgatcagcggcagcatcagcagcaacaccgacgtgagcgaggacagaaccatgaagaagaacagcgacgtgctgaacctgacccagatgtacagcgagatccccaccgtggagagcgagacccacctgggcaccagcgaccccttcagcgccagcaccgacatcgtgaagcagggcctggtggagaactacttcggcagccagagcagcaccgacatcagcgacacctgcgccgtgagctacagcaacgccctgagcccccagaaggagaccagcgagaaggagatcagcaacctgcagcaggagcaggacaaggaggacgaggaggaggagcaggaccagcagatggtgcagaacggctactacgaggagaccgactacagcgccctggacggcaccatcaacgcccactacaccagcagagacgagctgatggaggagagactgaccaagagcgagaagatcaacagcgactacctgagagacggcatcaacatgcccaccgtgtgcaccagcggctgcctgagcttccccagcgcccccagagagagcccctgcaacgtgaagtacagcagcaagagcaagttcgacgccatcaccaagcagcccagcagcaccagctacaacttcaccagcagcatcagctggtacgagagcagccccaagccccagatccaggccttcctgcaggccaaggaggagctgaagctgctgaagctgcccggcttcatgtacagcgaggtgcccctgctggccagcagcgtgccctacttcagcgtggaggaggaggacggcagcgaggacggcgtgcacctgatcgtgtgcgtgcacggcctggacggcaacagcgccgacctgagactggtgaagacctacatcgagctgggcctgcccggcggcagaatcgacttcctgatgagcgagagaaaccagaacgacaccttcgccgacttcgacagcatgaccgacagactgctggacgagatcatccagtacatccagatctacagcctgaccgtgagcaagatcagcttcatcggccacagcctgggcaacctgatcatcagaagcgtgctgaccagacccagattcaagtactacctgaacaagctgcacaccttcctgagcctgagcggcccccacctgggcaccctgtacaacagcagcgccctggtgaacaccggcctgtggttcatgcagaagtggaagaagagcggcagcctgctgcagctgacctgcagagaccacagcgaccccagacagaccttcctgtacaagctgagcaacaaggccggcctgcactacttcaagaacgtggtgctggtgggcagcctgcaggacagatacgtgccctaccacagcgccagaatcgagatgtgcaagaccgccctgaaggacaagcagagcggccagatctacagcgagatgatccacaacctgctgagacccgtgctgcagagcaaggactgcaacctggtgagatacaacgtgatcaacgccctgcccaacaccgccgacagcctgatcggcagagccgcccacatcgccgtgctggacagcgagatcttcctggagaagttcttcctggtggccgccctgaagtacttccagtag

SEQ ID NO: 61693 - DNA, 1518 bp, Artificial Sequence
  derived and/or modified sequence
atgaccgaggtgcaggccatggtggagttcagcgtggagctgaacaagttctacaacgtggacctgttccagagaggcttctaccagatcagagccagcatgaagatccccagcagaatcccccacagagtggaggccagcctgctgcacgccaccggcatgaccctggccttccccgccagcgtgcacgacagcctgatctgcagcaagaccttccagatcctgtacaagaacgaggaggtggtgctgaacgacgtgatgatcttcaaggtgaagatgctgctggacgagagaaagatcgaggagaccctggaggagatgaacttcctgctgagcctggacctgcacttcaccgacggcgactacagcgccgacgacctgaacgccctgcagctgatcagcagcagaaccctgaagctgcacttcagcccccacagaggcctgcaccaccacgtgaacgtgatgttcgactacttccacctgagcgtggtgagcgtgaccgtgcacgccagcctggtggccctgcaccagcccctgatcagcttccccagacccgtgaagaccacctggctgaacagaaacgcccccgcccagaacaaggacagcgtgatccccaccctggagagcgtggtgttcggcatcaactacaccaagcagctgagccccgacggctgcagcttcatcatcgccgacagcttcctgcaccacgcctacagattccactacaccctgtgcgccaccctgctgctggccttcaagggcctgcacagctacttcatcaccgtgaccgaggagatccccagctgccagaagctggagctggaggagatggacgtggaggccagactgaccgagctgtgcgaggaggtgaagaagatcgagaaccccgacgagctggccgagctgatcaacatgaacctggcccagctgtgcagcctgctgatggccctgtggggccagttcctggaggtgatcaccctgcacgaggagctgagaatcctgctggcccaggagcaccacaccctgagagtgagaagattcagcgaggccttcttctgcttcgagcaccccagagaggccgccatcgcctaccaggagctgcacgcccagagccacctgcagatgtgcaccgccatcaagaacaccagcttctgcagcagcctgccccccctgcccatcgagtgcagcgagctggacggcgacctgaacagcctgcccatcatcttcgaggacagatacctggacagcgtgaccgaggacctggacgccccctggatgggcatccagaacctgcagagaagcgagagcagcaagatggacaagtacgagaccgaggagagcagcgtggccggcctgagcagccccgagctgaaggtgagacccgccggcgccagcagcatctggtacaccgagggcgagaagcagctgaccaagagcctgaagggcaagaacgaggagagcaacaagagcaaggtgaaggtgaccaagctgatgaagaccatgaagagcgagaactag

SEQ ID NO: 61694 - DNA, 6415 bp, Artificial Sequence
  derived and/or modified sequence
gctggaggggcagttgaagctcctgaagggcggggcacggagcttgaaggggcggggcctagcctcagagaggggagggaagaggcgggaggaggaggtgagagaggccgggggcggggccgtgcggccggggacctgttgatcgcaggtatagccggctggcccgggctccctcgggactggggcgactgcgcatgctcgctggccgcgctgggccagtagccgagccgcggtgacgaaccggctccgcggttgcggtgtttgcggttgctgtgatggcgatgtgagggggcccggggcgggatggtgctgacccgggtcgggccgtcttcttgcagctggacaacgagctcctccgttcgacaggcgggggaagaggccgagccgggcgagagggttgaagatcaactggattatgtatttggttctggaatctcaaagcagtccacaaacaaattcttccttatgttgtctgtgtcagggggaacggtgtatttttaacaacgggaatcagtaactggaagtacaagattggttatttaataatgttaaaaatgaggctttgaaaagcagaggtgctgttatcagaatagtcttctgggtataaattaaaaatgactgaagttcaagcaatggtagaattctctgtggagctaaacaagttctacaatgtggatttgtttcagagaggtttttaccagattcgtgcttctatgaaaattccatcaagaattccccacagagtagaagctagtttgttgcatgcaacaggtatgactttagcctttccagcctcagttcatgattctctaatttgcagtaaaacatttcaaattttgtacaaaaatgaagaggttgttttaaatgatgttatgatcttcaaagtaaaaatgctattggatgaaagaaagattgaagaaacccttgaggaaatgaattttctattatccttggatctacacttcacagatggagattattcggcagatgatctgaatgccttgcaactaataagtagccgaacattgaagctgcactttagcccccatagaggccttcatcatcatgttaatgttatgtttgattacttccacctttctgttgtgtctgttacagttcatgcatcattggttgcactacaccagccactaataagctttcctcgccctgtgaagacaacttggttaaatagaaatgcaccagcacaaaacaaagattccgtgattcctactcttgaaagtgtggtctttggtattaactacacaaaacagttatcaccagatggttgtagcttcatcattgcagactccttcctacatcatgcgtatcgttttcattatacactttgtgccactttgctgctagccttcaagggattgcacagctacttcattacagtaacagaagagattccttcttgtcagaaactagaactggaggaaatggatgtagaagctcgacttactgaactatgtgaagaagttaagaaaatagagaatcctgatgaactggcagaacttataaatatgaatcttgcgcaactttgctcacttttgatggctttatggggacagtttctggaagttataacgctacacgaagaactaagaatattattagcacaagagcaccatactttgagggtacgcagattttctgaggcattcttttgttttgagcatccaagagaagctgccattgcataccaggaacttcatgctcagagtcatctacagatgtgcaccgctatcaaaaatacttccttctgcagttctcttccacccttacctattgaatgtagtgaattagatggagatctcaattcattacctataatctttgaagataggtatttagattcagttactgaagacttagatgcaccctggatgggaattcagaatcttcagagatcagagtccagtaaaatggataaatatgagactgaagaaagctctgtagcaggactttctagcccagagttgaaagtcagacctgctggtgcctccagtatttggtatacagaaggtgaaaagcagctaacaaaatctctaaaaggaaagaatgaagaatcaaataaatccaaagttaaggttactaagcttatgaaaacaatgaaatctgaaaacacaaaaaaattaataaaacagaactctaaggattctgtggttttggtaggctacaaatgtttgaaaagtacagcatcaaatgatctcattaaatgctttgaaggcaatccttcacatagtcagaaggaaggtctggatcccacaatatgtggatataattttgacccaaagacctacatgagacagacaagtcaaaaggaagctagctgtttgccaactaatacagagagaactgaacaaaagtctccagatattgaaaatgttcaaccagaccagtttgatcctttgaactctggcaacctaaatctttgtgcaaatttgtccatttcaggtaaacttgatatctcccaggacgatagtgaaattacacaaatggaacacaatctggcatccagaaggtcatcagacgattgccatgatcatcaaacaaccccatctttgggagttagaacaattgaaataaagcccagtaataaagatcctttcagtggagagaatataactgtcaaactaggaccttggacagagcttcgacaagaggaaatacttgtggataatttactacccaactttgagtccttagaatctaatggtaaatctaaatctatagaaataacatttgaaaaggaagctttgcaagaagcaaagtgtctttctattggagaatcattaactaaattacgaagtaatctacctgccccttctacaaaagaatatcatgttgtagtaagtggagatacaattaagttaccagatattagtgccacatatgcctcatctagattttcagattcaggtgttgaaagtgaaccgagttcttttgcgacacatccaaacactgatttagtctttgaaactgtgcaagggcaaggtccttgcaatagtgaaagattatttcctcagcttttgatgaaacctgattataatgtaaaattttcattaggaaatcattgtactgagagtacaagtgctataagtgaaatacagtcatctttgacatccataaactctctaccctccgatgatgaactgtcacctgatgaaaattctaagaaatctgttgtacctgaatgccatctaaatgatagcaaaactgtattaaatctaggaacgactgatttgccaaaatgtgatgatactaaaaagtcaagtatcactttgcaacagcagagtgttgtattttcagggaacttggacaatgaaactgtagcaatacattccttaaattcaagcattaaagaccctttacaatttgttttttcagatgaagagacttccagtgatgtgaaaagtagttgcagctccaaacctaacttggatactatgtgtaaaggcttccagagtcctgataaatctaataactctacagggacagcaattacattaaattcaaaactgatttgtttaggcactccttgtgtcatttcaggttccatttctagtaatacagatgttagtgaagatagaactatgaaaaaaaatagtgatgtattaaatctcacacagatgtattcagaaatccctacagttgaaagtgaaactcatctgggtacaagtgatcctttttcagccagtactgatatagtaaagcaagggcttgtggaaaattattttggttctcaaagcagtacggatatttctgacacatgtgctgttagctacagcaatgcacttagccctcagaaggaaacttctgaaaaagaaattagtaatcttcagcaggaacaggataaagaggatgaggaggaagagcaggatcaacaaatggttcaaaatgggtactatgaagaaacagattattcagctttggatggaacaataaatgctcactatacaagcagagatgaactaatggaagaaagacttacaaaatctgaaaaaataaacagtgactatctgagagatggtataaacatgcctactgtctgtacttctggttgtttgtccttcccgtctgcaccacgagagtctccttgtaatgttaaatattcttccaaaagtaaatttgatgccattacaaagcagccaagcagtacttcttacaacttcacttcttcgatttcctggtatgaaagttcaccaaaacctcaaatacaagccttccttcaggcaaaagaagaactgaagctactaaaacttcctgggttcatgtacagtgaagttcctctgctggcatcctcagtaccttattttagtgtagaagaagaggatggttctgaagatggagtacatctgattgtctgtgtgcacggtttagatggaaacagtgcagatctccgattagtaaaaacttacattgaacttggattgcctgggggaagaattgattttcttatgtctgagagaaatcagaatgatacttttgctgattttgatagcatgactgatcgtcttttggatgagataatacagtatattcagatatatagtctaacagtctcaaaaataagctttattggacattcgttgggcaatttaataattcgttcagtgcttacaaggccaaggtttaaatattacctcaacaaacttcatacctttctgtctctttctggacctcaccttggtacactctacaacagcagtgctcttgttaatacaggtctctggtttatgcagaaatggaaaaaatcaggttcgcttttgcagctgacatgtcgagatcactcagaccctcgccaaacttttttatataagcttagtaacaaagcagggcttcattatttcaaaaatgttgtgctagtgggatccctacaggatcgctatgttccttatcactctgcccgcattgaaatgtgtaaaacagctttaaaggacaaacagtcaggacagatctattcagaaatgatccacaacttgcttcgacccgttctgcaaagcaaggactgtaatttggttcgctataatgtcatcaatgcattgcccaatacagctgattcactcattgggagagctgcacatatagctgttcttgattcggaaatatttttagagaaattctttctggttgctgccctcaaatatttccaatagtataaaagcattgttagcgactggacaattacctcattcaacaatgtttcaaataatgtattatattaaaatgtagatgctgataagttctaagaaatatttatacctttttatatggaagataatttatatcatccatgtttagtgctttttaaacatcaactttactttctaggtaatgtggctgtgcaatatttttttaattttatctttttacttttctattactttttcatatattttgctacctaagtatttcagtgaaactttaagcccatacctgtgtctgattgtttattattggctttccacaattcttacatcagactacattatattagagaccattattgctagaatagcatgggatttaaaattttctaatactgggggtattatttagttaattataaatttttcttttcacattttactgtgttttaactggaaataaaattatggctgctacaatatattttttgaaatcaacttctgtagttctaaaatacaactttatcatacaatcaaaccaggtagttcatataaaacagtgtaatacaagttttctataaagtcattactgttgcttaaacatatttcatgcctattaaaatatattttctactggtgatttcaacattatttctcatactgacttttattactggaaatgttcctgtacatgttggcagcagataaagatttttgaatgtttgaatgccctctgccttgatttggttggaatttttgctaaattggtaatgttgcttgaactttatgactacattttcttttaacttttttcatggacttccttatatgtacataataattaaatgttgaaatttatgaaatacttttatgaatttagataatttttaaatattgttaaaatttattgaactaaaaagtaatgtaaataaaataattcatgttaaagatggaacaaaataattaactttacatgtttggtgatacagatgcaaatgtttttgatatatggagatgttgagtcttttgactttactaaaggtgctgaatagcattaaattcactattttccttttctgttttacttgtgaaaataaaaatgcactaaggttgggtagaagttctgtttgcactcactaattgtgacagacagaggtttttgtaagtatttattgtacaattgatgcatgtttatttttagcgttgttattgcctctggtgttaataaatgaacaaatggctatctggaggaacagctacaa

SEQ ID NO: 61695 - DNA, 1926 bp, Artificial Sequence
  derived and/or modified sequence
ggccgtgcggccggggacctgttgatcgcaggtatagccggctggcccgggctccctcgggactggggcgactgcgcatgctcgctggccgcgctgggccagtagccgagccgcggtgacgaaccggctccgcggttgcggtgtttgcggttgctgtgatggcgatgtgagggggcccggggcgggatggtgctgacccgggtcgggccgtcttcttgcagctggacaacgagctcctccgttcgacaggcgggggaagaggccgagccgggcgagagggggaacggtgtatttttaacaacgggaatcagtaactggaagtacaagattggttatttaataatgttaaaaatgaggctttgaaaagcagaggtgctgttatcagaatagtcttctgggtataaattaaaaatgactgaagttcaagcaatggtagaattctctgtggagctaaacaagttctacaatgtggatttgtttcagagaggtttttaccagattcgtgcttctatgaaaattccatcaagaattccccacagagtagaagctagtttgttgcatgcaacaggtatgactttagcctttccagcctcagttcatgattctctaatttgcagtaaaacatttcaaattttgtacaaaaatgaagaggttgttttaaatgatgttatgatcttcaaagtaaaaatgctattggatgaaagaaagattgaagaaacccttgaggaaatgaattttctattatccttggatctacacttcacagatggagattattcggcagatgatctgaatgccttgcaactaataagtagccgaacattgaagctgcactttagcccccatagaggccttcatcatcatgttaatgttatgtttgattacttccacctttctgttgtgtctgttacagttcatgcatcattggttgcactacaccagccactaataagctttcctcgccctgtgaagacaacttggttaaatagaaatgcaccagcacaaaacaaagattccgtgattcctactcttgaaagtgtggtctttggtattaactacacaaaacagttatcaccagatggttgtagcttcatcattgcagactccttcctacatcatgcgtatcgttttcattatacactttgtgccactttgctgctagccttcaagggattgcacagctacttcattacagtaacagaagagattccttcttgtcagaaactagaactggaggaaatggatgtagaagctcgacttactgaactatgtgaagaagttaagaaaatagagaatcctgatgaactggcagaacttataaatatgaatcttgcgcaactttgctcacttttgatggctttatggggacagtttctggaagttataacgctacacgaagaactaagaatattattagcacaagagcaccatactttgagggtacgcagattttctgaggcattcttttgttttgagcatccaagagaagctgccattgcataccaggaacttcatgctcagagtcatctacagatgtgcaccgctatcaaaaatacttccttctgcagttctcttccacccttacctattgaatgtagtgaattagatggagatctcaattcattacctataatctttgaagataggtatttagattcagttactgaagacttagatgcaccctggatgggaattcagaatcttcagagatcagagtccagtaaaatggataaatatgagactgaagaaagctctgtagcaggactttctagcccagagttgaaagtcagacctgctggtgcctccagtatttggtatacagaaggtgaaaagcagctaacaaaatctctaaaaggaaagaatgaagaatcaaataaatccaaagttaaggttactaagcttatgaaaacaatgaaatctgaaaac

SEQ ID NO: 61696 - DNA, 4548 bp, Artificial Sequence
  derived and/or modified sequence
atgacagaggttcaagcaatggtggagttctcggttgagctgaacaagttctacaatgtggatctgttccagcggggcttctatcagatccgagcaagcatgaagatcccatctcgtatccctcatcgggtcgaggctagtctattgcatgcgactgggatgaccctcgcatttcccgcctcagtgcatgactccctgatctgtagcaaaacgtttcagattttgtacaagaatgaagaagtcgttcttaacgacgtgatgatcttcaaggttaagatgttgcttgacgaaaggaagatcgaagaaacgcttgaggagatgaacttcctgttatcgctggaccttcactttactgacggtgattatagtgctgacgatctcaatgcactgcagttgatctcctcacgaaccctgaaactacacttctctcctcataggggattgcaccaccacgtgaacgtaatgtttgactacttccacctgtctgtggtgtctgtgacggtacacgcttcactcgtggcactgcaccagcccctgatcagcttcccacgacctgtgaagacaacgtggttaaaccgaaatgctcccgcccagaacaaggatagcgtgatacctacacttgagagcgtggtgtttggaatcaattacactaagcaactaagtcccgacggctgcagcttcataatcgctgacagttttttgcatcatgcatatagattccactataccctgtgcgctacactactgttggcctttaagggactacattcttattttattaccgtgacagaggagattccatcttgccagaaattggagttagaggagatggacgtggaagctcgactgactgagctctgtgaggaggtaaagaagattgagaatcccgacgaactcgccgagcttattaatatgaacctcgcccagctttgcagcctactgatggcactttggggacagttcctggaagttatcacactccacgaggaactgcggattctccttgctcaggagcaccatactctgagagtccgacgcttttctgaggcattcttttgtttcgaacacccaagagaagctgccattgcatatcaggagctgcacgctcagagtcatctccaaatgtgtacggctatcaagaataccagcttttgcagctccctgccacctcttcccatagagtgcagtgagctggacggggatttgaactcccttcctattattttcgaagaccggtatctcgatagcgtcacagaggatctggacgctccctggatgggcatccagaaccttcaacgtagtgaaagctcaaaaatggacaaatatgaaacagaggagtcctctgttgccgggttatcctctcccgaactgaaggtgcgtcctgcaggggccagctccatttggtacactgagggagaaaagcagttgacaaaaagcctgaagggaaagaacgaggagagcaataaatctaaggtaaaggtcacaaagctcatgaaaactatgaaatctgagaatacgaagaaactgatcaaacagaactctaaggattcagttgtcttggtcggctataagtgcctgaagagcaccgccagtaacgacctgatcaagtgttttgagggaaacccaagccacagccaaaaggaaggcctagaccctaccatatgtggctacaacttcgaccccaagacttacatgcggcagacatctcagaaagaagcaagttgcctgcccactaatacagagcgcacagagcagaaatcgccagatatagagaatgtccaacctgaccagtttgatccccttaattcaggcaacttgaacctgtgtgccaatctgtctatcagcggcaaactggatatctctcaagacgatagtgagataacccaaatggagcataaccttgcatctcggaggtctagtgatgactgtcatgaccaccagaccacccctagcttgggggttcgtacgatcgagattaagccttcaaataaggatccctttagtggagaaaatattactgtgaagcttggcccatggacagaactaaggcaggaggagattttggtggataatttacttcctaatttcgagtcactcgagagcaatgggaaatccaagtcaatcgagatcacctttgaaaaggaggccctgcaggaggcaaaatgcctgtccatcggggaatccttgacaaagttgcggtctaacttgcccgctccatcaactaaggaataccatgtagtcgtgtcaggagataccatcaaactgcctgacatttcagccacatacgccagctcacgctttagcgactctggcgtcgagagtgagcctagctccttcgccacacatcccaacacagacctggtttttgagaccgtgcaggggcagggcccctgtaattcagagaggcttttcccacaattgctaatgaagccggattataacgtgaagttttctttgggcaatcactgcaccgagagcacgagtgcaataagtgagatacaaagtagtctcacatccatcaacagcttgccatccgacgatgagctgagccccgatgaaaatagcaaaaagtccgtcgtccccgagtgtcatctgaacgattctaaaaccgtgctcaacctgggcacgacagatctgcccaagtgcgatgacacaaagaagtcttcaataacgctgcagcagcagtcagtggtctttagcgggaatctggataatgagacagtagcaattcactcactgaacagctcaatcaaagaccccctacagtttgtgttcagcgacgaggaaaccagctccgatgtgaaatcctcctgtagcagtaaaccaaacctggataccatgtgcaaagggttccagtccccggataagtctaataactccacagggaccgccataacactcaactccaagttgatctgcctgggcaccccctgtgtgatctcagggtccatctcatcgaacaccgatgtcagcgaggaccgtacaatgaagaaaaactctgatgtcttgaacttgactcaaatgtactcggagatacctaccgtggagagcgagacccacttgggcacatcagacccgttttcagccagtacagatattgtgaagcagggccttgtggaaaactacttcggctcccaatcctccactgacattagcgatacatgcgcagtctcttactctaatgccctgtccccccagaaagaaacttcagaaaaggagatttcaaatctccagcaggaacaggacaaggaagatgaagaagaagaacaggatcaacagatggttcagaatggctactatgaagagacggactatagcgcactggatggtacaattaacgctcactacacaagtcgagatgagctgatggaagaacgcctaactaaatccgaaaagatcaacagcgactatttacgtgacggtatcaacatgcctacagtgtgcacctccggttgtctcagctttccctctgccccacgcgagtctccttgtaacgttaagtatagctcaaagtcaaagttcgacgctatcaccaaacaaccctcttctacgtcttacaatttcaccagttcaattagctggtacgaatcctcccctaagccacaaattcaggctttcctccaggctaaagaagagctgaaactgctgaagctacctggatttatgtactcggaggtaccccttctggcgtcaagcgtgccttatttcagcgtagaagaggaggacggctccgaagacggggtgcatctcatcgtgtgtgtgcacggtctcgacggcaattctgctgacctgagactcgttaaaacgtacattgaactgggtctaccgggcgggcggattgactttctaatgtctgaacgaaaccaaaacgatacctttgccgattttgactcaatgactgaccgattgctcgatgaaataattcagtatatccaaatatactcactgaccgtatctaaaattagttttatcggacactctctcggtaatctcataatacggtcagtacttacccgtccgcgcttcaaatattatcttaataaactgcataccttcctgtccttatctggcccccacctggggacactgtacaactcctcagctctggtaaacacaggtctatggttcatgcagaaatggaagaaatccggatccctgcttcaattgacatgtcgggaccatagtgatccacgccaaacctttctatacaagctatccaataaggcaggcctgcattacttcaagaacgtggtactcgttggctccttacaagatcgctatgtgccctaccactccgccagaattgagatgtgtaagactgcacttaaagataagcagtctggccagatatattctgagatgattcataatctgctgcgtccggtgcttcagtcgaaggattgtaatctggtgagatataacgtgataaacgcactcccaaataccgccgattcactgatcgggagggctgcacacatagcagtgctggactctgaaatcttcctggagaagtttttcctcgtggctgctttgaaatattttcaatag

SEQ ID NO: 61697 - DNA, 1518 bp, Artificial Sequence
  derived and/or modified sequence
atgactgaggttcaggccatggtggaattttcagtggaactgaataagttttataatgttgacctgttccagagaggtttctaccagattagagcctctatgaaaatccctagtcgcatcccccaccgcgtggaagcaagtctgttgcacgcgacaggaatgaccctcgccttcccggcttctgtgcacgacagcctcatctgctccaaaacttttcaaatcttgtacaagaacgaggaggtggttcttaacgacgtgatgatcttcaaggtgaaaatgctgttagacgagagaaaaatcgaggaaactctggaggagatgaattttttgttgtctctcgatttgcactttactgatggagactactctgcggatgacctcaacgcgttgcaactgattagtagtagaaccttgaagttacacttttctccacatcgagggctgcaccatcatgtgaatgtcatgtttgattacttccatttgtccgtagtcagtgtgaccgttcatgcctctctcgtggccctgcaccaaccgcttatctcattccccaggccagtgaagacaacatggcttaacaggaacgccccagcacagaacaaggacagcgtcatccctactctcgaatctgtggtttttgggattaactacacaaagcagctgagtcctgatggctgttcattcatcatcgcagattctttcctgcaccacgcatataggtttcattacactctgtgcgccactctcctactcgcatttaaaggccttcattcatacttcattaccgtaactgaagaaataccatcttgccaaaaattagaactcgaggagatggatgttgaggccagactgacagaattatgtgaggaagtcaagaaaatcgaaaatcctgacgaactggccgagttgatcaacatgaacttggctcagctctgctcgctcttaatggcattgtgggggcagttccttgaggtgatcactctccatgaggagctgaggatcctacttgctcaggagcaccatacgctcagagtacggcggttctccgaggcattcttttgttttgaacacccgagagaggccgcaattgcctatcaagagctgcacgcacaatctcatctgcagatgtgcaccgcaataaagaacacttccttctgtagttccctgccaccgctaccaattgagtgcagcgaattagatggggatcttaattccctgccgataatttttgaagaccgctatttagacagcgtgaccgaagacctcgatgccccttggatggggatccagaaccttcaaaggtccgagagtagcaaaatggataagtacgagacagaggagagtagtgtcgccggtctctcgagtccagaattaaaggttcgccccgcaggagcgtcctccatttggtataccgaaggtgagaagcagctgacaaagagcttgaaaggcaaaaacgaagaatcgaataagagtaaagttaaggtgactaaattaatgaaaactatgaagtccgaaaactag

SEQ ID NO: 61698 - DNA, 4548 bp, Artificial Sequence
  derived and/or modified sequence
atgacagaggtgcaggccatggtggagttctctgtggagctgaacaagttctacaacgtggacctcttccagaggggcttctaccagatccgggcctccatgaagatccccagccgcatcccccaccgggtggaggccagcctgctgcacgccaccggcatgaccctggccttccctgcctctgtgcatgacagcctcatctgcagcaagaccttccagatcctgtacaagaatgaggaggtggtgctgaatgatgtgatgatcttcaaggtgaagatgctgctggatgagaggaagattgaggagaccctggaggagatgaacttcctgctgagcctggacctgcacttcacagatggagactacagcgcagatgacctgaatgccctgcagctgatcagcagcaggaccctgaagctgcacttcagcccccaccggggcctgcaccaccacgtgaatgtgatgtttgactacttccacctgtctgtggtgtctgtgacagtgcacgccagcctggtggccctgcaccagcccctcatctccttccccaggcctgtgaagaccacctggctgaacagaaatgccccagcccagaacaaggacagcgtcatccccaccctggagagcgtggtgtttggcatcaactacaccaagcagctgagcccagatggctgcagcttcatcatcgctgacagcttcctgcaccacgcctaccgcttccactacaccctgtgtgccaccctgctgctggccttcaagggcctgcacagctacttcatcaccgtgacagaggagatccccagctgccagaagctggagctggaggagatggatgtggaggcccggctgacagagctgtgtgaggaggtgaagaagattgagaacccagatgagctggccgagctgatcaacatgaacctggcccagctgtgcagcctgctgatggccctgtggggccagttcctggaggtgatcaccctgcacgaggagctgcgcatcctgctggcccaggagcaccacaccctgcgggtgcggcgcttcagcgaggccttcttctgctttgagcacccccgggaggccgccatcgcctaccaggagctgcacgcccagagccacctgcagatgtgcacagccatcaagaacaccagcttctgcagcagcctgccccccctgcccatcgagtgcagcgagctggatggagacctgaacagcctgcccatcatctttgaggaccgctacctggacagcgtgacagaggacctggatgccccctggatgggcatccagaacctgcagaggtctgagagcagcaagatggacaagtatgaaacagaggagagctctgtggccggcctgagcagccctgagctgaaggtgcggcctgctggggccagcagcatctggtacacagaaggagagaagcagctgaccaagagcctgaagggcaagaatgaggagagcaacaagagcaaggtgaaggtgaccaagctgatgaagaccatgaagtctgagaacaccaagaagctgatcaagcagaacagcaaggacagcgtggtgctggtgggctacaagtgcctgaagagcacagccagcaatgacctgatcaagtgctttgagggcaaccccagccacagccagaaggagggcctggaccccaccatctgtggctacaactttgaccccaagacctacatgaggcagaccagccagaaggaggccagctgcctgcccaccaacacagagaggacagagcagaagagcccagacattgaaaatgtgcagcctgaccagtttgaccccctgaacagcggcaacctgaacctgtgtgccaacctgagcatcagcggcaagctggacatcagccaggatgattctgagatcacccagatggagcacaacctggccagcagaagaagcagtgatgactgccacgaccaccagaccacccccagcctgggcgtgaggaccatcgagatcaagcccagcaacaaggaccccttcagcggggagaacatcaccgtgaagctgggcccctggacagagctgcggcaggaggagatcctggtggacaacctgctgcccaactttgagagcctggagagcaatggcaagagcaagagcattgagatcacctttgagaaggaggccctgcaggaggccaagtgcctgagcattggagagagcctgaccaagctgcggagcaacctgcctgcccccagcaccaaggagtaccacgtggtggtgtctggggacaccatcaagctgcctgacatcagcgccacctacgccagcagccgcttcagtgacagcggcgtggagagcgagcccagcagctttgccacccaccccaacacagacctggtgtttgaaacagtgcagggccagggcccctgcaacagcgagcggctcttcccccagctgctgatgaagccagactacaacgtgaagttcagcctgggcaaccactgcacagagagcaccagcgccatcagcgagatccagagcagcctgaccagcatcaacagcctgcccagtgatgatgagctgagcccagatgagaacagcaagaagtctgtggtgcctgagtgccacctgaatgacagcaagacagtgctgaacctgggcaccacagacctgcccaagtgtgatgacaccaagaagagcagcatcaccctgcagcagcagagcgtggtgttcagcggcaacctggacaatgaaacagtggccatccacagcctgaacagcagcatcaaggaccccctgcagtttgtgttcagtgatgaggagaccagcagtgatgtgaagagcagctgcagcagcaagcccaacctggacaccatgtgcaagggcttccagagcccagacaagagcaacaacagcactggaacagccatcaccctgaacagcaagctgatctgcctgggcaccccctgcgtcatcagcggcagcatcagcagcaacacagatgtgtctgaggacaggaccatgaagaagaacagtgatgtgctgaacctgacccagatgtacagcgagatccccaccgtggagagcgagacccacctgggcaccagtgaccccttcagcgccagcacagacatcgtgaagcagggcctggtggagaactacttcggcagccagagcagcacagacatcagtgacacctgtgctgtgtcctacagcaatgccctgagcccccagaaggagaccagcgagaaggagatcagcaacctgcagcaggagcaggacaaggaggatgaggaggaggagcaggaccagcagatggtgcagaatggctactatgaggagacagactacagcgccctggatggcaccatcaatgcccactacaccagcagagatgagctgatggaggagcggctgaccaagtctgagaagatcaacagcgactacctgagagatggcatcaacatgcccaccgtgtgcaccagcggctgcctgtccttccccagcgccccccgggagagcccctgcaatgtgaagtacagcagcaagagcaagtttgatgccatcaccaagcagcccagcagcaccagctacaacttcaccagcagcatctcctggtatgagagcagccccaagccccagatccaggccttcctgcaggccaaggaggagctgaagctgctgaagctgcccggcttcatgtacagcgaggtgcccctgctggccagctctgtgccctacttctctgtggaggaggaggatggctctgaagatggagtgcacctgattgtgtgtgtgcacggcctggatggcaacagcgctgacctgcggctggtgaagacctacatcgagctgggcctgcccggcggcagaattgacttcctgatgtctgaaagaaaccagaatgacacctttgctgactttgacagcatgacagaccggctgctggatgagatcatccagtacatccagatctacagcctgactgtgtccaagatctccttcatcggccacagcctgggcaacctgatcatccgctctgtgctgacccggccccgcttcaagtactacctgaacaagctgcacaccttcctgagcctgagcggcccccacctgggcaccctgtacaacagcagcgccctggtgaacacaggcctgtggttcatgcagaagtggaagaagagcggcagcctgctgcagctgacctgccgggaccacagcgacccccggcagaccttcctgtacaagctgagcaacaaggccggcctgcactacttcaagaatgtggtgctggtgggcagcctgcaggacagatatgtgccctaccacagcgccagaattgagatgtgcaagacagccctgaaggacaagcagagcggccagatctacagcgagatgatccacaacctgctgcggcctgtgctgcagagcaaggactgcaacctggtgcgctacaacgtcatcaatgccctgcccaacacagctgacagcctgattggccgggccgcccacatcgctgtgctggacagcgagatcttcctggagaagttcttcctggtggccgccctgaagtacttccagtag

SEQ ID NO: 61699 - DNA, 1518 bp, Artificial Sequence
  derived and/or modified sequence
atgacagaggtgcaggccatggtggagttctctgtggagctgaacaagttctacaacgtggacctcttccagaggggcttctaccagatccgggcctccatgaagatccccagccgcatcccccaccgggtggaggccagcctgctgcacgccaccggcatgaccctggccttccctgcctctgtgcatgacagcctcatctgcagcaagaccttccagatcctgtacaagaatgaggaggtggtgctgaatgatgtgatgatcttcaaggtgaagatgctgctggatgagaggaagattgaggagaccctggaggagatgaacttcctgctgagcctggacctgcacttcacagatggagactacagcgcagatgacctgaatgccctgcagctgatcagcagcaggaccctgaagctgcacttcagcccccaccggggcctgcaccaccacgtgaatgtgatgtttgactacttccacctgtctgtggtgtctgtgacagtgcacgccagcctggtggccctgcaccagcccctcatctccttccccaggcctgtgaagaccacctggctgaacagaaatgccccagcccagaacaaggacagcgtcatccccaccctggagagcgtggtgtttggcatcaactacaccaagcagctgagcccagatggctgcagcttcatcatcgctgacagcttcctgcaccacgcctaccgcttccactacaccctgtgtgccaccctgctgctggccttcaagggcctgcacagctacttcatcaccgtgacagaggagatccccagctgccagaagctggagctggaggagatggatgtggaggcccggctgacagagctgtgtgaggaggtgaagaagattgagaacccagatgagctggccgagctgatcaacatgaacctggcccagctgtgcagcctgctgatggccctgtggggccagttcctggaggtgatcaccctgcacgaggagctgcgcatcctgctggcccaggagcaccacaccctgcgggtgcggcgcttcagcgaggccttcttctgctttgagcacccccgggaggccgccatcgcctaccaggagctgcacgcccagagccacctgcagatgtgcacagccatcaagaacaccagcttctgcagcagcctgccccccctgcccatcgagtgcagcgagctggatggagacctgaacagcctgcccatcatctttgaggaccgctacctggacagcgtgacagaggacctggatgccccctggatgggcatccagaacctgcagaggtctgagagcagcaagatggacaagtatgaaacagaggagagctctgtggccggcctgagcagccctgagctgaaggtgcggcctgctggggccagcagcatctggtacacagaaggagagaagcagctgaccaagagcctgaagggcaagaatgaggagagcaacaagagcaaggtgaaggtgaccaagctgatgaagaccatgaagtctgagaactag

SEQ ID NO: 61700 - DNA, 4548 bp, Artificial Sequence
  derived and/or modified sequence
atgaccgaggtgcaggccatggtggagttcagcgtggagctgaacaagttctacaacgtggacctgttccagcgcggtttctaccagattagagctagcatgaagattccgagccgcatcccccatagagtggaggcctcacttctacacgcaaccggcatgactttggcattcccagcaagcgtgcacgactcacttatatgttccaaaaccttccaaattctgtataagaatgaagaagtggtccttaatgatgtgatgattttcaaggtgaagatgcttctggatgagaggaagatcgaggaaaccctagaggaaatgaactttctgctctcactagatctccatttcaccgatggggattatagcgcagatgacctgaatgctctccaattgattagttcccgtacgctcaaattacatttttcaccacacagaggcctgcatcaccatgtgaacgtaatgtttgactattttcacctcagtgttgtgagcgtcactgtccacgcgtcccttgtggccctacatcagccactgatcagctttccacgccctgtgaaaaccacatggctgaatagaaatgccccagcacagaacaaagactccgtgatccctacactcgaaagcgtggtgtttggcatcaactacacaaaacagcttagcccagacggctgtagtttcatcattgcggatagcttcttgcatcacgcctatcggttccattacacactatgcgctactctgctcctggccttcaaaggattacacagttactttataactgtcactgaggaaatcccctcctgccagaagttggagctggaagaaatggatgtcgaagcaaggttaactgaactttgcgaagaagtaaaaaaaattgaaaaccccgatgagctcgccgagctgatcaacatgaaccttgcgcagctgtgcagcttgcttatggcactgtggggtcagtttttggaggtgattaccctccatgaagaattacggattctgttggctcaggaacaccacaccttacgggtgcggaggttttcagaggcctttttctgctttgagcacccacgagaggctgcaatcgcctaccaggaactccacgcacaatcacacttacaaatgtgtacagccatcaagaatacatccttctgcagctctttgccaccactgccaattgaatgctcagagctggacggggatctaaatagcttgcccataattttcgaagataggtacctggactcagtcactgaggatctggatgctccttggatgggtattcagaatttacagcgatcggaaagcagcaaaatggacaagtatgagacagaggagtcctcggtggctgggttgtcttccccggaacttaaagttcgtcctgccggagcaagctccatctggtacaccgagggcgagaaacagctcaccaagtctctaaagggcaaaaacgaagagagcaacaaatccaaggtgaaagttaccaaactgatgaagaccatgaagtccgagaatacaaagaaactgataaagcagaattccaaagactcagtagttttggttggctacaagtgcctaaagagcacggcaagtaacgatctaattaaatgttttgagggcaatccctcccacagccaaaaggaaggcctcgaccccaccatctgcggttacaattttgaccccaagacctatatgcgccagaccagccaaaaggaggcttcctgcttgcccacaaacactgaaagaacagagcagaagtcccctgatatcgagaacgtgcagcctgaccaatttgaccctcttaacagtggcaacctcaatctgtgcgctaacctgtcgatctctggaaagctggacatttcccaagacgacagcgaaatcacccaaatggaacacaacctggccagccggcgctcgtccgatgattgccacgatcatcagactacaccctcactgggggttcgtacaatcgagatcaagccttctaataaagacccatttagtggtgagaacatcactgtaaagctggggccctggactgaactccgccaggaagagatactggtcgataaccttctccccaacttcgagtccctggaatctaatggaaagtccaaatccatcgagatcacctttgaaaaagaggccttgcaggaggccaagtgcctgtctattggtgagtctctgaccaagttaaggagtaatctacccgcacctagcacaaaagaataccatgtggtggtgtctggcgacaccatcaagttgccagatatctccgcgacttatgccagtagtagattctctgactctggagtggagtccgagccaagctctttcgctacacaccctaacactgatcttgtcttcgagaccgtccagggtcagggcccctgtaactcagagaggctttttcctcaattacttatgaaacccgattataacgtaaagttctctctgggtaatcattgcacagagagcacgagcgccatttcagaaatccagtcaagcttgacgagcattaacagcctgccttctgacgatgagctgagtcccgacgaaaactcgaagaagtccgtggtgcccgaatgccacctgaatgatagcaaaaccgtattgaatctgggcacaaccgatttaccaaagtgcgatgatactaaaaaatcgtccataactttgcagcagcagagcgtggtattctcaggaaacctcgataacgagacagtcgccatacactcactgaactcgtcaattaaagacccactgcagttcgtgttctccgatgaggagacatcgtctgacgtgaagagctcctgcagctctaaacccaaccttgacacaatgtgtaaagggtttcagtcccccgataagtccaataattccaccgggaccgccatcaccctgaattctaaactgatatgcctgggaacgccatgtgtgatctcaggctcaatttcaagcaacactgacgtatctgaggaccggactatgaagaaaaattccgacgttctgaacttgacccagatgtattcagaaatcccaaccgtggagtccgagacacacttaggaacttcagaccccttttcagcaagcacagacatagtgaaacaaggcctcgtcgaaaattacttcgggtcccagagtagcacggacatttctgatacctgtgcggtgtcctacagtaacgccctttccccccaaaaggaaacaagcgagaaggaaatcagtaatttgcagcaggagcaagacaaggaagacgaggaagaggagcaggaccagcaaatggttcaaaatggctattacgaggaaactgattattccgcgctggacggcacaataaacgcccattacacctcacgtgatgaactgatggaggagcggctgaccaaatctgaaaagatcaactctgactatttgcgcgacggaataaatatgccaacagtgtgcacatcaggctgcttatccttccctagcgcccctcgggaatcaccatgcaacgtgaagtattccagcaagtcaaagttcgatgcaattaccaagcagccgtcttccacatcttataatttcacttcctccataagctggtatgaaagctctccaaagcctcagattcaggcattcctccaggctaaagaagagctcaaattgttgaaactgcccggattcatgtactcagaggtaccactcctggcctcttctgtgccgtatttttccgtggaagaggaagacggcagcgaagatggcgtacacttaattgtgtgtgttcatggcctggatggcaactccgccgatctgcgtttggtgaaaacgtacatagaactgggcctccctgggggccgcattgattttcttatgtcagaaagaaatcagaacgatacatttgctgatttcgactcgatgacggatcggctgttggatgaaatcatccagtacattcagatctattccctaaccgtcagcaagatcagcttcattggacactccctagggaacttgattatacggtcagttttgacaagaccgcgttttaagtattaccttaataagttgcatacctttctctctctgagcggccctcacttgggtaccctgtacaattcctcagccctggtgaacacagggctatggtttatgcagaagtggaagaaatctggcagcctgctgcagctgacatgccgcgatcacagcgatccgcgccaaactttcctttacaagttatctaataaggccggactacactatttcaagaacgtggttctggtggggtcgttgcaggaccgctacgtcccatatcactcagcccggatagagatgtgcaagactgcacttaaagataagcagtctggtcagatctatagcgaaatgatacataatctgcttcgtccagtactccagagcaaagactgcaatctggtgcggtacaatgtaatcaacgccctgccaaacaccgctgattctctgatcggccgggctgctcatatagccgtgctggacagcgaaatctttttggaaaaattctttctagtggccgcactgaagtattttcagtag

SEQ ID NO: 61701 - DNA, 1518 bp, Artificial Sequence
  derived and/or modified sequence
atgaccgaggtgcaggccatggtggagttcagcgtggagctgaacaagttctataacgtcgatctgttccagaggggattttatcaaatccgcgcgtcaatgaagatcccatcacggattccacacagggttgaagcgagcctccttcacgccacaggcatgacgcttgcctttcccgcaagcgttcatgattccctgatctgctctaagacgtttcagatactgtataaaaacgaagaggtggttctcaatgatgtgatgatctttaaagtgaaaatgcttctcgacgagcgtaagatagaagagacattagaggaaatgaactttctgctgtcactcgacctgcattttaccgacggcgattacagcgctgatgatctgaatgcactacagctaatctcttctaggacactgaagctgcactttagcccccacagagggttgcaccatcatgtgaatgtgatgtttgactacttccaccttagcgtggtaagtgttaccgtccatgccagtctggtagccctgcaccagccactgatcagcttccccaggcccgtcaagaccacttggctgaatcgaaatgcacccgcacagaacaaagatagcgtgattccaacactggaatcggtggtgttcggcataaactacacaaagcagctctctccagacgggtgcagctttatcattgccgacagttttctgcaccacgcttaccggtttcactatacactgtgcgccaccttattactagcctttaaaggtctgcacagttattttatcacagtcactgaggagatcccatcttgtcagaaacttgagctagaagagatggacgtcgaggctcgactgaccgaattatgcgaagaagttaaaaagattgagaaccccgacgagctggccgagctgatcaatatgaatctcgctcagctgtgtagtctactgatggccttgtggggacagtttttggaggtcattactctgcacgaagagttgaggattctgctagctcaggagcaccatacacttagggtccggaggttctcagaggcgtttttctgtttcgagcatccgagggaagccgcgatcgcttatcaggagttacatgcacagtctcacctccagatgtgtactgccattaagaacacaagcttctgctcctctttgccgcctttgcccatcgaatgtagtgagctggacggggatcttaattcgctgcctatcatcttcgaggaccgttatctggactctgtgacagaggaccttgatgctccctggatgggtattcagaacttacagcggagtgaatcttccaagatggataaatacgagaccgaagaaagctcagtggctgggctctccagccccgagctgaaagtgaggcccgcaggtgcatcaagtatctggtacactgagggcgaaaagcaactgaccaagtccctgaagggtaaaaacgaagaaagcaacaaatctaaggtaaaagtcacgaagctgatgaaaactatgaagtctgaaaattag

SEQ ID NO: 61702 - DNA, 4548 bp, Artificial Sequence
  derived and/or modified sequence
atgaccgaggtccaggccatggtagagttcagcgttgagctcaacaagttttacaatgttgacctgttccagagagggttctatcagattagggctagtatgaaaattcccagcagaattccacatagggtcgaggcctccctgctccatgctactggtatgacactcgccttccccgcttccgtgcacgactcccttatatgtagcaagaccttccagatcctgtataagaatgaagaggtggtgcttaatgacgtgatgatcttcaaagtcaagatgttactggacgagagaaaaattgaagagacactggaagaaatgaactttctgctgtcactagacctacactttacagacggcgactattctgcggatgatctcaacgcgctgcagctaatcagttctaggactttgaaactgcacttttcccctcatcgcggtctgcatcatcacgtcaacgtcatgttcgactacttccacctgtctgtggtgagcgttactgttcacgcttccctcgtcgccttacatcaacccctgatttcttttccacgtcccgtaaaaaccacttggctgaaccggaatgccccagcgcagaataaggattcagttatacccacccttgagtcagtggtcttcgggataaattataccaagcagctgtcaccggacggttgctcttttataattgcggatagcttcctgcaccacgcttataggtttcattatacattatgcgcgactctgttgctggctttcaaaggcctacatagttattttattacagttacagaggagattccgagctgtcaaaagctggaactggaagaaatggacgtcgaagcacgcctcaccgagctatgcgaggaggtgaagaagatcgagaatcccgacgaactggccgagcttatcaacatgaacctggcccaactgtgttctctcctgatggccctgtggggccaattcctggaagtaattaccttacacgaagagctgaggattttgcttgctcaggagcatcataccctgagagttcgaaggttctccgaggcgttcttctgctttgaacatcctagagaagccgctatcgcttaccaggagctgcatgcccagtcccacctgcagatgtgcactgctattaaaaatacctccttctgcagttctcttcctcccctcccaattgaatgctccgaactggacggagacctgaactcccttccaatcatctttgaagaccgttatctagactctgtcactgaagacttagacgcgccttggatgggaatccaaaatctccaacggtccgaaagttcaaagatggacaagtacgagacagaggagtctagcgtcgcagggctgtcctcacccgagctgaaggtaaggcctgcaggcgctagcagcatttggtatacagaaggtgaaaaacagctgaccaaatccctaaagggaaaaaatgaggagtctaataagagcaaggtgaaggtgactaagttgatgaagaccatgaagtcggagaacactaagaagctaatcaagcagaactccaaagattctgttgtcctcgtcggctacaaatgtctgaaaagtactgctagtaatgacctgatcaaatgctttgagggcaatccttcgcactctcagaaagagggactggatcctacaatctgcggctataatttcgatccgaagacttatatgcgacaaacgtcacagaaggaggccagctgtttgcctaccaatacagagcgaaccgagcagaagtcccccgacatcgaaaatgtgcagcctgaccaatttgacccattgaactctggcaacctcaacctgtgcgcaaacctgtctatcagcggcaagcttgatataagtcaggacgatagtgagataacccagatggagcacaacctggctagtaggcgcagctcagacgactgtcatgaccaccagaccacaccaagtttaggagtgagaacaattgagattaagcccagtaacaaggacccgttctccggggagaacataactgtgaagctcggtccgtggacagaacttaggcaggaggaaatcttggttgacaacttattacctaatttcgaaagtctagagagcaacgggaagtcaaaatctatcgaaattactttcgagaaggaggctttgcaggaagcgaagtgtttgagcattggagaatctttgaccaaactgcgcagcaacctccccgctcccagcactaaggagtaccacgtcgttgtctcaggcgatacaatcaagctgcctgatatctctgccacttacgccagcagtaggttttctgacagtggagtcgaaagcgagccgagcagttttgcaactcaccctaacacagacctcgtgttcgaaacagttcaggggcagggaccctgtaactctgaacgcctatttcctcagctgctgatgaagccagattataatgtcaagttctctctgggcaatcattgcacggagtcaacaagtgccatcagcgagatccagagttcattgacctctattaattccctgccctccgatgatgagctcagccccgacgagaattcgaaaaaatccgtagtgcctgaatgccatttgaatgacagtaagacggttctgaacttgggtaccaccgacctgccaaaatgtgacgacacgaagaaatcaagcatcactcttcagcaacaatctgtggtgttctctggcaacctggataatgaaactgtggccatacattccctgaattccagcatcaaagaccccctgcagttcgtcttttcggacgaggagacatctagtgacgttaagagcagctgttcttcgaagcccaacctggacaccatgtgcaagggcttccagtctccagacaagagtaataacagcaccgggaccgctatcacgctaaactccaaacttatatgtctgggtaccccctgcgtgatctctgggtcaatcagttccaacacagacgtgtctgaagatcggacgatgaaaaagaattcggacgttctgaatttgactcagatgtattccgaaatcccaaccgtggaatccgagacacaccttggaactagcgaccccttctcagcgtctacagatatcgttaagcagggcctagttgaaaactatttcggctctcagtcttctaccgacataagcgatacctgcgccgtttcatacagtaacgccctgagccctcagaaggaaacaagcgagaaggagattagtaatctgcagcaggagcaagacaaagaggatgaggaagaagagcaagaccagcagatggtacagaacgggtactacgaagaaaccgattattctgcactcgatggaactatcaatgcccactacacaagtcgggacgagctgatggaagaaaggctcactaaaagcgagaagattaatagcgattacctgcgtgatggaatcaacatgcccacagtctgtactagcggatgcttgtcatttccctcggccccacgggagtctccttgcaacgttaaatactcaagcaaaagtaaattcgacgcaatcacaaaacagcccagtagcacgagctacaacttcacgtctagtattagctggtatgagtcaagtccaaaaccccaaatccaggcctttctgcaggccaaggaggagcttaagctcctgaagcttccgggtttcatgtacagcgaagtgccgctgctggcttcttccgtgccctacttctccgtggaggaggaagacggatcagaagacggcgtgcacctcatagtctgtgtgcacggactcgatggaaacagtgccgacctgaggttggtcaaaacatatattgaactcgggttgcctggaggcagaatcgactttctgatgagcgagaggaatcaaaacgacacgtttgctgactttgacagcatgaccgacagactccttgatgagatcattcagtatattcagatatactccctgacggttagtaaaatcagcttcatcggacatagcctcggtaacctgattattaggagcgtgcttacccggccaaggttcaaatattacttgaataaactccatacttttctgtcgctgagcgggcctcatctgggaaccctctataactcaagtgccctcgttaacacaggactttggtttatgcagaagtggaagaaaagtggctctcttctgcagcttacatgtagagatcatagtgatcccagacagacattcctgtataagcttagcaacaaggctgggctgcactactttaagaatgtggtgctggttggatccctccaggaccgctatgtaccgtaccactccgccaggattgagatgtgtaaaaccgcactgaaagacaaacaatcagggcagatttactccgagatgatacacaacttacttaggcccgtgctccagtccaaagactgtaacctggttcggtataatgtcattaatgctctgcccaacacggcggatagtctcatcgggagggccgcacacattgcagtactggattctgaaatcttcctggagaagtttttcttagtggccgctctgaagtactttcaatag

SEQ ID NO: 61703 - DNA, 1518 bp, Artificial Sequence
  derived and/or modified sequence
atgacagaggtgcaggcaatggtggaattctccgtagagctgaataaattttacaacgtggacttattccagaggggattttaccagatccgggctagcatgaaaatcccatctaggatccctcatcgcgtggaggcttctctactccatgccaccggtatgaccctagccttccccgcaagtgtgcatgattcactgatctgttcaaagacgtttcagattctgtataaaaatgaagaggtcgttctgaatgacgttatgatattcaaggtgaaaatgctgctcgacgaacgaaaaatcgaggagacattggaggagatgaactttctcctgagtctggaccttcatttcactgacggcgactactccgccgatgatcttaatgccctccagttaatcagcagtaggacattgaagcttcacttttcccctcatcgaggtctgcaccaccatgtaaacgtgatgttcgattatttccatctgtccgtagtcagcgtgaccgtgcatgctagcctcgttgccctccaccagcctttgattagctttcctagaccggtgaagactacctggctgaatcggaacgccccagcacaaaacaaggattctgtcattccaactttggaaagcgtggtctttgggataaactatacaaaacagttaagccccgacggctgcagttttattattgccgattccttcttacaccacgcttatcggttccactatactctgtgtgctacgctgctattggcatttaaggggttacactcatactttattaccgttactgaggaaataccaagctgtcagaagctggaactcgaggagatggatgtggaggcaagactcaccgagttatgtgaggaggtcaagaagattgaaaatcctgacgagcttgctgagctgatcaacatgaacctggcccagctttgttccctccttatggccctgtggggccagtttctggaggtgattaccctacacgaagaactcaggatcctcctcgcccaggagcatcacactctcagagttcgacgcttttctgaggcctttttttgttttgaacaccctcgagaggccgctatagcttaccaggagttgcacgctcagagccacctgcagatgtgcacagccattaagaacacctccttttgctcctccctgcccccactgccgattgaatgttctgagttggatggtgacctgaattccctcccgatcatctttgaggatcgatatctggactcagtcaccgaggatctcgacgccccatggatgggcattcagaaccttcagcggagtgaatcatcaaagatggacaagtatgagactgaggaatcatcggtggccggactgtcgagtcccgagttaaaggtccgtccagcaggggcaagtagcatatggtataccgagggcgaaaagcagcttaccaaatccctgaaggggaagaacgaggaatcaaacaagagcaaagtcaaggtcaccaaactgatgaagaccatgaagagcgaaaattag

SEQ ID NO: 61704 - DNA, 246 bp, Artificial Sequence
  derived and/or modified sequence
atgaccagaaccgagagccccgccacctggatgggccagctgggcgccgccgcctggatgagaaccctgagcccccaggccgcccaggtgctggtgagacccctggcccaggaggacgccgtgggcgccgccgccgccgccagaggcagaatgggcggcagcagcaccagagaggtgcccagagcccaccccgtgaccggctgcagcgccgagatcatcaacaagaagtgccagctggacctgtag

SEQ ID NO: 61705 - protein, 231 aa, Artificial Sequence
  derived and/or modified sequence
MGGLWRPGWRCVPFCGWRWIHPGSPTRAAERVEPFLRPEWSGTGGAERGLRWLGTWKRCSLRARHPALQPPRRPKSSNPFTRAQEEERRRQNKTTLTYVAAVAVGMLGASYAAVPLYRLYCQTTGLGGSAVAGHASDKIENMVPVKDRIIKISFNADVHASLQWNFRPQQTEIYVVPGETALAFYRAKNPTDKPVIGISTYNIVPFEAGQYFNKIQASKLHRVYVLESWHL

SEQ ID NO: 61706 - DNA, 696 bp, Artificial Sequence
  derived and/or modified sequence
atgggcggcctgtggcgacccggttggagatgcgtgcctttttgtggctggcgttggattcacccggggagccctacacgcgccgcggaacgggttgagccctttctgagacctgagtggtccggcaccggaggggccgagaggggacttcgatggctcggcacatggaaaaggtgctccctccgagctaggcacccagctttacaaccccctcgacggcctaagtcctctaatcccttcacgcgagcgcaggaggaggagagaaggcggcagaataaaacaaccctgacttacgtggcggcagttgccgtcggcatgctgggagccagctatgcagccgtcccactctaccgcctctattgtcagaccacaggtctgggcggaagtgcagtggccgggcacgcatccgacaagatcgagaacatggtgcccgtcaaagaccgcatcatcaaaatatcttttaacgccgatgtgcatgcttctttgcagtggaatttcagacctcagcagactgaaatttacgtggttcccggggaaacagccctggccttttacagggctaaaaaccccaccgacaaacctgtgatcggcatttcaacctataacatcgtgcccttcgaagccggacaatattttaacaagattcaggcctctaagttgcacagagtatacgttctggagagctggcatttgtag

SEQ ID NO: 61707 - DNA, 696 bp, Artificial Sequence
  derived and/or modified sequence
atgggcggcctgtggaggcctggctggaggtgtgtgcccttctgtggctggcgctggatccaccctggcagccccaccagggctgctgagcgggtggagcccttcctgcggcctgagtggagcggcactggaggagctgagcggggcctgcgctggctgggcacctggaagcgctgcagcctgcgggcccggcacccagccctgcagcccccccggcggcccaagagcagcaaccccttcacccgggcccaggaggaggagcggcggcggcagaacaagaccaccctgacctacgtggccgctgtggccgtgggcatgctgggcgccagctatgctgctgtgcccctgtaccgcctgtactgccagaccaccggcctgggcggcagcgctgtggccggccacgccagtgacaagattgagaacatggtgcctgtgaaggaccgcatcatcaagatctccttcaatgctgatgtgcacgccagcctgcagtggaacttccggccccagcagacagagatctacgtggtgcctggagaaacagccctggccttctaccgggccaagaaccccacagacaagcctgtgattggcatcagcacctacaacatcgtgccctttgaggccggccagtacttcaacaagatccaggccagcaagctgcaccgggtgtatgtgctggagagctggcacctgtag

SEQ ID NO: 61708 - DNA, 696 bp, Artificial Sequence
  derived and/or modified sequence
atgggcggcctgtggcggcccggctggcggtgcgtgcccttctgcggttggcgctggatccacccaggttcacccacaagggccgccgaacgcgtcgaaccgtttctgcggcccgagtggtctggaacaggaggagctgaacgcggactccgatggttgggtacctggaagagatgcagtctgagggctagacaccctgcactgcagccaccaaggagacctaagagttctaaccccttcacaagagcccaggaggaggagaggcggaggcagaataagactactctcacatatgtggccgcagtggctgttggaatgctgggggcctcgtacgccgccgtcccattatatcgcttatattgtcaaaccaccggactgggaggcagcgccgtagccggacacgcctcggataaaatcgaaaatatggtccctgtgaaagaccggattattaagatctctttcaacgccgacgttcacgcgtcattgcagtggaacttccggccccagcaaaccgagatatacgttgtccccggtgaaaccgccctggccttctaccgagccaaaaatccaaccgataagccagtcatagggatttctacctataacatagtcccctttgaagccgggcagtattttaacaaaatacaggcatccaaactccatcgcgtgtacgtgctggagtcttggcacctgtag

SEQ ID NO: 61709 - DNA, 696 bp, Artificial Sequence
  derived and/or modified sequence
atgggcggactgtggagaccagggtggcggtgtgtgcctttctgtggatggagatggatccacccagggagccctacgcgcgcagccgagagggtggagcctttcctaaggcccgagtggtccggaactgggggtgccgagcgcggactacgttggcttggaacctggaaacgttgttccttgcgtgctagacatcctgccctgcagccccctcgccgacctaagtcctcaaacccctttactcgggcacaggaggaggagcgcagacgacaaaacaaaactaccctgacatacgtggccgcagttgctgtggggatgctgggcgcttcgtatgccgctgttcccttatacaggttgtactgccagacaacagggctggggggaagtgcggtggcagggcacgccagtgacaaaattgagaacatggtaccagtgaaagacagaatcatcaaaatcagcttcaacgctgacgtccacgcaagcctccaatggaatttccgaccccagcagaccgagatctacgttgtcccaggagagactgcccttgcattttaccgggcaaaaaacccaaccgataagcccgtcatcgggatatccacctacaatatcgtcccattcgaggcaggtcaatattttaacaagattcaggcctcaaagctgcaccgcgtgtacgttctggaatcatggcacctttag

SEQ ID NO: 61710 - DNA, 1054 bp, Artificial Sequence
  derived and/or modified sequence
agagggttatgggagggctctggcgtcctggatggaggtgcgttcctttctgtggctggcgctggatccaccctgggtctccaaccagggctgcagagagggtagagccgtttcttaggccagagtggagtgggacaggaggtgccgagagaggactgaggtggcttgggacatggaagcgctgcagccttcgagcccggcatccagcattgcagccgccgcggcggcctaagagctcgaaccctttcacacgcgcgcaggaggaggagcggcggcggcagaacaagacgaccctcacttacgtggccgctgtcgccgtgggcatgctgggggcgtcctacgctgccgtacccctttatcggctctattgccagactactggacttggaggatcagcagttgcaggtcatgcctcagacaagattgaaaacatggtgcctgttaaagatcgaatcattaaaattagctttaatgcagatgtgcatgcaagtctccagtggaactttagacctcagcaaacagaaatatatgtggtgccaggagagactgcactggcgttttacagagctaagaatcctactgacaaaccagtaattggaatttctacatacaatattgttccatttgaagctggacagtatttcaataaaatacaggcttcaaagctgcacagagtctacgttttagagagttggcacctttgatgtggtagtgagctgatcatccactttcttctaaaataaagagaagaaaatggccagtattcatcctgtccttctctttccccattccttgataactctcttgtctttactgggaagctggagagtcacagtctagtagaagaaagattagaaaaatttcaactgtaggtgcctttgcaacctatcctgggagaccctaaaacatatttagttttagtgcctagagattttcactcctctaacatctctggatacagtgtccctggtcaacatgaagaagttacagaagaacgctttctgatcctggcccctaaagaatttacttgtgctaagtaataaaattcctattg

SEQ ID NO: 61711 - DNA, 696 bp, Artificial Sequence
  derived and/or modified sequence
atgggcggcctgtggagacccggctggagatgcgtgcccttctgcggctggagatggatccaccccggcagccccaccagagccgccgagagagtggagcccttcctgagacccgagtggagcggcaccggcggcgccgagagaggcctgagatggctgggcacctggaagagatgcagcctgagagccagacaccccgccctgcagccccccagaagacccaagagcagcaaccccttcaccagagcccaggaggaggagagaagaagacagaacaagaccaccctgacctacgtggccgccgtggccgtgggcatgctgggcgccagctacgccgccgtgcccctgtacagactgtactgccagaccaccggcctgggcggcagcgccgtggccggccacgccagcgacaagatcgagaacatggtgcccgtgaaggacagaatcatcaagatcagcttcaacgccgacgtgcacgccagcctgcagtggaacttcagaccccagcagaccgagatctacgtggtgcccggcgagaccgccctggccttctacagagccaagaaccccaccgacaagcccgtgatcggcatcagcacctacaacatcgtgcccttcgaggccggccagtacttcaacaagatccaggccagcaagctgcacagagtgtacgtgctggagagctggcacctgtag

SEQ ID NO: 61712 - protein, 934 aa, Artificial Sequence
  derived and/or modified sequence
MIDLSFLTEEEQEAIMKVLQRDAALKRAEEERVRHLPEKIKDDQQLKNMSGQWFYEAKAKRHRDKIHGADIIRASMRKKRPQIAAEQSKDRENGAKESWVNNVNKDAFLPPELAGVVEEPEEDAAPASPSSSVVNPASSVIDMSQENTRKPNVSPEKRKNPFNSSKLPEGHSSQQTKNEQSKNGRTGLFQTSKEDELSESKEKSTVADTSIQKLEKSKQTLPGLSNGSQIKAPIPKARKMIYKSTDLNKDDNQSFPRQRTDSLKARGAPRGILKRNSSSSSTDSETLRYNHNFEPKSKIVSPGLTIHERISEKEHSLEDNSSPNSLEPLKHVRFSAVKDELPQSPGLIHGREVGEFSVLESDRLKNGMEDAGDTEEFQSDPKPSQYRKPSLFHQSTSSPYVSKSETHQPMTSGSFPINGLHSHSEVLTARPQSMENSPTINEPKDKSSELTRLESVLPRSPADELSHCVEPEPSQVPGGSSRDRQQGSEEEPSPVLKTLERSAARKMPSKSLEDISSDSSNQAKVDNQPEELVRSAEDVSTVPTQPDNPFSHPDKLKRMSKSVPAFLQDESDDRETDTASESSYQLSRHKKSPSSLTNLSSSSGMTSLSSVSGSVMSVYSGDFGNLEVKGNIQFAIEYVESLKELHVFVAQCKDLAAADVKKQRSDPYVKAYLLPDKGKMGKKKTLVVKKTLNPVYNEILRYKIEKQILKTQKLNLSIWHRDTFKRNSFLGEVELDLETWDWDNKQNKQLRWYPLKRKTAPVALEAENRGEMKLALQYVPEPVPGKKLPTTGEVHIWVKECLDLPLLRGSHLNSFVKCTILPDTSRKSRQKTRAVGKTTNPIFNHTMVYDGFRPEDLMEACVELTVWDHYKLTNQFLGGLRIGFGTGKSYGTEVDWMDSTSEEVALWEKMVNSPNTWIEATLPLRMLLIAKISK

SEQ ID NO: 61713 - DNA, 2805 bp, Artificial Sequence
  derived and/or modified sequence
atgatcgacctgagcttcctgaccgaggaggagcaggaggccatcatgaaggtgctgcagagagacgccgccctgaagagagccgaggaggagagagtgagacacctgcccgagaagatcaaggacgaccagcagctgaagaacatgagcggccagtggttctacgaggccaaggccaagagacacagagacaagatccacggcgccgacatcatcagagccagcatgagaaagaagagaccccagatcgccgccgagcagagcaaggacagagagaacggcgccaaggagagctgggtgaacaacgtgaacaaggacgccttcctgccccccgagctggccggcgtggtggaggagcccgaggaggacgccgcccccgccagccccagcagcagcgtggtgaaccccgccagcagcgtgatcgacatgagccaggagaacaccagaaagcccaacgtgagccccgagaagagaaagaaccccttcaacagcagcaagctgcccgagggccacagcagccagcagaccaagaacgagcagagcaagaacggcagaaccggcctgttccagaccagcaaggaggacgagctgagcgagagcaaggagaagagcaccgtggccgacaccagcatccagaagctggagaagagcaagcagaccctgcccggcctgagcaacggcagccagatcaaggcccccatccccaaggccagaaagatgatctacaagagcaccgacctgaacaaggacgacaaccagagcttccccagacagagaaccgacagcctgaaggccagaggcgcccccagaggcatcctgaagagaaacagcagcagcagcagcaccgacagcgagaccctgagatacaaccacaacttcgagcccaagagcaagatcgtgagccccggcctgaccatccacgagagaatcagcgagaaggagcacagcctggaggacaacagcagccccaacagcctggagcccctgaagcacgtgagattcagcgccgtgaaggacgagctgccccagagccccggcctgatccacggcagagaggtgggcgagttcagcgtgctggagagcgacagactgaagaacggcatggaggacgccggcgacaccgaggagttccagagcgaccccaagcccagccagtacagaaagcccagcctgttccaccagagcaccagcagcccctacgtgagcaagagcgagacccaccagcccatgaccagcggcagcttccccatcaacggcctgcacagccacagcgaggtgctgaccgccagaccccagagcatggagaacagccccaccatcaacgagcccaaggacaagagcagcgagctgaccagactggagagcgtgctgcccagaagccccgccgacgagctgagccactgcgtggagcccgagcccagccaggtgcccggcggcagcagcagagacagacagcagggcagcgaggaggagcccagccccgtgctgaagaccctggagagaagcgccgccagaaagatgcccagcaagagcctggaggacatcagcagcgacagcagcaaccaggccaaggtggacaaccagcccgaggagctggtgagaagcgccgaggacgtgagcaccgtgcccacccagcccgacaaccccttcagccaccccgacaagctgaagagaatgagcaagagcgtgcccgccttcctgcaggacgagagcgacgacagagagaccgacaccgccagcgagagcagctaccagctgagcagacacaagaagagccccagcagcctgaccaacctgagcagcagcagcggcatgaccagcctgagcagcgtgagcggcagcgtgatgagcgtgtacagcggcgacttcggcaacctggaggtgaagggcaacatccagttcgccatcgagtacgtggagagcctgaaggagctgcacgtgttcgtggcccagtgcaaggacctggccgccgccgacgtgaagaagcagagaagcgacccctacgtgaaggcctacctgctgcccgacaagggcaagatgggcaagaagaagaccctggtggtgaagaagaccctgaaccccgtgtacaacgagatcctgagatacaagatcgagaagcagatcctgaagacccagaagctgaacctgagcatctggcacagagacaccttcaagagaaacagcttcctgggcgaggtggagctggacctggagacctgggactgggacaacaagcagaacaagcagctgagatggtaccccctgaagagaaagaccgcccccgtggccctggaggccgagaacagaggcgagatgaagctggccctgcagtacgtgcccgagcccgtgcccggcaagaagctgcccaccaccggcgaggtgcacatctgggtgaaggagtgcctggacctgcccctgctgagaggcagccacctgaacagcttcgtgaagtgcaccatcctgcccgacaccagcagaaagagcagacagaagaccagagccgtgggcaagaccaccaaccccatcttcaaccacaccatggtgtacgacggcttcagacccgaggacctgatggaggcctgcgtggagctgaccgtgtgggaccactacaagctgaccaaccagttcctgggcggcctgagaatcggcttcggcaccggcaagagctacggcaccgaggtggactggatggacagcaccagcgaggaggtggccctgtgggagaagatggtgaacagccccaacacctggatcgaggccaccctgcccctgagaatgctgctgatcgccaagatcagcaagtag

SEQ ID NO: 61714 - DNA, 2805 bp, Artificial Sequence
  derived and/or modified sequence
atgatcgatttgagcttccttaccgaagaagagcaggaggccatcatgaaagtgctccagcgcgacgccgcccttaaacgggcagaagaagagagggtaaggcatctccccgagaaaatcaaagacgaccagcaacttaagaacatgtccggccagtggttctacgaagctaaggccaagagacatcgagacaagatccatggcgctgatataatacgagcctctatgaggaagaagcggccacagattgccgctgaacagagtaaagatagggaaaacggcgcaaaagagtcttgggtcaacaacgtgaacaaggacgcctttctccccccagaactcgctggcgtcgtggaggagcccgaagaagacgctgcccctgcaagtcccagcagcagcgttgtgaatcctgctagcagcgtgatcgacatgtcacaagagaatactagaaaaccaaatgtctctccggaaaagcgcaagaacccattcaacagctcaaagctgcccgagggtcactcttcgcagcagacaaaaaatgagcagtctaaaaacgggcggactgggctgtttcaaacatcaaaggaggatgaattgagcgagagtaaggagaaaagtacagtcgcggacacctctatccaaaagctggagaaatccaagcagactctccccgggttgtctaacggaagtcagataaaggctcccatcccaaaggccaggaaaatgatctataaatccaccgaccttaataaagacgacaatcagtcatttccaaggcaacgcacagactccctgaaggccaggggtgctccaaggggcattctgaagcgcaactcaagctcgtcttccaccgactccgaaaccctccgttataaccacaactttgaaccaaaaagtaaaatcgtgagtcctggtctgactatacatgaacgcataagcgagaaagagcattctcttgaagacaatagttctccaaacagcctggaacccctaaaacatgtccggttttccgccgtgaaggatgagctgccgcagagccctgggctgatccacggtcgcgaggtgggagaattttcagttcttgaatctgacagactgaagaacggtatggaggacgctggagatacggaggaatttcagagcgaccctaagccctcacaatataggaagccctctctgtttcatcagtctacctcttctccatatgtgtcgaaaagtgagacgcatcagcctatgactagtggtagttttcccattaatggcctgcactcacactctgaggtgttgaccgctcgaccccagagcatggaaaatagcccaacaatcaacgaaccgaaggacaaatctagtgagttgacacgcctggagagtgtgctgccacgaagcccagctgatgagctctcccattgtgtagagccagaaccctcccaggtacctgggggaagctcacgcgaccgacagcagggatccgaggaagaaccatctccagtgctgaaaactctcgagcggtcagcagctcggaagatgccgtctaagtccttggaagacatctcctcagattcgagcaatcaggccaaggtggataaccagccagaggagctcgtgaggagcgctgaagatgtaagtacagtgcccacacagcctgacaacccattctctcatccagataagcttaaacgaatgtcaaagagcgtacctgcgtttctgcaggatgaaagtgacgaccgcgaaaccgacaccgcctctgagtccagttaccagctgagtcgccataagaagtcacctagtagcttgactaacctgtccagcagcagtgggatgacatcactcagttcagtctcaggctcagtgatgagtgtctattcaggagactttggtaacctggaagtgaaagggaacattcagtttgccatcgaatatgtcgagagcctcaaggaactgcacgtcttcgttgcccagtgcaaagacctggccgccgccgacgtgaaaaaacaaaggagtgacccctacgtgaaagcgtatttgctccccgacaagggcaaaatgggcaaaaagaaaaccttggttgtcaaaaagactcttaacccagtctacaatgaaatactgcggtacaagattgagaaacagattcttaaaacacagaagctcaacctcagcatatggcatagggatacatttaaacggaactcattcctgggcgaagtggaacttgacctggaaacatgggactgggacaacaagcagaataaacaactgcggtggtacccgctaaaaaggaaaaccgctcccgtcgcactggaggccgagaaccggggcgagatgaagctcgctctgcagtatgtgcccgagcccgttccaggcaaaaaattgccaactacgggcgaagtgcatatttgggtgaaggagtgtttggatctgccgttgttgcgaggcagtcatttaaattccttcgtcaagtgtaccatcctacctgatactagtagaaagagtaggcagaagacccgggcagtcgggaagacaacgaatccaatttttaatcacacaatggtgtatgatgggttccgcccagaggatctgatggaggcttgcgttgagctgacagtctgggatcattataagctgacgaaccagttcctaggcggcctcaggataggcttcggcaccgggaagtcctacgggacagaggtcgactggatggattccacatctgaagaggtggcactctgggaaaaaatggttaacagcccaaatacatggatcgaagccacactcccactcaggatgctcctaatagccaaaataagtaagtag

SEQ ID NO: 61715 - DNA, 2805 bp, Artificial Sequence
  derived and/or modified sequence
atgattgacctgtccttcctgacagaggaggagcaggaggccatcatgaaggtgctgcagagagatgctgccctgaagagagctgaggaggagcgggtgcgccacctgcctgagaagatcaaggatgaccagcagctgaagaacatgagcggccagtggttctatgaggccaaggccaagaggcaccgggacaagatccatggagctgacatcatccgggcctccatgaggaagaagaggccccagattgctgctgagcagagcaaggaccgggagaatggagccaaggagagctgggtgaacaacgtgaacaaggatgccttcctgcccccagagctggccggcgtggtggaggagcctgaggaggatgctgccccagccagccccagcagctctgtggtgaacccagccagctctgtgattgacatgagccaggagaacaccaggaagcccaacgtgtccccagagaagaggaagaaccccttcaacagcagcaagctgcctgagggccacagcagccagcagaccaagaatgagcagagcaagaatggaagaacaggcctcttccagaccagcaaggaggatgagctgtctgagagcaaggagaagagcacagtggccgacaccagcatccagaagctggagaagagcaagcagaccctgcccggcctgagcaatggcagccagatcaaggcccccatccccaaggccaggaagatgatctacaagagcacagacctgaacaaggatgacaaccagagcttcccccggcagaggacagacagcctgaaggcccggggggccccccggggcatcctgaagaggaacagcagcagcagcagcacagacagcgagaccctgcgctacaaccacaactttgagcccaagagcaagatcgtgtccccaggcctgaccatccacgagcgcatcagcgagaaggagcacagcctggaggacaacagcagccccaacagcctggagcccctgaagcacgtgcgcttctctgctgtgaaggatgagctgccccagagccctggcctcatccacggccgggaggtgggggagttctctgtgctggagagtgaccggctgaagaatggcatggaggatgctggggacacagaggagttccagagcgaccccaagcccagccagtacaggaagcccagcctcttccaccagagcaccagcagcccctacgtgtccaagtctgagacccaccagcccatgaccagcggcagcttccccatcaatggcctgcacagccacagcgaggtgctgacagcccggccccagagcatggagaacagccccaccatcaatgagcccaaggacaagagcagcgagctgacccggctggagagcgtgctgcccaggagccctgcagatgagctgagccactgtgtggagcctgagcccagccaggtgcctgggggcagcagccgggaccggcagcagggcagcgaggaggagcccagccctgtgctgaagaccctggagaggtctgctgccaggaagatgcccagcaagagcctggaggacatcagcagtgacagcagcaaccaggccaaggtggacaaccagcctgaggagctggtgcgctctgcagaagatgtgtccacagtgcccacccagcctgacaaccccttcagccacccagacaagctgaagaggatgagcaagtctgtgcctgccttcctgcaggatgaaagtgatgaccgggagacagacacagccagcgagagcagctaccagctgagccgccacaagaagagccccagcagcctgaccaacctgagcagcagcagcggcatgaccagcctgagctctgtgtctggctctgtgatgtctgtgtacagcggggactttggaaacctggaggtgaagggcaacatccagtttgccatcgagtatgtggagagcctgaaggagctgcacgtgtttgtggcccagtgcaaggacctggccgctgctgatgtgaagaagcagaggagtgacccctacgtgaaggcctacctgctgcctgacaagggcaagatgggcaagaagaagaccctggtggtgaagaagaccctgaaccctgtgtacaatgagatcctgcgctacaagattgagaagcagatcctgaagacccagaagctgaacctgagcatctggcaccgggacaccttcaagaggaacagcttcctgggggaggtggagctggacctggagacctgggactgggacaacaagcagaacaagcagctgcgctggtaccccctgaagaggaagacagcccctgtggccctggaggctgaaaatagaggagagatgaagctggccctgcagtatgtgcctgagcctgtgcctgggaagaagctgcccaccactggagaggtgcacatctgggtgaaggagtgcctggacctgcccctgctgcggggcagccacctgaacagctttgtgaagtgcaccatcctgcctgacaccagcaggaagagccggcagaagaccagggctgtgggcaagaccaccaaccccatcttcaaccacaccatggtgtatgatggcttccggcctgaggacctgatggaggcctgtgtggagctgactgtgtgggaccactacaagctgaccaaccagttcctgggcggcctgcgcatcggcttcggcaccgggaagagctatggaacagaggtggactggatggacagcaccagcgaggaggtggccctgtgggagaagatggtgaacagccccaacacctggattgaggccaccctgcccctgaggatgctgctgattgccaagatcagcaagtag

SEQ ID NO: 61716 - DNA, 2805 bp, Artificial Sequence
  derived and/or modified sequence
atgatcgacctgagcttcctgaccgaggaggagcaggaggccatcatgaaagtcctccaacgcgacgcggcacttaaaagggccgaagaagagcgcgtccggcacttgcccgagaagattaaggacgaccagcagttgaagaatatgagtggccagtggttttacgaggcgaaggccaagcggcaccgtgacaagatacacggggctgacattattcgcgcctccatgcgcaagaaacggccacagattgccgcggagcagtcgaaagaccgggagaatggcgccaaagagagctgggtgaataacgtcaataaagatgccttcctgccacctgagctcgccggggtcgtcgaggaacccgaggaggacgccgctcctgcctcccctagttcatcagtcgtgaatcctgcatcaagcgtgattgatatgtctcaagagaacactaggaaacctaacgtgtcaccagagaagaggaaaaatcctttcaattccagtaagcttcccgaaggccacagttcgcagcaaaccaaaaacgagcaaagtaagaacggaaggacagggcttttccagacctccaaagaagatgaacttagcgaatcaaaggaaaaatctaccgtggctgatacaagcatacaaaaactcgagaagagcaagcagacactacctggcttaagtaatgggagccaaatcaaagctccaataccaaaggctcgcaaaatgatatataaatccacagatctgaataaggacgataatcagtcttttccaaggcagcgcacagattcccttaaagcccgaggggcacctagaggaattctgaaacggaacagctcaagttcaagcacagactccgagaccctgcggtacaaccataacttcgaacccaagtctaaaatcgtgtctcctgggcttaccattcacgagcgcattagcgaaaaagagcattccctggaagataacagcagtcccaatagcttggagcctctgaagcacgtcaggttttccgccgtcaaagatgagctgccacagtcccctgggctgatccacggtcgggaagtcggtgagttctctgtactggagtcggatcgcctgaaaaatggtatggaagacgccggcgacacagaagaatttcagagcgaccctaagccttcacagtatcgcaagcctagcctgtttcaccaaagtaccagcagcccttatgtctccaaaagcgagactcatcaacctatgacctcaggatcattcccgatcaatgggttgcactcacactcggaagtgctcacagcccgaccccagagcatggagaattctcctaccataaatgagcccaaagataagtcctcagaactcacaagattagagagcgtgctgcctcgttccccggcagatgagcttagccattgtgtggagcccgagccctcacaggttcccggcggaagctctcgcgaccggcagcaaggttcagaagaagaaccatctccggtactgaagacactggagaggtctgccgcaagaaagatgccctcaaagtcactggaggatatttcctcggacagctcaaaccaggctaaagtcgacaatcagcccgaagaattggtgaggtctgcggaggacgtgagcaccgtgcccacacagcccgataatccattcagccacccagataaactgaagcgcatgagcaagagcgtgccagccttcctccaggatgagtcagacgacagggagaccgatacggcatccgagagctcctatcagttatcccgccacaagaagtcaccttcctcactcaccaatctcagctctagcagcgggatgacttctctgagtagcgtatctggaagtgtgatgtctgtctattccggtgactttggcaacctcgaggttaaaggcaacatacagttcgcgattgagtacgttgagtcgctgaaggagctccacgtgtttgtggcccaatgcaaggacttggcggccgcagacgtaaagaagcaaagatctgatccctacgtaaaggcttacctgctcccggataaggggaagatggggaaaaagaaaactttggtcgttaagaaaactctgaatccggtttacaacgagatcctacggtacaaaatcgagaagcagatcttaaaaacccaaaagctaaacctgtcgatctggcatcgggacacattcaagagaaatagcttcttaggtgaggtggagctggatctggagacatgggattgggacaacaagcaaaacaaacaactgagatggtacccgctaaaaagaaagactgcaccagtggctctggaggccgagaacagaggtgaaatgaaacttgctctccagtatgtcccggaacccgtccccggaaaaaagctgcctactacaggagaggtccatatttgggttaaggagtgccttgatttaccccttttgcgtggttctcaccttaattccttcgtcaaatgtacgatcctgccggacaccagccgcaagtcgagacagaaaacccgagccgtgggtaagacgaccaaccctatctttaatcatactatggtgtatgatggttttcgccccgaggacctgatggaagcctgcgtcgaattgacagtgtgggaccactataaactgactaatcagtttctgggagggctgaggattgggttcggtacaggcaaatcttacggtaccgaagtcgactggatggattctacctccgaagaggtggccctgtgggagaagatggtcaatagcccaaatacatggatcgaggcgaccttgcctctgaggatgttactgatcgcgaaaatctccaaatag

SEQ ID NO: 61717 - DNA, 2805 bp, Artificial Sequence
  derived and/or modified sequence
atgatcgatttgagttttcttacggaggaagaacaggaggccatcatgaaagtgctacagagggatgcagcgttgaagcgagcagaggaggagcgagtccggcacttgcccgaaaagataaaggacgatcagcaactgaaaaacatgtcagggcagtggttttatgaggcaaaggccaaaagacaccgggacaagattcatggcgctgacattatccgggctagtatgcgaaagaaacggcctcagatcgccgctgagcaatccaaggatcgggaaaacggtgcaaaggagtcttgggtgaacaatgttaataaggacgcttttctacccccagaacttgccggagttgtggaagagccggaggaagacgctgcacctgcttccccaagcagctcggtggtcaatcccgctagttccgtgattgacatgtcccaagaaaacacacggaagccaaacgtgtctcccgaaaagaggaagaacccttttaactcctcgaagctgcccgagggtcattcctctcaacagaccaagaatgaacaatctaaaaatggccgtacaggtctattccagacttctaaggaggacgagctatcggagtcaaaggaaaagtccaccgtggcagacacaagtatccagaagctggaaaagtctaaacagaccctcccaggcctctccaacggctcccagattaaggcccctatcccgaaggcccgtaaaatgatatacaaaagcacagacctaaacaaggacgacaaccagagttttccgcgtcaaagaacagactcgttgaaagccaggggtgcgcctcggggtatcctcaagagaaactcctcctctagctctacagactccgaaaccctgaggtacaatcacaatttcgaacccaaaagcaagattgtgagtccaggcctcaccatacatgaaagaatttcagagaaggagcactccctagaagataatagctccccaaactccttggagcccctgaagcatgtaagatttagcgcggttaaagacgaactgccccagtcgcctggcttaattcatggcagggaagtgggagagttctcagtgctggagagcgatagactgaagaacggcatggaggatgccggagatacggaggaatttcagtccgacccaaaaccatcccagtacagaaaaccatcactgttccaccaatctaccagcagcccttacgtgtctaaatcggaaacccatcagcctatgacaagtggatcattcccaattaacggcctacacagccattcagaagtgcttacagctaggcctcaatctatggagaacagcccaacaattaatgaacctaaggataagagcagtgagctgactagactcgaatccgtactaccgagatcccccgctgatgagctgtcacactgtgtggaacctgagccaagtcaagtgcctggcggtagctctagagacaggcagcaagggagtgaggaggagccttcgccagtgctcaagacactcgagaggtccgccgcacgtaagatgccgtctaagtcactggaggacatatccagtgacagttcaaaccaggcaaaagtggataatcagcccgaggaactggtgcggagcgccgaggacgtttcaacagtccctacccagcctgataatccattttcgcaccccgacaaactaaaacgaatgagcaagagtgtgcctgcgtttcttcaggacgagtcggatgatcgtgagactgacacagcgagcgagtcttcttatcaactctcccgccacaagaagtcaccttcctcactgactaatctgtcatcttcctctggcatgacctctctgtcgagcgtgtcgggttcagtgatgtctgtctacagcggcgatttcgggaatctagaggtcaagggaaatatccaatttgcgatcgagtatgtggagtctctgaaggagctgcatgtctttgtcgcacagtgcaaggatctcgctgccgctgacgttaagaagcaaagatccgatccctacgtcaaggcctatctgctgcctgacaaaggcaagatgggaaaaaaaaagactctggtggtgaaaaaaactttgaaccctgtgtacaatgagattctgcgctacaaaatcgagaaacagatactgaaaacccaaaagcttaatctgagcatatggcaccgtgataccttcaagaggaatagcttccttggcgaagtggagttagatttggaaacctgggattgggataataaacaaaataagcagctgaggtggtatccactcaagagaaagacagcccctgtagcgctggaggcagaaaatagaggggagatgaagctggcgctccagtacgtgcctgaacccgtgcctggcaagaagctcccaactacaggcgaggtgcatatctgggtcaaagaatgtctggacctccccctgctgcggggaagccacttaaattccttcgtgaagtgtactatattgccagatacgagcagaaagtctcgacagaaaacaagagcagttggtaagacgacaaatcctatcttcaaccacacaatggtttacgacgggtttcgcccagaagacctgatggaagcctgtgtagagctcaccgtttgggatcactataagcttacgaatcaattcctgggaggcttgcgaatagggttcgggactggcaaatcatacggcacagaagtggattggatggatagcacatccgaagaggttgccctttgggagaagatggtgaactctcccaatacatggatcgaggccacactcccacttcgcatgctcttgatagctaagatttcaaaatag

SEQ ID NO: 61718 - DNA, 740 bp, Artificial Sequence
  derived and/or modified sequence
cctgcacgctcccttccaaatactgatacccactctcacactagcctgccaagattccacttagcagctggtccccagttacatctcttcagttgacttcccaagcaagcctcccagaggcatatgtgaatgatgatgcacacacacaaatatttgttaatgaccatgggtttgggaaggtgttagtcatggctagcatcataccctttacagaagaatagagaggctgttgcagccccgtgctttctcctgctgctggccgattgcttgctctgaactaaccctctaacccttgggagtctgtgtgcagcagtgatatcaagcaaaagtagataatcagccagaagaattagtgcgtagtgctgaagatgtttccacagtgcctacacaacctgataatccattttctcaccctgacaaactcaaaaggatgagcaagtctgttccagcatttctccaagatgagagtgatgacagagaaacagatacagcatcagaaagcagttaccagctcagcagacacaagaagagcccgagctctttaaccaatcttagcagctcctctggcatgacgtccttgtcttctgtgagtggcagtgtgatgagtgtttatagtggagactttggcaatctggaagttaaaggaaatattcagtttgcaattgaatatgtggagtcactgaaggagttgcatgtttttgtggcccagtgtaaggacttagcagcagcggatgtaaaaa

SEQ ID NO: 61719 - DNA, 3536 bp, Artificial Sequence
  derived and/or modified sequence
ggaacaagcgacctgtttggcaaggaatacagcatccttctgagagcctcttctcgacactatcccacagaccaggacttcctcatgggaaagagcacttaggatcttgctatcagctgccctaaacttttgctgagccaaaataagactttgatgcagaactgaacaagatatttcatttttgtgtgttttaatcttcctggttgcagtcttagttgttcagccctgagaattttgagccacatttgttgctattatttttgcatgcacttttcaaaatgattgacttaagcttcctgactgaagaggaacaagaggccatcatgaaggttttgcagcgggatgctgctctgaagagggccgaagaagagagagtcagacatttgcctgaaaaaattaaggatgaccagcagctgaagaatatgagtggccaatggttttatgaagccaaggcaaaaaggcacagggacaaaatccatggcgcagatatcatcagagcatctatgagaaagaagaggccccagatagcagctgagcagagtaaagacagagaaaatggggcaaaggaaagctgggtgaataatgtcaacaaagatgctttccttcctccagagctggctggcgttgtagaagagccagaagaagatgcagcaccagcaagcccgagttccagtgtggtaaatccagcttccagtgtgattgatatgtcccaggaaaacacaaggaaaccaaatgtgtctccagagaagaggaagaatccgtttaatagctccaagttgccagaaggtcactcatcacaacaaactaaaaatgaacagtcaaaaaatggaagaactggtttatttcagacttcaaaagaggatgaattgtcagagtcaaaagaaaagtcaactgtcgcagatacttcaatccaaaagttagagaaatcaaagcagactttgccaggcctttcaaatgggtcccaaatcaaggctccaatccccaaagccaggaagatgatctacaaatcaactgatttaaacaaagatgataaccagtcttttcctagacaaaggacagactccctgaaagcgagaggggctccgagagggatcctcaagcgcaactccagttccagtagcacagactcagaaacccttcgttataatcacaactttgaacccaaaagcaaaattgtgtcacctggcctaaccatccatgagagaatttctgagaaggagcattctttagaagacaactcttccccaaactccctggagccattaaagcatgtgagattctctgcagtgaaggatgagcttccacagagtcctgggctaatccatggtcgggaagtaggagaatttagtgttttagaatctgacagattgaaaaatggaatggaagatgcaggggacacagaagagtttcagagtgaccctaagccttctcaatacagaaagccttcgctttttcatcaatcaacctcaagcccatatgtatcaaaaagtgaaacacatcagccaatgacttctggttcttttccaattaatgggctgcattctcattcagaagttttaactgcaagaccacagtctatggagaattcaccaaccatcaatgaacccaaagataaatcatcagaattaacaaggcttgaatctgtattacccagaagccctgctgatgaactgtctcattgtgttgagcctgagccatctcaggtgccaggtggcagttctagagaccgtcagcaaggttcagaagaagaacccagtcctgttttgaaaactttggaaaggagtgccgctaggaaaatgccttccaaaagtctagaagacatttcatcagattcatcaaatcaagcaaaagtagataatcagccagaagaattagtgcgtagtgctgaagatgtttccacagtgcctacacaacctgataatccattttctcaccctgacaaactcaaaaggatgagcaagtctgttccagcatttctccaagatgagagtgatgacagagaaacagatacagcatcagaaagcagttaccagctcagcagacacaagaagagcccgagctctttaaccaatcttagcagctcctctggcatgacgtccttgtcttctgtgagtggcagtgtgatgagtgtttatagtggagactttggcaatctggaagttaaaggaaatattcagtttgcaattgaatatgtggagtcactgaaggagttgcatgtttttgtggcccagtgtaaggacttagcagcagcggatgtaaaaaaacagcgttcagacccatatgtaaaggcctatttgctaccagacaaaggcaaaatgggcaagaagaaaacactcgtagtgaagaaaaccttgaatcctgtgtataacgaaatactgcggtataaaattgaaaaacaaatcttaaagacacagaaattgaacctgtccatttggcatcgggatacatttaagcgcaatagtttcctaggggaggtggaacttgatttggaaacatgggactgggataacaaacagaataaacaattgagatggtaccctctgaagcggaagacagcaccagttgcccttgaagcagaaaacagaggtgaaatgaaactagctctccagtatgtcccagagccagtccctggtaaaaagcttcctacaactggagaagtgcacatctgggtgaaggaatgccttgatctaccactgctaaggggaagtcatctaaattcttttgttaaatgtaccatccttccagatacaagtaggaaaagtcgccagaagacaagagctgtagggaaaaccaccaaccctatcttcaaccacactatggtgtatgatgggttcaggcctgaagatctgatggaagcctgtgtagagcttactgtctgggaccattacaaattaaccaaccaatttttgggaggtcttcgtattggctttggaacaggtaaaagttatgggactgaagtggactggatggactctacttcagaggaagttgctctctgggagaagatggtaaactcccccaatacttggattgaagcaacactgcctctcagaatgcttttgattgccaagatttccaaatgagcccaaattccactggctcctccactgaaaactactaaaccggtggaatctgatcttgaaaatctgagtaggtggacaaatatcctcactttctatctattgcacctaaggaatactacacagcatgtaaaagtcaatctgcatgtgcttctttgattacaaggcccaagggatttaaatataacaaaatgtgtaatttgtgactctaatattaaataagatatttgaacaagctaggaaaattgaatttctgctgctgcttcaaagaaaaagctgccccagagcattaaacatggggtattgttaagaagcaaaatgttcttgtttgccatcatgtgtttcacaccacaattctgtgccacagttaagagggtctggtacccttgcaggacctttgtaggttgtgggaaaaagtcgcagaaagatactcaaagtggagcagggaatggagac

SEQ ID NO: 61720 - DNA, 483 bp, Artificial Sequence
  derived and/or modified sequence
atgagcaagagcgtgcccgccttcctgcaggacgaggtgagcggcagcgtgatgagcgtgtacagcggcgacttcggcaacctggaggtgaagggcaacatccagttcgccatcgagtacgtggagagcctgaaggagctgcacgtgttcgtggcccagtgcaaggacctggccgccgccgacgtgaagaagcagagaagcgacccctacgtgaaggcctacctgctgcccgacaagggcaagatgggcaagaagaagaccctggtggtgaagaagaccctgaaccccgtgtacaacgagatcctgagatacaagatcgagaagcagatcctgaagacccagaagctgaacctgagcatctggcacagagacaccttcaagagaaacagcttcctgggcgaggtggagctggacctggagacctgggactgggacaacaagcagaacaagcagctgagatggtaccccctgaagagaaagtag

SEQ ID NO: 61721 - DNA, 1011 bp, Artificial Sequence
  derived and/or modified sequence
atgagcaagagcgtgcccgccttcctgcaggacgaggtgagcggcagcgtgatgagcgtgtacagcggcgacttcggcaacctggaggtgaagggcaacatccagttcgccatcgagtacgtggagagcctgaaggagctgcacgtgttcgtggcccagtgcaaggacctggccgccgccgacgtgaagaagcagagaagcgacccctacgtgaaggcctacctgctgcccgacaagggcaagatgggcaagaagaagaccctggtggtgaagaagaccctgaaccccgtgtacaacgagatcctgagatacaagatcgagaagcagatcctgaagacccagaagctgaacctgagcatctggcacagagacaccttcaagagaaacagcttcctgggcgaggtggagctggacctggagacctgggactgggacaacaagcagaacaagcagctgagatggtaccccctgaagagaaagaccgcccccgtggccctggaggccgagaacagaggcgagatgaagctggccctgcagtacgtgcccgagcccgtgcccggcaagaagctgcccaccaccggcgaggtgcacatctgggtgaaggagtgcctggacctgcccctgctgagaggcagccacctgaacagcttcgtgaagtgcaccatcctgcccgacaccagcagaaagagcagacagaagaccagagccgtgggcaagaccaccaaccccatcttcaaccacaccatggtgtacgacggcttcagacccgaggacctgatggaggcctgcgtggagctgaccgtgtgggaccactacaagctgaccaaccagttcctgggcggcctgagaatcggcttcggcaccggcaagagctacggcaccgaggtggactggatggacagcaccagcgaggaggtggccctgtgggagaagatggtgaacagccccaacacctggatcgaggccaccctgcccctgagaatgctgctgatcgccaagatcagcaagtag

SEQ ID NO: 61722 - DNA, 483 bp, Artificial Sequence
  derived and/or modified sequence
atgagtaaaagcgtaccagcatttctgcaggatgaagtgagcggcagtgtgatgtccgtgtatagtggagactttggaaacctggaggtcaaaggcaacatccagtttgcaatcgaatatgtcgagtccctgaaagaattacatgtgtttgtggctcaatgtaaggacttagccgctgcagacgttaagaaacagcggagcgatccctatgtcaaagcctatctgctgcctgacaagggaaaaatgggcaagaagaagaccttagttgtaaagaagactctgaatcccgtatacaacgaaattctgcgttacaagatcgagaaacagatcctgaaaacgcagaagctcaacttgtcgatctggcatagggacaccttcaaaaggaattcattcctcggggaggtggagctagacttggagacgtgggactgggataataagcaaaacaagcagctgcgctggtatcccctcaagcgcaagtag

SEQ ID NO: 61723 - DNA, 1011 bp, Artificial Sequence
  derived and/or modified sequence
atgagcaagagcgtacccgcctttcttcaggacgaagtgtccggcagtgtgatgtcggtgtactctggggactttggcaacctggaagtgaagggcaacatacagttcgctatcgaatatgtggaaagcttaaaagagctgcacgtcttcgttgcacagtgcaaagatctggcagccgccgacgttaagaaacagcgctccgacccttacgtcaaagcttatcttctgccggacaagggcaaaatgggaaaaaaaaaaacgctcgtggtgaaaaaaacactgaatcctgtatataacgagatcttaaggtataagatagagaaacagattctcaaaacccagaaactgaacctctcgatttggcatcgcgatacattcaagcgaaactccttcctaggcgaagttgagctggatctcgagacttgggattgggataacaagcaaaacaaacagctcaggtggtaccctttgaaaaggaagactgcccccgttgctcttgaggccgagaacagaggcgaaatgaagttagctctacagtacgtgcccgagcccgtgcccggaaagaagctgccgactaccggagaagtgcacatctgggttaaagaatgtctggacctgcctctcttacgcggatcacatttgaattcatttgtaaaatgcacaatattgccagacacttcccgtaagagcagacagaagacacgcgccgtcggaaaaacaactaatccaatcttcaatcacacaatggtatatgatgggttccgccccgaggacttaatggaagcatgtgtggaactgaccgtctgggaccattataaactaactaatcagtttctgggaggactccggataggcttcggaaccggaaaatcatatggcactgaggtcgactggatggattcaactagtgaggaagttgccctgtgggaaaaaatggtgaactctccgaacacctggatcgaagccacactgcccttgcgcatgctcctcatcgccaagattagcaaatag

SEQ ID NO: 61724 - DNA, 483 bp, Artificial Sequence
  derived and/or modified sequence
atgagcaagtctgtgcctgccttcctgcaggatgaggtgtctggctctgtgatgtctgtgtacagcggggactttggaaacctggaggtgaagggcaacatccagtttgccatcgagtatgtggagagcctgaaggagctgcacgtgtttgtggcccagtgcaaggacctggccgctgctgatgtgaagaagcagaggagtgacccctacgtgaaggcctacctgctgcctgacaagggcaagatgggcaagaagaagaccctggtggtgaagaagaccctgaaccctgtgtacaatgagatcctgcgctacaagattgagaagcagatcctgaagacccagaagctgaacctgagcatctggcaccgggacaccttcaagaggaacagcttcctgggggaggtggagctggacctggagacctgggactgggacaacaagcagaacaagcagctgcgctggtaccccctgaagaggaagtag

SEQ ID NO: 61725 - DNA, 1011 bp, Artificial Sequence
  derived and/or modified sequence
atgagcaagtctgtgcctgccttcctgcaggatgaggtgtctggctctgtgatgtctgtgtacagcggggactttggaaacctggaggtgaagggcaacatccagtttgccatcgagtatgtggagagcctgaaggagctgcacgtgtttgtggcccagtgcaaggacctggccgctgctgatgtgaagaagcagaggagtgacccctacgtgaaggcctacctgctgcctgacaagggcaagatgggcaagaagaagaccctggtggtgaagaagaccctgaaccctgtgtacaatgagatcctgcgctacaagattgagaagcagatcctgaagacccagaagctgaacctgagcatctggcaccgggacaccttcaagaggaacagcttcctgggggaggtggagctggacctggagacctgggactgggacaacaagcagaacaagcagctgcgctggtaccccctgaagaggaagacagcccctgtggccctggaggctgaaaatagaggagagatgaagctggccctgcagtatgtgcctgagcctgtgcctgggaagaagctgcccaccactggagaggtgcacatctgggtgaaggagtgcctggacctgcccctgctgcggggcagccacctgaacagctttgtgaagtgcaccatcctgcctgacaccagcaggaagagccggcagaagaccagggctgtgggcaagaccaccaaccccatcttcaaccacaccatggtgtatgatggcttccggcctgaggacctgatggaggcctgtgtggagctgactgtgtgggaccactacaagctgaccaaccagttcctgggcggcctgcgcatcggcttcggcaccgggaagagctatggaacagaggtggactggatggacagcaccagcgaggaggtggccctgtgggagaagatggtgaacagccccaacacctggattgaggccaccctgcccctgaggatgctgctgattgccaagatcagcaagtag

SEQ ID NO: 61726 - DNA, 483 bp, Artificial Sequence
  derived and/or modified sequence
atgagcaagagcgtgcccgccttcctgcaggacgaggtgagcggcagcgtcatgtctgtgtactctggtgactttggcaacctagaagtgaagggtaacattcaatttgccatagagtacgtagagtcacttaaggagttacacgtcttcgtagcccagtgtaaagacctcgccgctgccgacgtaaaaaaacaaagatccgacccttacgtaaaagcatacctcttacctgataagggaaaaatggggaaaaaaaaaaccctcgtcgttaaaaagactttaaaccccgtgtataacgaaattttgaggtacaagatcgagaagcagatcctcaagacccagaagttgaatctgagtatttggcatagagacacatttaagagaaattcattcctcggagaagttgaactggacctggagacgtgggactgggacaataaacagaacaaacagcttaggtggtacccactgaagcggaaatag

SEQ ID NO: 61727 - DNA, 1011 bp, Artificial Sequence
  derived and/or modified sequence
atgagcaagagcgtgcccgccttcctgcaggacgaggtgagcggcagtgttatgtcagtttactccggtgactttggcaacctggaggtgaagggtaatatccagttcgctatcgaatacgtggagtcactgaaggaactccatgtgttcgtggcgcaatgcaaggatctcgccgccgcagacgtcaaaaaacagagatcagacccttacgtcaaagcatacctgctccccgataagggtaagatggggaaaaagaaaaccctcgtggtgaagaaaactctaaacccagtgtacaacgaaattctacggtacaaaatcgagaagcagatactcaagacgcagaaattgaatctatctatttggcaccgcgatacattcaagcggaattccttcttaggcgaggtggaattagatttggagacctgggattgggacaacaagcaaaacaagcagttgcgctggtatccgcttaagcggaaaacagcccctgtggcgttggaggctgaaaacagaggcgagatgaagcttgccctccagtacgtgcccgaacccgtgcccggcaagaaattacccaccacaggggaggtgcacatctgggttaaggaatgcctggacctgccgctgttaagggggtcacacctgaactcattcgtcaaatgtacaattctgcccgacacgagtcgcaagagccggcaaaagacccgcgcagtagggaagacaacaaatcctatctttaaccataccatggtgtatgatggctttcgccctgaagatctcatggaggcatgcgtcgagctaactgtctgggaccactacaagttgacgaaccaatttctggggggtctgagaatcggttttggaacaggaaaaagctacgggacagaagtggactggatggattcgacttctgaagaggtggccctgtgggaaaaaatggtcaattcacccaacacgtggatcgaggcaacactgcctctcagaatgctactgattgcaaaaatcagcaaatag

SEQ ID NO: 61728 - DNA, 483 bp, Artificial Sequence
  derived and/or modified sequence
atgtctaaaagcgtacctgcattcctgcaggacgaggtgtccgggtccgttatgtcagtatactcaggggactttgggaacctcgaggtgaagggaaatattcagtttgccatcgagtatgtcgagtcattgaaggagctgcacgtcttcgtcgcgcaatgtaaggacttggccgctgccgacgtgaagaagcagcgcagcgacccatacgtgaaagcgtacctgttacctgataaaggcaaaatgggcaaaaagaagacactggtggtgaaaaagaccttgaatcccgtgtacaacgagatccttaggtacaaaattgagaaacagatcctgaaaactcaaaagttgaacctcagtatctggcatagggatacattcaagagaaatagtttcttaggtgaagtcgagctggacctggagacctgggactgggataacaagcaaaataagcagcttcgctggtaccccttaaaacgaaaatag

SEQ ID NO: 61729 - DNA, 1011 bp, Artificial Sequence
  derived and/or modified sequence
atgtccaagtctgtgcctgcttttttgcaggacgaagtgagtggctccgtgatgtctgtttactccggggactttggaaatctcgaggttaaaggaaatattcaatttgccatcgagtacgtcgagtccttaaaggagctgcatgtgtttgtcgcacagtgtaaggacctagctgctgcagatgtaaagaaacagcggtcagatccttatgtgaaagcttacttacttcctgacaagggaaagatgggtaagaaaaaaacactggttgtgaagaaaactctgaatcctgtatacaacgaaatcctgcgctataagatagagaagcagattttgaagacgcagaaactgaatctcagtatatggcatagagatacatttaagcgcaacagcttcctgggagaggtggaactggatctcgaaacctgggactgggacaataagcagaacaagcagcttcggtggtatcccctgaaaagaaagacagcccctgtggccctggaagctgagaacaggggggagatgaaattggcgctccaatatgtgccagaacccgtgcccggtaagaaactccccactacaggagaagtccacatatgggtcaaagagtgtctggacctgcccctcttaaggggctcccatctcaactccttcgtgaagtgcactattctcccagacacatctaggaaaagccgccaaaagacccgggcagtgggtaaaacaaccaaccccatttttaatcatactatggtctatgatgggttcagaccagaggatttgatggaagcatgtgttgaattaaccgtttgggaccactataaactgacgaatcagttcctgggcggtctcagaatcggcttcggcacgggcaagtcttacggcacagaggtcgactggatggactccaccagtgaggaagtggctctctgggaaaagatggtaaactccccaaatacctggattgaggccactctgccccttcggatgcttctcatcgccaaaattagtaagtag

SEQ ID NO: 61730 - protein, 935 aa, Artificial Sequence
  derived and/or modified sequence
MIDLSFLTEEEQEAIMKVLQRDAALKRAEEERVRHLPEKIKDDQQLKNMSGQWFYEAKAKRHRDKIHGADIIRASMRKKRPQIAAEQSKDRENGAKESWVNNVNKDAFLPPELAGVVEEPEEDAAPASPSSSVVNPASSVIDMSQENTRKPNVSPEKQRKNPFNSSKLPEGHSSQQTKNEQSKNGRTGLFQTSKEDELSESKEKSTVADTSIQKLEKSKQTLPGLSNGSQIKAPIPKARKMIYKSTDLNKDDNQSFPRQRTDSLKARGAPRGILKRNSSSSSTDSETLRYNHNFEPKSKIVSPGLTIHERISEKEHSLEDNSSPNSLEPLKHVRFSAVKDELPQSPGLIHGREVGEFSVLESDRLKNGMEDAGDTEEFQSDPKPSQYRKPSLFHQSTSSPYVSKSETHQPMTSGSFPINGLHSHSEVLTARPQSMENSPTINEPKDKSSELTRLESVLPRSPADELSHCVEPEPSQVPGGSSRDRQQGSEEEPSPVLKTLERSAARKMPSKSLEDISSDSSNQAKVDNQPEELVRSAEDVSTVPTQPDNPFSHPDKLKRMSKSVPAFLQDESDDRETDTASESSYQLSRHKKSPSSLTNLSSSSGMTSLSSVSGSVMSVYSGDFGNLEVKGNIQFAIEYVESLKELHVFVAQCKDLAAADVKKQRSDPYVKAYLLPDKGKMGKKKTLVVKKTLNPVYNEILRYKIEKQILKTQKLNLSIWHRDTFKRNSFLGEVELDLETWDWDNKQNKQLRWYPLKRKTAPVALEAENRGEMKLALQYVPEPVPGKKLPTTGEVHIWVKECLDLPLLRGSHLNSFVKCTILPDTSRKSRQKTRAVGKTTNPIFNHTMVYDGFRPEDLMEACVELTVWDHYKLTNQFLGGLRIGFGTGKSYGTEVDWMDSTSEEVALWEKMVNSPNTWIEATLPLRMLLIAKISK

SEQ ID NO: 61731 - protein, 155 aa, Artificial Sequence
  derived and/or modified sequence
MSKSVPAFLQDESDDRETDTASESSYQLSRHKKSPSSLTNLSSSSGMTSLSSVSGSVMSVYSGDFGNLEVKGNIQFAIEYVESLKELHVFVAQCKDLAAADVKKQRSDPYVKAYLLPDKGKMGKKKTLVVKKTLNPVYNEILRYKIEKQILKTQK

SEQ ID NO: 61732 - DNA, 2808 bp, Artificial Sequence
  derived and/or modified sequence
atgatcgacctgagcttcctgaccgaggaggagcaggaggccatcatgaaggtgctgcagagagacgccgccctgaagagagccgaggaggagagagtgagacacctgcccgagaagatcaaggacgaccagcagctgaagaacatgagcggccagtggttctacgaggccaaggccaagagacacagagacaagatccacggcgccgacatcatcagagccagcatgagaaagaagagaccccagatcgccgccgagcagagcaaggacagagagaacggcgccaaggagagctgggtgaacaacgtgaacaaggacgccttcctgccccccgagctggccggcgtggtggaggagcccgaggaggacgccgcccccgccagccccagcagcagcgtggtgaaccccgccagcagcgtgatcgacatgagccaggagaacaccagaaagcccaacgtgagccccgagaagcagagaaagaaccccttcaacagcagcaagctgcccgagggccacagcagccagcagaccaagaacgagcagagcaagaacggcagaaccggcctgttccagaccagcaaggaggacgagctgagcgagagcaaggagaagagcaccgtggccgacaccagcatccagaagctggagaagagcaagcagaccctgcccggcctgagcaacggcagccagatcaaggcccccatccccaaggccagaaagatgatctacaagagcaccgacctgaacaaggacgacaaccagagcttccccagacagagaaccgacagcctgaaggccagaggcgcccccagaggcatcctgaagagaaacagcagcagcagcagcaccgacagcgagaccctgagatacaaccacaacttcgagcccaagagcaagatcgtgagccccggcctgaccatccacgagagaatcagcgagaaggagcacagcctggaggacaacagcagccccaacagcctggagcccctgaagcacgtgagattcagcgccgtgaaggacgagctgccccagagccccggcctgatccacggcagagaggtgggcgagttcagcgtgctggagagcgacagactgaagaacggcatggaggacgccggcgacaccgaggagttccagagcgaccccaagcccagccagtacagaaagcccagcctgttccaccagagcaccagcagcccctacgtgagcaagagcgagacccaccagcccatgaccagcggcagcttccccatcaacggcctgcacagccacagcgaggtgctgaccgccagaccccagagcatggagaacagccccaccatcaacgagcccaaggacaagagcagcgagctgaccagactggagagcgtgctgcccagaagccccgccgacgagctgagccactgcgtggagcccgagcccagccaggtgcccggcggcagcagcagagacagacagcagggcagcgaggaggagcccagccccgtgctgaagaccctggagagaagcgccgccagaaagatgcccagcaagagcctggaggacatcagcagcgacagcagcaaccaggccaaggtggacaaccagcccgaggagctggtgagaagcgccgaggacgtgagcaccgtgcccacccagcccgacaaccccttcagccaccccgacaagctgaagagaatgagcaagagcgtgcccgccttcctgcaggacgagagcgacgacagagagaccgacaccgccagcgagagcagctaccagctgagcagacacaagaagagccccagcagcctgaccaacctgagcagcagcagcggcatgaccagcctgagcagcgtgagcggcagcgtgatgagcgtgtacagcggcgacttcggcaacctggaggtgaagggcaacatccagttcgccatcgagtacgtggagagcctgaaggagctgcacgtgttcgtggcccagtgcaaggacctggccgccgccgacgtgaagaagcagagaagcgacccctacgtgaaggcctacctgctgcccgacaagggcaagatgggcaagaagaagaccctggtggtgaagaagaccctgaaccccgtgtacaacgagatcctgagatacaagatcgagaagcagatcctgaagacccagaagctgaacctgagcatctggcacagagacaccttcaagagaaacagcttcctgggcgaggtggagctggacctggagacctgggactgggacaacaagcagaacaagcagctgagatggtaccccctgaagagaaagaccgcccccgtggccctggaggccgagaacagaggcgagatgaagctggccctgcagtacgtgcccgagcccgtgcccggcaagaagctgcccaccaccggcgaggtgcacatctgggtgaaggagtgcctggacctgcccctgctgagaggcagccacctgaacagcttcgtgaagtgcaccatcctgcccgacaccagcagaaagagcagacagaagaccagagccgtgggcaagaccaccaaccccatcttcaaccacaccatggtgtacgacggcttcagacccgaggacctgatggaggcctgcgtggagctgaccgtgtgggaccactacaagctgaccaaccagttcctgggcggcctgagaatcggcttcggcaccggcaagagctacggcaccgaggtggactggatggacagcaccagcgaggaggtggccctgtgggagaagatggtgaacagccccaacacctggatcgaggccaccctgcccctgagaatgctgctgatcgccaagatcagcaagtag

SEQ ID NO: 61733 - DNA, 2808 bp, Artificial Sequence
  derived and/or modified sequence
atgattgatctgtcttttcttactgaggaagaacaggaagcaatcatgaaggtgcttcaaagagatgctgccttaaagagggcagaagaggagagagtccgtcacctgccagagaaaataaaggacgatcagcagctgaagaatatgtctggacagtggttctatgaggctaaagcaaaacgacacagggacaaaattcatggagcagacatcatccgcgcctccatgcgtaaaaagcgcccccagattgctgctgaacaatccaaggacagggaaaatggggctaaggaaagctgggttaacaatgtgaacaaagacgcatttctgccgcccgaacttgctggcgttgtcgaggaacccgaagaggacgcagcccccgcttccccttctagcagtgtggtcaaccccgcgtcaagcgtgatcgacatgtctcaggagaatactagaaagcccaatgtttcccctgagaagcaacgtaaaaatcctttcaacagctcaaagttgcccgagggacacagctctcaacaaacaaagaacgagcagagcaagaatggacgcaccggtctcttccagacatcaaaggaagacgagctcagtgaaagcaaagagaagagtacagtggctgatacatctatccagaagctcgaaaagagcaagcagactctgccggggctttccaacgggagccagataaaggcaccaatcccaaaggccaggaagatgatttataagtcaactgacctgaataaggatgataatcagagcttcccccggcagagaactgatagccttaaagcgcggggcgctcctaggggaattctaaaacgcaacagcagtagcagttccactgattcggagactttaaggtataaccataacttcgaacccaaaagtaaaatcgtctctcccgggctgaccatccatgaaaggatcagcgaaaaagaacactcactcgaagataactcctcccccaacagtctggagccgttgaaacatgtaagattctctgccgtgaaagacgaattacctcagagtcccggactcattcatggcagggaggttggggagttcagcgttctagagagtgatagactgaagaatggtatggaggatgctggggatactgaggagtttcagtctgaccctaaaccctcacaatacagaaaaccgtccctgttccaccagagtacctcctctccttacgtgtcaaagagcgaaacgcaccagcccatgacatccggaagtttccccatcaacgggttgcactcccactctgaggtcctaaccgcgcgtccgcagagcatggaaaactcacccactattaacgaaccaaaagacaagtcctctgagttaactcggttagaaagcgtgctgcctaggtcgcccgcggacgagctgtcccactgcgtagagcctgaaccttcccaggttcccgggggaagttcgcgtgatagacagcaaggctctgaagaggagccttcaccggtgctgaagaccctggagcgctccgccgctagaaagatgccgtctaaaagcctggaggacatctcatccgacagtagcaaccaagccaaagtcgataaccagccagaggagttggtgcgttctgctgaagacgttagtacggtccccacacagccagataatcccttctctcatcccgataagttgaagcgcatgtccaagtctgtgcctgcatttcttcaggatgaatccgatgatcgggagactgatactgccagtgagagcagctatcagttgtcccgtcacaagaagtcccctagttccctcaccaatctctcctcctcgagtggtatgacctccctgtcgagcgtcagtggctccgtcatgtcggtgtactctggagatttcggaaatcttgaggtaaaagggaacatccaatttgcaatcgagtacgtggaatccctgaaggagcttcacgtcttcgtggctcagtgcaaggatttagccgctgccgacgtgaagaaacagaggagtgatccctacgtcaaggcatatctgctgcccgacaaagggaagatgggaaaaaagaagactttagtggtcaagaaaacattaaaccccgtgtataacgaaattctgcggtacaaaattgagaagcagattcttaaaactcagaagttgaatctcagcatttggcatagggatacatttaaacgtaactcgttcctcggcgaggttgaactcgacctcgagacctgggactgggacaacaagcagaataagcaactgcgctggtaccccctcaaaaggaaaacagctccagtggcccttgaagccgaaaacaggggtgaaatgaagctggccctgcaatacgtgcccgaacctgtgcccggaaagaaacttcccaccacaggcgaagtgcacatctgggttaaggagtgtctggacctgcccctcctccgcgggagccatctgaacagcttcgtcaaatgcacgatactcccagatacatctcgcaagtctcgccagaaaaccagagccgtcggaaaaaccacaaaccctattttcaaccataccatggtgtacgatggcttcaggcctgaagacctgatggaggcctgcgtcgagttgactgtgtgggaccactataagctcacaaaccaatttctggggggccttaggatcgggttcgggacaggtaagtcttatggtaccgaggtcgattggatggactcaacaagcgaggaagtcgccttatgggaaaaaatggtcaacagtcctaatacttggatcgaggctactctaccgctcaggatgctcctcattgcaaaaatttctaagtag

SEQ ID NO: 61734 - DNA, 2808 bp, Artificial Sequence
  derived and/or modified sequence
atgattgacctgtccttcctgacagaggaggagcaggaggccatcatgaaggtgctgcagagagatgctgccctgaagagagctgaggaggagcgggtgcgccacctgcctgagaagatcaaggatgaccagcagctgaagaacatgagcggccagtggttctatgaggccaaggccaagaggcaccgggacaagatccatggagctgacatcatccgggcctccatgaggaagaagaggccccagattgctgctgagcagagcaaggaccgggagaatggagccaaggagagctgggtgaacaacgtgaacaaggatgccttcctgcccccagagctggccggcgtggtggaggagcctgaggaggatgctgccccagccagccccagcagctctgtggtgaacccagccagctctgtgattgacatgagccaggagaacaccaggaagcccaacgtgtccccagagaagcagaggaagaaccccttcaacagcagcaagctgcctgagggccacagcagccagcagaccaagaatgagcagagcaagaatggccgcacaggcctcttccagaccagcaaagaagatgagctgtctgagagcaaggagaagagcacagtggccgacaccagcatccagaagctggagaagagcaagcagaccctgcccggcctgagcaatggcagccagatcaaggcccccatccccaaggccaggaagatgatctacaagagcacagacctgaacaaggatgacaaccagagcttcccccggcagaggacagacagcctgaaggcccggggggccccccggggcatcctgaagaggaacagcagcagcagcagcacagattctgagaccctgcgctacaaccacaactttgagcccaagagcaagatcgtgtccccaggcctgaccatccacgagcgcatcagcgagaaggagcacagcctggaggacaacagcagccccaacagcctggagcccctgaagcacgtgcgcttctctgctgtgaaggatgagctgccccagagccctggcctcatccacggccgggaggtgggggagttctctgtgctggagagtgaccggctgaagaatggcatggaggatgctggggacacagaggagttccagagcgaccccaagcccagccagtacaggaagcccagcctcttccaccagagcaccagcagcccctacgtgtccaagtctgagacccaccagcccatgaccagcggcagcttccccatcaatggcctgcacagccacagcgaggtgctgacagcccggccccagagcatggagaacagccccaccatcaatgagcccaaggacaagagcagcgagctgacccggctggagagcgtgctgcccaggagccctgcagatgagctgagccactgtgtggagcctgagcccagccaggtgcctgggggcagcagccgggaccggcagcagggcagcgaggaggagcccagccctgtgctgaagaccctggagaggtctgctgccaggaagatgcccagcaagagcctggaggacatcagcagtgacagcagcaaccaggccaaggtggacaaccagcctgaggagctggtgcgctctgcagaagatgtgtccacagtgcccacccagcctgacaaccccttcagccacccagacaagctgaagaggatgagcaagtctgtgcctgccttcctgcaggatgaaagtgatgaccgggagacagacacagccagcgagagcagctaccagctgagccgccacaagaagagccccagcagcctgaccaacctgagcagcagcagcggcatgaccagcctgagctctgtgtctggctctgtgatgtctgtgtacagcggggactttggaaacctggaggtgaagggcaacatccagtttgccattgaatatgtggagagcctgaaggagctgcacgtgtttgtggcccagtgcaaggacctggccgctgctgatgtgaagaagcagaggagtgacccctacgtgaaggcctacctgctgcctgacaagggcaagatgggcaagaagaagaccctggtggtgaagaagaccctgaaccctgtgtacaatgagatcctgcgctacaagattgagaagcagatcctgaagacccagaagctgaacctgagcatctggcaccgggacaccttcaagagaaattccttcctgggggaggtggagctggacctggagacctgggactgggacaacaagcagaacaagcagctgcgctggtaccccctgaagaggaagacagcccctgtggccctggaggccgagaacagaggagagatgaagctggccctgcagtatgtgcctgagcctgtgcctgggaagaagctgcccaccaccggggaggtgcacatctgggtgaaggaatgtctggacctgcccctgctgcggggcagccacctgaacagctttgtgaagtgcaccatcctgcctgacaccagcaggaagagccggcagaagaccagggctgtgggcaagaccaccaaccccatcttcaaccacaccatggtgtatgatggcttccggcctgaggacctgatggaggcctgtgtggagctgactgtgtgggaccactacaagctgaccaaccagttcctgggcggcctgagaattggatttggaacaggcaagagctatggaacagaggtggactggatggacagcaccagcgaggaggtggccctgtgggagaagatggtgaacagccccaacacctggattgaggccaccctgcccctgaggatgctgctgattgccaagatcagcaagtag

SEQ ID NO: 61735 - DNA, 2808 bp, Artificial Sequence
  derived and/or modified sequence
atgatcgacctgagcttcctgaccgaggaggagcaggaggccatcatgaaggtactgcagcgtgacgcggccctcaagagggccgaggaggagagggttcgccacctgcctgagaagatcaaggacgatcagcagctcaaaaacatgtcaggtcagtggttctacgaggccaaagcgaagaggcacagagacaaaattcacggggctgatatcatccgcgccagcatgcggaagaaaagaccacaaattgctgccgaacaaagtaaggatcgcgagaatggtgcgaaggagagctgggtgaataacgtgaataaggacgcgttcctgccccctgagttggctggcgtggtggaggagccggaggaagatgccgcccctgcgagcccaagttccagtgtggtgaaccccgccagcagcgttattgatatgagccaggagaatacacgaaaacccaacgttagtcctgaaaagcagagaaaaaacccctttaacagcagcaagctacccgagggacattcttcgcagcagactaagaacgagcagagcaagaatggcagaactggattgtttcaaacgtcgaaagaggatgaactctccgagtccaaggagaagtcaaccgtggcagataccagtattcagaaactggagaaatctaaacaaacactgcctggtcttagtaatggcagtcagatcaaagcccccatcccaaaggctcgcaagatgatttacaagagtacggatctcaataaagacgacaaccagagctttccacgacaacgcactgactctctgaaagcacgaggcgcaccccggggaatccttaaaaggaattcaagctcctcatctacggactcagagaccctaagatataatcacaattttgaaccgaaatctaaaatcgtgtccccgggcctgaccattcatgaaaggatcagtgagaaagagcactccctggaggacaattcaagtccaaatagcttggaaccactgaaacacgtgcgattttctgctgtgaaggacgaactcccgcagtctcccggactgatccacggcagagaggtgggggaattctccgtgttagaaagtgacaggcttaaaaacgggatggaggacgcgggagacaccgaggagtttcaatccgacccaaagccatcccagtatcggaagcccagcctgtttcatcagtcaacctctagcccatacgtgtcaaaatctgagacgcaccagcctatgaccagcggctccttccctatcaacggactgcattcccatagcgaggtactaaccgctcgaccgcagtccatggaaaattctcccacgattaatgagccgaaagataagtcatccgaactgacacgcttggagtcagtgttacctcgttcccctgcggatgagctcagtcattgcgtggaaccagaaccctcccaggtaccaggcgggtccagcagagataggcagcagggttcggaggaagagccctcgcccgtcctaaagacccttgagaggtccgcagccagaaagatgcctagtaaatcactagaagatatatcatcggattctagcaaccaggccaaagtggataaccaacctgaggaactggttagaagcgccgaggatgtttctacagtccccacacaacccgataatccattttcacatcccgataagttgaagaggatgtcaaaatccgtccccgctttccttcaagacgagtccgatgaccgggaaacggacacagccagcgagtcttcctaccagctgtcacgccataagaagtccccctcgagcctgacgaatctgtcttcaagctctgggatgacttcgctgagctcagtctccggtagcgtcatgagtgtgtattctggggatttcggaaatctagaggttaagggaaacattcaattcgcgatcgaatatgtcgaaagcctgaaagaactgcatgtgtttgtagcccagtgtaaggacctcgcagcagcagacgtgaagaaacagcgttccgacccgtacgtaaaagcctacctgctacctgataagggcaagatgggaaaaaagaagaccctagtggtcaagaagacactcaaccctgtgtacaacgagatcctgcgatacaagatcgagaagcagattctcaaaacgcagaaactgaacctgagtatctggcacagggatacctttaagcgaaattctttcctaggagaggtggaattggacttggagacttgggattgggacaataaacagaacaaacaacttcgttggtacccgctaaagcgaaaaacagcccccgttgccttggaagccgaaaacaggggcgagatgaaattggctttgcagtacgttcctgagccagtgcctggtaaaaaactgccgactaccggcgaggtgcacatctgggtgaaagagtgtttggacttgcccctgctgcggggctctcacttgaatagctttgttaagtgcactatacttccagacaccagtagaaaatccaggcagaaaactagggcagttggaaagaccaccaatcctatctttaaccacaccatggtatatgatgggttccgccctgaagatttaatggaggcctgtgtcgaactgaccgtctgggatcactacaagttgacaaatcagttcctgggtgggttgcgtatcggttttgggacaggaaagagctacgggaccgaggtagattggatggatagtacaagcgaggaggttgctctctgggaaaagatggtcaacagtccaaatacttggatcgaggccaccttgcctctcagaatgctgctcatcgccaaaatcagcaagtag

SEQ ID NO: 61736 - DNA, 2808 bp, Artificial Sequence
  derived and/or modified sequence
atgatcgaccttagttttctaactgaggaggaacaggaagctataatgaaggtgttgcagcgtgacgctgcccttaaacgggcagaggaagagagggtgcggcatctcccggaaaagatcaaggatgaccagcaactgaaaaacatgtccggccagtggttttacgaggccaaggccaagcgacaccgggacaagatccacggcgctgacatcatcagagcgtcgatgagaaaaaaacgcccacagatcgccgcagaacagtctaaagacagagaaaacggagccaaggagagctgggttaataatgttaacaaggacgcgttcctacctcctgagctagctggcgtggtggaggaaccagaagaagacgccgcaccggcatccccatcctcatcagtggtcaacccagcctcttctgtgatcgacatgtcccaggagaacaccagaaagcccaacgtttcaccagaaaagcagcggaagaatccatttaacagttctaagctcccggaggggcactcatctcaacagacgaaaaatgaacagtccaaaaatgggagaacgggcctgtttcagactagcaaggaagacgaattgtctgagtctaaggagaagagcacagtggctgacacttctatccagaaacttgaaaaatcgaaacaaaccttacctgggctgagcaacggcagccagatcaaggctcccatcccaaaggctcgcaaaatgatctacaagtccacagatctaaataaggatgataaccagtcattcccccgacagcgtaccgactccctcaaggccaggggcgcaccacgcggaatcctcaaacgaaattctagcagctcttcaaccgattcagagacactgaggtataatcataatttcgagcctaagagcaaaattgtgtccccaggcttgactatccatgagaggatttcagagaaggaacatagtctcgaagataacagtagtcctaattcgttagagcccttaaagcacgtgaggtttagcgccgttaaggacgagctcccacagagccctggcctgatccacgggagagaggttggagagttttcggttttggaatctgacagattgaaaaatggcatggaggacgccggagacaccgaggagttccagagcgaccccaaacccagccagtacagaaagccctctctgtttcaccagagcacctcaagtccgtacgtgtcaaagtcggaaacccatcagcctatgacctcaggaagcttccccatcaacgggctgcactcccatagcgaggtactcacagctcgccctcagagtatggagaactctcccactataaacgagccaaaagacaaatcctccgagctcacaaggttggaaagcgttctcccgcgatctccggctgacgaactctctcattgtgtcgagcccgagccatctcaggtacctggcggaagttctagggacagacagcagggttccgaagaagaaccttcaccagtgctcaagaccctggaaagatcggcagccagaaagatgccgagtaagtctcttgaggatatatcatcagactcaagcaaccaggcaaaagtcgacaaccagccagaagaactggtgagatccgccgaggacgtgagtactgtgcctacacagcccgacaatccttttagtcacccggataagttaaaacgaatgagtaaaagcgtcccagcattcctgcaggacgaaagcgacgacagggagaccgacacagccagcgaaagctcctaccagttgagtcggcacaagaagtctccctccagtttaaccaatctgtccagctcttcggggatgacttccctcagcagcgtctccgggtccgtgatgagcgtgtattccggcgattttggtaacctcgaggtcaagggcaatatccagttcgcaatcgaatacgtcgaatctctcaaggagttacatgtcttcgtcgcccagtgtaaggatcttgcagctgctgacgtgaagaagcagaggtccgatccttacgtaaaggcttacctgctgcctgacaagggcaaaatgggaaaaaagaagacactcgtagtaaagaaaacccttaaccctgtatacaatgaaattctgcgctataaaattgaaaagcaaatccttaagactcagaagctgaacctctccatctggcaccgcgataccttcaagcgcaattccttccttggggaggtggagctggatttagagacgtgggactgggacaataagcagaataagcaactaagatggtacccattaaagcgcaaaacggcccctgtggcgctggaagccgagaacaggggcgaaatgaaattggcactccagtacgttccagagcccgtgcctggaaaaaaactgcccactacaggcgaggttcatatctgggtgaaggagtgtttggacctccctcttctgagagggagccatttaaattctttcgtcaagtgcactatcctccccgacactagccgaaaaagcaggcagaaaaccagagctgtcgggaaaaccacaaacccaattttcaatcacacaatggtctacgacggctttcgccctgaggatctcatggaggcttgcgtggaactgaccgtctgggatcactacaagctaacaaaccagttcttgggcggtttacgcatagggttcggcacaggtaagtcatacggaaccgaagtggattggatggactctacctccgaggaggtcgccttgtgggagaagatggtgaactcaccaaatacatggatcgaggccacgttgcctctccggatgctgctcattgcaaagatctctaaatag

SEQ ID NO: 61737 - DNA, 4293 bp, Artificial Sequence
  derived and/or modified sequence
cacccgggccgtgccgccagcgtccgtcgggagagtgaaggctcgcaacgccttgcccgggggaaggtaacgcgccgcgcccggggctgcgcggtttgcaccgccaggccgagggctgggggccagaagacaagagagacggcgaggcgcgctccctgcccggcagcgactcggaggtaggtgatgctctgatgctgctgcctcttatgaattgacgacaggtgcagagagagaataaactgtgtctaagactggaccagagagtgagtgtgctggaagccaccataggaacaagcgacctgtttggcaaggaatacagcatccttctgagagcctcttctcgacactatcccacagaccaggacttcctcatgggaaagagcacttaggatcttgctatcagctgccctaaacttttgctgagccaaaataagactttgatgcagaactgaacaagatatttcatttttgtgtgttttaatcttcctggttgcagtcttagttgttcagccctgagaattttgagccacatttgttgctattatttttgcatgcacttttcaaaatgattgacttaagcttcctgactgaagaggaacaagaggccatcatgaaggttttgcagcgggatgctgctctgaagagggccgaagaagagagagtcagacatttgcctgaaaaaattaaggatgaccagcagctgaagaatatgagtggccaatggttttatgaagccaaggcaaaaaggcacagggacaaaatccatggcgcagatatcatcagagcatctatgagaaagaagaggccccagatagcagctgagcagagtaaagacagagaaaatggggcaaaggaaagctgggtgaataatgtcaacaaagatgctttccttcctccagagctggctggcgttgtagaagagccagaagaagatgcagcaccagcaagcccgagttccagtgtggtaaatccagcttccagtgtgattgatatgtcccaggaaaacacaaggaaaccaaatgtgtctccagagaagcagaggaagaatccgtttaatagctccaagttgccagaaggtcactcatcacaacaaactaaaaatgaacagtcaaaaaatggaagaactggtttatttcagacttcaaaagaggatgaattgtcagagtcaaaagaaaagtcaactgtcgcagatacttcaatccaaaagttagagaaatcaaagcagactttgccaggcctttcaaatgggtcccaaatcaaggctccaatccccaaagccaggaagatgatctacaaatcaactgatttaaacaaagatgataaccagtcttttcctagacaaaggacagactccctgaaagcgagaggggctccgagagggatcctcaagcgcaactccagttccagtagcacagactcagaaacccttcgttataatcacaactttgaacccaaaagcaaaattgtgtcacctggcctaaccatccatgagagaatttctgagaaggagcattctttagaagacaactcttccccaaactccctggagccattaaagcatgtgagattctctgcagtgaaggatgagcttccacagagtcctgggctaatccatggtcgggaagtaggagaatttagtgttttagaatctgacagattgaaaaatggaatggaagatgcaggggacacagaagagtttcagagtgaccctaagccttctcaatacagaaagccttcgctttttcatcaatcaacctcaagcccatatgtatcaaaaagtgaaacacatcagccaatgacttctggttcttttccaattaatgggctgcattctcattcagaagttttaactgcaagaccacagtctatggagaattcaccaaccatcaatgaacccaaagataaatcatcagaattaacaaggcttgaatctgtattacccagaagccctgctgatgaactgtctcattgtgttgagcctgagccatctcaggtgccaggtggcagttctagagaccgtcagcaaggttcagaagaagaacccagtcctgttttgaaaactttggaaaggagtgccgctaggaaaatgccttccaaaagtctagaagacatttcatcagattcatcaaatcaagcaaaagtagataatcagccagaagaattagtgcgtagtgctgaagatgtttccacagtgcctacacaacctgataatccattttctcaccctgacaaactcaaaaggatgagcaagtctgttccagcatttctccaagatgagagtgatgacagagaaacagatacagcatcagaaagcagttaccagctcagcagacacaagaagagcccgagctctttaaccaatcttagcagctcctctggcatgacgtccttgtcttctgtgagtggcagtgtgatgagtgtttatagtggagactttggcaatctggaagttaaaggaaatattcagtttgcaattgaatatgtggagtcactgaaggagttgcatgtttttgtggcccagtgtaaggacttagcagcagcggatgtaaaaaaacagcgttcagacccatatgtaaaggcctatttgctaccagacaaaggcaaaatgggcaagaagaaaacactcgtagtgaagaaaaccttgaatcctgtgtataacgaaatactgcggtataaaattgaaaaacaaatcttaaagacacagaaattgaacctgtccatttggcatcgggatacatttaagcgcaatagtttcctaggggaggtggaacttgatttggaaacatgggactgggataacaaacagaataaacaattgagatggtaccctctgaagcggaagacagcaccagttgcccttgaagcagaaaacagaggtgaaatgaaactagctctccagtatgtcccagagccagtccctggtaaaaagcttcctacaactggagaagtgcacatctgggtgaaggaatgccttgatctaccactgctaaggggaagtcatctaaattcttttgttaaatgtaccatccttccagatacaagtaggaaaagtcgccagaagacaagagctgtagggaaaaccaccaaccctatcttcaaccacactatggtgtatgatgggttcaggcctgaagatctgatggaagcctgtgtagagcttactgtctgggaccattacaaattaaccaaccaatttttgggaggtcttcgtattggctttggaacaggtaaaagttatgggactgaagtggactggatggactctacttcagaggaagttgctctctgggagaagatggtaaactcccccaatacttggattgaagcaacactgcctctcagaatgcttttgattgccaagatttccaaatgagcccaaattccactggctcctccactgaaaactactaaaccggtggaatctgatcttgaaaatctgagtaggtggacaaatatcctcactttctatctattgcacctaaggaatactacacagcatgtaaaagtcaatctgcatgtgcttctttgattacaaggcccaagggatttaaatataacaaaatgtgtaatttgtgactctaatattaaataagatatttgaacaagctaggaaaattgaatttctgctgctgcttcaaagaaaaagctgccccagagcattaaacatggggtattgttaagaagcaaaatgttcttgtttgccatcatgtgtttcacaccacaattctgtgccacagttaagagggtctggtacccttgcaggacctttgtaggttgtgggaaaaagtcgcagaaagatactcaaagtggagcagggaatggagacagacatcagtgatgataaaaaaaaaaatggaccttaagaaactatttactctgtaatctctaataaaatatggaattccatattagggcaatgagactgaaactactggtgtttttctgccttgagaaaacaaacagttaaaacaagcctcaaatgtattttagtgccacccactggccataggtacaattcagttgttggcttgttttgacttaattctaaaataggtctcaagcctgtatttttatgagtttatttttttaaaaccctgcatatatatgattgtttttcttataactttactatatgaaagcagcataagagtagtcacaaacatgttttgcaacaaagttttaattagaatgtaagttgctcagttatactgttcttcttatgtatgtaaaattttcgtattttgtaaaaacccttagaataaattatcatttgatttaaattgtattagaaaa

SEQ ID NO: 61738 - protein, 329 aa, Artificial Sequence
  derived and/or modified sequence
MGSPSIFVYDCSNAGLIVKSFKQFALQREQELEVAAINPNHPLAQMPLPPSMKNCIQLAACEATELLPMIPDLPADLFTSCLTTPIKIALRWFCMQKCVSLVPGVTLDLIEKIPGRLNDRRTPLGELNWIFTAITDTIAWNVLPRDLFQKLFRQDLLVASLFRNFLLAERIMRSYNCTPVSSPRLPPTYMHAMWQAWDLAVDICLSQLPTIIEEGTAFRHSPFFAEQLTAFQVWLTMGVENRNPPEQLPIVLQVLLSQVHRLRALDLLGRFLDLGPWAVSLALSVGIFPYVLKLLQSSARELRPLLVFIWAKILAVDSVSIPALLPRVM

SEQ ID NO: 61739 - protein, 1177 aa, Artificial Sequence
  derived and/or modified sequence
MESEMLQSPLLGLGEEDEADLTDWNLPLAFMKKRHCEKIEGSKSLAQSWRMKDRMKTVSVALVLCLNVGVDPPDVVKTTPCARLECWIDPLSMGPQKALETIGANLQKQYENWQPRARYKQSLDPTVDEVKKLCTSLRRNAKEERVLFHYNGHGVPRPTVNGEVWVFNKNYTQYIPLSIYDLQTWMGSPSIFVYDCSNAGLIVKSFKQFALQREQELEVAAINPNHPLAQMPLPPSMKNCIQLAACEATELLPMIPDLPADLFTSCLTTPIKIALRWFCMQKCVSLVPGVTLDLIEKIPGRLNDRRTPLGELNWIFTAITDTIAWNVLPRDLFQKLFRQDLLVASLFRNFLLAERIMRSYNCTPVSSPRLPPTYMHAMWQAWDLAVDICLSQLPTIIEEGTAFRHSPFFAEQLTAFQVWLTMGVENRNPPEQLPIVLQVLLSQVHRLRALDLLGRFLDLGPWAVSLALSVGIFPYVLKLLQSSARELRPLLVFIWAKILAVDSELVVALSHLVVQYESNFCTVALQFIEEEKNYALPSPATTEGGSLTPVRDSPCTPRLRSVSSYGNIRAVATARSLNKSLQNLSLTEESGGAVAFSPGNLSTSSSASSTLGSPENEEHILSFETIDKMRRASSYSSLNSLIGVSFNSVYTQIWRVLLHLAADPYPEVSDVAMKVLNSIAYKATVNARPQRVLDTSSLTQSAPASPTNKGVHIHQAGGSPPASSTSSSSLTNDVAKQPVSRDLPSGRPGTTGPAGAQYTPHSHQFPRTRKMFDKGPEQTADDADDAAGHKSFISATVQTGFCDWSARYFAQPVMKIPEEHDLESQIRKEREWRFLRNSRVRRQAQQVIQKGITRLDDQIFLNRNPGVPSVVKFHPFTPCIAVADKDSICFWDWEKGEKLDYFHNGNPRYTRVTAMEYLNGQDCSLLLTATDDGAIRVWKNFADLEKNPEMVTAWQGLSDMLPTTRGAGMVVDWEQETGLLMSSGDVRIVRIWDTDREMKVQDIPTGADSCVTSLSCDSHRSLIVAGLGDGSIRVYDRRMALSECRVMTYREHTAWVVKASLQKRPDGHIVSVSVNGDVRIFDPRMPESVNVLQIVKGLTALDIHPQADLIACGSVNQFTAIYNSSGELINNIKYYDGFMGQRVGAISCLAFHPHWPHLAVGSNDYYISVYSVEKRVR

SEQ ID NO: 61740 - DNA, 990 bp, Artificial Sequence
  derived and/or modified sequence
atgggaagtcctagcatctttgtgtatgactgcagcaatgccggtctcatcgtgaagtcgtttaagcagtttgccctgcagcgggagcaggagctggaagtagccgcaatcaatcccaaccaccccctcgcccagatgcctctccctcctagcatgaaaaattgcattcagctggccgcctgcgaagccacggaactgctgcctatgattcccgacctgcctgcagacctctttacctcgtgtctcactacccccattaaaatcgctctccggtggttttgcatgcagaagtgtgtgtccttagtccctggcgtgaccctggacctaattgagaagattcccggcaggctcaacgatcgcaggacacctctgggtgaactcaattggatcttcacggccattactgatacaatcgcctggaatgtattgccaagagacctcttccagaagcttttccgacaggatctgcttgtggcctcattgttccggaatttcctgttggccgagcgtatcatgagatcgtataattgcacacccgtcagcagtcccagattgccaccgacctacatgcacgcaatgtggcaggcctgggacttggctgttgacatctgcctgagtcagctgccaacaattatcgaggagggcaccgcatttaggcatagtccattctttgctgagcaacttacggcttttcaggtatggctgaccatgggcgtcgaaaatcgtaatccacccgagcagctgcctatcgtgctgcaggtgctcctctcccaggtccatcggctgcgcgccctcgatttattggggcgattccttgatctgggcccatgggccgtcagcctggctctgagtgtcgggattttcccatacgtgctgaagctcctccagagttccgctagagaattgcggcctctcctcgtctttatctgggccaaaatcctggcagtggacagtgtttctattcctgctctgctccccagggtaatgtag

SEQ ID NO: 61741 - DNA, 3534 bp, Artificial Sequence
  derived and/or modified sequence
atggaaagtgaaatgttacagtcaccactcctaggattgggggaggaagacgaagccgacctgaccgactggaacctgcctctcgccttcatgaagaagcgccattgtgaaaagattgagggatctaaaagcttggcccagagttggcgtatgaaggatcggatgaagaccgtgtccgtcgccctggttctgtgcctcaacgtgggcgtcgaccctcctgacgtcgttaaaaccacaccttgcgctcgactcgaatgttggatcgaccctctgagtatgggtcctcagaaagccctagagaccatcggtgctaacttgcaaaagcagtacgagaattggcagccgagagcacgatataagcagtcattggaccctacagtggacgaggtgaaaaagctctgtaccagcttgcgtcgaaatgcaaaagaggagagagtgttgtttcactacaacggtcacggtgtgccaaggcctaccgttaatggagaggtgtgggtgtttaataaaaactacactcaatatatccccttaagtatttatgacctccagacatggatgggcagccctagcatctttgtgtatgactgtagtaacgcggggcttatcgtgaaatccttcaagcagtttgctctccagagagagcaggagctagaagtggctgccatcaaccctaaccaccccttggcccagatgccactccccccatctatgaagaactgcatccagctggcagcctgtgaagctactgaactcttgcccatgatccctgacctccccgctgatctgttcaccagctgcctgacgaccccaatcaagatcgcgttaaggtggttttgtatgcagaaatgtgtttccctcgtacccggggtaactctcgacctgattgaaaaaattcctggtaggctgaacgatcgaagaacacctctgggagaactgaattggatatttaccgcaattacagataccatagcctggaatgttttacctagggacttgtttcagaagctgttccgacaggaccttctcgtggcgagtctatttcgcaacttccttttggcagaacgaataatgcggagctataattgtactccagtctcctcccccaggctcccgccaacatacatgcacgctatgtggcaggcgtgggacctagccgtcgatatctgcttatctcagttgcccactatcatcgaggaaggaaccgctttcaggcactctcccttcttcgctgaacagctcaccgcctttcaagtgtggctgaccatgggcgtggagaatagaaatccaccagagcaactgcctatagtgctccaagtgctgttaagccaggttcacaggctaagggcacttgacctgttgggaagattcctagatcttgggccttgggctgtgagcctcgctctttcagtcggcatctttccatacgtgcttaagcttctccagagcagcgctagggaacttcggcccctccttgtgttcatatgggccaagatcctggctgtcgatagtgagctggtcgtggcgttatcacacctggtggtccagtatgagtcgaacttttgtactgttgcgcttcagttcattgaagaggaaaagaattatgcactccccagccctgccactaccgaaggaggctcccttacacccgtgcgagattcgccttgcaccccccggctgcgaagcgtgtcatcctatgggaatataagagccgtagcaactgcgagatccctgaataagtcactgcagaatctgagcctgacggaggaatcagggggggccgtggcatttagcccaggtaatttgtccaccagttcttccgccagttccacacttggaagccctgaaaacgaggagcatatcctctcgtttgaaactattgacaagatgagacgtgcttcctcttactctagccttaacagcctgattggcgtgtcatttaacagcgtatatacccagatatggcgggtgcttctccatctcgcggctgacccctaccctgaagtgtctgatgtagcgatgaaggtgctcaattctatcgcttacaaggcaaccgtaaacgctagacctcaaagagtcctggacacaagctcactgactcagagcgcccctgcgtcgcccaccaataaaggcgtacatattcatcaggcaggggggagtcctcccgcctcatctactagctcctcttctctgacaaacgatgtagccaagcagccagtttcccgcgatctcccctcgggtcgaccaggtactacaggaccagccggtgcacagtacaccccacactcccaccagttccctcgaaccagaaaaatgttcgataaaggacccgagcaaacggccgacgatgcagatgatgcagcaggacataagtctttcatctctgccacagtccagaccgggttttgcgattggtctgcgcggtatttcgcacagcccgtcatgaagattcccgaggaacacgatctggagtctcaaatacgtaaagaacgggaatggcggtttctgcggaacagccgggtacgtcgccaggcccagcaggttatccagaagggcatcacaaggctcgacgatcaaattttcttaaaccgtaatcccggagtgccctctgtcgttaaatttcatccttttaccccttgtattgcagtagccgacaaggactctatatgcttttgggattgggaaaagggagagaagctagactattttcacaacggtaaccccagatatacccgggtaaccgccatggaatatctgaacggccaggattgttcgctgctcttaactgctacggacgacggtgccatcagagtgtggaagaactttgcggaccttgaaaaaaaccctgagatggtgactgcatggcagggcctatccgacatgctccctacgacgcgtggggctggtatggtggtggactgggagcaggagaccggccttctgatgagttccggggatgtgcgaatcgtgcggatctgggacaccgatagggaaatgaaggttcaggatatccctaccggagctgatagctgcgttacttccctgtcgtgtgatagccaccgctcactgatcgtggcgggcctcggggacgggtctatcagagtttacgaccggagaatggcactcagcgaatgtcgtgtaatgacctatcgagagcacaccgcctgggtggtgaaggcttccctccaaaagagaccggacggtcacatcgtcagtgtctccgtaaacggcgatgtcagaatcttcgatccacgcatgcctgaatccgttaacgtacttcaaatcgtgaaaggcttgaccgccttagatattcatccacaagctgatcttatcgcttgtggctccgtgaaccaatttaccgcaatatacaactcatccggtgaactgatcaataacattaagtactatgacggcttcatgggacagcgcgtgggggccatcagttgtctcgcattccaccctcattggccacatctcgctgtcggttccaatgactattacatctccgtatactctgtcgagaaacgcgtgcgatag

SEQ ID NO: 61742 - DNA, 990 bp, Artificial Sequence
  derived and/or modified sequence
atgggcagccccagcatctttgtgtatgactgcagcaatgccggcctgattgtgaagagcttcaagcagtttgccctgcagcgggagcaggagctggaggtggccgccatcaaccccaaccaccccctggcccagatgcccctgcccccatccatgaagaactgcatccagctggccgcctgtgaggccacagagctgctgcccatgatcccagacctgcctgctgacctcttcaccagctgcctgaccacccccatcaagatcgccctgcgctggttctgcatgcagaagtgtgtgtccctggtgcctggggtgaccctggacctgattgagaagatccctggccgcctgaatgacaggaggacccccctgggggagctgaactggatcttcaccgccatcacagacaccatcgcctggaatgtgctgccccgggacctcttccagaagctgttccggcaggacctgctggtggccagcctcttcaggaacttcctgctggccgagcgcatcatgaggagctacaactgcacccctgtgagcagcccccggctgccccccacctacatgcacgccatgtggcaggcctgggacctggccgtggacatctgcctgagccagctgcccaccatcatcgaggagggcacagccttccgccacagccccttctttgctgagcagctgacagccttccaggtgtggctgaccatgggcgtggagaacagaaaccccccagagcagctgcccatcgtgctgcaggtgctgctgagccaggtgcaccggctgcgggccctggacctgctgggccgcttcctggacctgggcccctgggccgtgtccctggccctgtctgtgggcatcttcccctacgtgctgaagctgctgcagagcagcgcccgggagctgcggcccctgctggtgttcatctgggccaagatcctggccgtggacagcgtgtccatcccagccctgctgccccgggtgatgtag

SEQ ID NO: 61743 - DNA, 3534 bp, Artificial Sequence
  derived and/or modified sequence
atggagagcgagatgctgcagagccccctgctgggcctgggggaggaggatgaagctgacctgacagactggaacctgcccctggccttcatgaagaagaggcactgtgagaagattgagggcagcaagagcctggcccagagctggaggatgaaggacaggatgaagacagtgtctgtggccctggtgctgtgcctgaatgtgggcgtggaccccccagatgtggtgaagaccaccccctgtgcccggctggagtgctggattgaccccctgtccatgggcccccagaaggccctggagaccatcggggccaacctgcagaagcagtatgagaactggcagccccgggcccgctacaagcagagcctggaccccaccgtggatgaggtgaagaagctgtgcaccagcctgcggagaaatgccaaggaggagcgggtgctcttccactacaatggacatggagtgccccggcccaccgtgaatggagaggtgtgggtgttcaacaagaactacacccagtacatccccctgagcatctatgacctgcagacctggatgggcagccccagcatctttgtgtatgactgcagcaatgccggcctcatcgtgaagagcttcaagcagtttgccctgcagcgggagcaggagctggaggtggccgccatcaaccccaaccaccccctggcccagatgcccctgccccccagcatgaagaactgcatccagctggccgcctgtgaggccacagagctgctgcccatgatcccagacctgcctgctgacctcttcaccagctgcctgaccacccccatcaagatcgccctgcgctggttctgcatgcagaagtgtgtgtccctggtgcctggggtgaccctggacctgattgagaagatccctggccgcctgaatgacaggaggacccccctgggggagctgaactggatcttcaccgccatcacagacaccatcgcctggaatgtgctgccccgggacctcttccagaagctgttccggcaggacctgctggtggccagcctcttcaggaacttcctgctggccgagcgcatcatgaggagctacaactgcacccctgtgagcagcccccggctgccccccacctacatgcacgccatgtggcaggcctgggacctggccgtggacatctgcctgagccagctgcccaccatcatcgaggagggcacagccttccgccacagccccttctttgctgagcagctgacagccttccaggtgtggctgaccatgggcgtggagaacagaaatcctcctgagcagctgcccatcgtgctgcaggtgctgctgagccaggtgcaccggctgcgggccctggacctgctgggccgcttcctggacctgggcccctgggccgtgtccctggccctgtctgtgggcatcttcccctacgtgctgaagctgctgcagagcagcgcccgggagctgcggcccctgctggtgttcatctgggccaagatcctggccgtggacagcgagctggtggtggccctgagccacctggtggtgcagtatgagagcaacttctgcaccgtggccctgcagttcatcgaggaggagaagaactatgccctgcccagccctgccaccacagagggcggcagcctgacccctgtgcgggacagcccctgcaccccccggctgcggtctgtgagcagctatggcaacatccgggctgtggccacagcccggagcctgaacaagagcctgcagaacctgagcctgacagaggagagcggcggcgctgtggccttcagccctggcaacctgagcaccagcagcagcgccagcagcaccctgggcagcccagaaaatgaggagcacatcctgagctttgagaccatcgacaagatgaggcgggccagcagctacagcagcctgaacagcctcatcggcgtgtccttcaacagcgtgtacacccagatctggagggtgctgctgcacctggccgctgacccctacccagaggtgtctgatgtggccatgaaggtgctgaacagcatcgcctacaaggccaccgtgaatgcccggccccagagggtgctggacaccagcagcctgacccagagcgccccagccagccccaccaacaagggcgtgcacatccaccaggccggcggcagccccccagccagcagcaccagcagcagcagcctgaccaatgatgtggccaagcagcctgtgtcccgggacctgcccagcggccggcccggcaccactggacctgctggggcccagtacaccccccacagccaccagttccccaggaccaggaagatgtttgacaagggccctgagcagacagcagatgatgctgatgatgctgctggccacaagagcttcatcagcgccaccgtgcagacaggcttctgtgactggagcgcccgctactttgcccagcctgtgatgaagatccctgaggagcatgacctggagagccagatcaggaaggagcgggagtggaggttcctgaggaacagccgggtgcggcggcaggcccagcaggtgatccagaagggcatcacccggctggatgaccagatcttcctgaacagaaatcctggggtgcccagcgtggtgaagttccaccccttcaccccctgcatcgctgtggccgacaaggacagcatctgcttctgggactgggagaagggggagaagctggactacttccacaacggcaacccccgctacaccagggtgacagccatggagtacctgaatggccaggactgcagcctgctgctgacagccacagatgatggagccatccgggtgtggaagaactttgctgacctggagaagaaccctgagatggtgacagcctggcagggcctgagtgacatgctgcccaccaccagaggagctggcatggtggtggactgggagcaggagaccggcctgctgatgagcagtggagatgtgcgcatcgtgcgcatctgggacacagaccgggagatgaaggtgcaggacatccccactggagctgacagctgtgtgaccagcctgagctgtgacagccacaggagcctgattgtggccggcctgggagatggcagcatccgggtgtatgacaggaggatggccctgtctgaatgtcgggtgatgacctaccgggagcacacagcctgggtggtgaaggccagcctgcagaagaggccagatggccacatcgtgtctgtgtctgtgaatggagatgtgcgcatctttgaccccaggatgcctgagagcgtgaatgtgctgcagatcgtgaagggcctgacagccctggacatccacccccaggccgacctgattgcctgtggctctgtgaaccagttcaccgccatctacaacagcagtggagagctgatcaacaacatcaagtactatgatggcttcatgggccagagggtgggcgccatcagctgcctggccttccacccccactggccccacctggccgtgggcagcaatgactactacatctctgtgtacagcgtggagaagagggtgaggtag

SEQ ID NO: 61744 - DNA, 990 bp, Artificial Sequence
  derived and/or modified sequence
atgggcagccccagcatcttcgtgtacgactgcagcaacgccggccttattgttaagagttttaagcaattcgcattgcaaagagagcaggagttagaggtggccgctataaacccaaaccaccctttagcacaaatgcccctccccccttctatgaagaattgtatacaattagcagcttgtgaggctactgaactgctgcccatgattcctgatctccccgctgacctttttacatcttgcttgacaaccccaataaaaatcgccttgcgctggttctgtatgcaaaagtgcgtcagtctcgtgccgggagttacattagacttgattgagaaaatccctggccgcttaaacgacaggagaactcccttgggagaactgaattggatatttacagcaattaccgatacaatcgcttggaacgttctccctagggatttgttccaaaagctgtttcgacaggatttacttgtggcgtccttgttccggaactttcttctcgctgagagaatcatgagatcgtacaactgtacccccgtgtcatcaccaagactccctcccacctacatgcatgctatgtggcaggcctgggatctggccgtcgatatttgtctctcacagttgccgaccatcattgaggagggcacagctttcaggcactctcctttcttcgctgaacaattaacagccttccaggtgtggctcaccatgggcgttgagaatcggaaccctcccgagcagctgcccatcgtcctgcaggtgcttctttcccaggtgcaccggctcagagctctggacctgctcggcaggtttctcgacctgggcccttgggccgtatccctggccctctctgtcgggatctttccgtacgtgctgaaactcttacagtcctctgccagggagctaagaccacttctggtgttcatttgggcaaagatacttgcagttgattcagtctccatccccgcacttttgcctagggttatgtag

SEQ ID NO: 61745 - DNA, 3534 bp, Artificial Sequence
  derived and/or modified sequence
atggagagcgagatgctgcagagccccctgctgggcctgggcgaggaagacgaggccgatcttacagattggaatctaccattagcattcatgaagaagcgacactgcgaaaagattgagggtagcaaatccctggcacaatcttggcgcatgaaggatagaatgaagacagtgagcgttgccctggtattatgcctgaacgtaggcgtggacccccccgacgtcgtgaagaccacaccatgcgcccgtctagagtgttggatcgaccctttgtccatgggacctcagaaggcgctagagactattggcgcgaacctccaaaagcagtacgagaactggcagcctagggcacgatacaagcagtcactggaccctaccgtggatgaagtcaaaaaactgtgtacaagcctcaggcgaaacgctaaagaggagagggtgttgttccactataacggccatggcgtccctcggcccactgttaatggagaagtctgggtgttcaacaagaattacacacagtatattcccctgagtatatatgatctgcaaacttggatggggtccccttcaatttttgtgtacgactgcagtaacgcgggcctaatcgtaaagagttttaagcagtttgctctgcagcgggagcaggagctggaagtggcggctatcaatcctaaccacccgctggcgcagatgcctctccctccttctatgaagaactgtatccagctggccgcctgtgaggcgaccgagcttctacctatgatcccagatttacccgcagacctatttacctcttgtctgaccacaccaatcaagatcgctttacgctggttttgtatgcagaagtgcgtgtcactggttccaggcgtgacactagacctgatcgagaagatccccggtcggttgaacgataggcgcactcccctgggggaacttaactggatttttactgccatcaccgatacgattgcctggaatgtgctaccgcgggacttatttcagaagctctttaggcaggatctattggtggcctcattgttccggaattttctcctcgccgaacgcataatgcgctcttacaattgtactccagtgtccagtccacggctaccaccaacctacatgcatgccatgtggcaggcatgggatttggccgtagacatctgtttaagccagctgcccactatcatagaagaggggaccgcattccgccacagcccgttctttgccgaacagctaaccgcttttcaggtgtggctcactatgggagttgaaaatcgaaatcccccagagcagctcccaatagtgttacaggttcttctgtctcaggtgcaccgactgagggcactggacctgttggggcgattcttggacctggggccatgggctgtgtccctagccctgtctgttggaatttttccctacgtgctcaaactgctacagtcttccgccagagagctgcgacccctgctagtcttcatctgggcaaagatactagcggtcgactccgaactagtggtagcactttcacacctcgtggtgcagtacgaaagcaacttttgtaccgtcgccctgcagttcatcgaagaggaaaaaaactatgctctgcctagccctgctacaaccgaggggggctctctgaccccagtgagggattccccatgcacgccccgattaaggtccgtttcaagttatgggaacattagagctgtggctacagcaaggtctttaaacaaaagtctgcagaatctgtctctgacagaagaatccgggggagccgtcgctttctcaccaggcaacctgagcaccagttcatcagcctcgagcactctggggagccctgagaacgaagagcacatccttagcttcgagaccatcgataagatgcgtcgggcctcttcctatagcagccttaattccctcatcggggtatctttcaactcagtttacactcagatatggcgtgtcttgctgcatctcgctgctgatccttaccccgaggtaagcgacgtcgctatgaaggttcttaatagcatcgcatacaaagctaccgtgaatgctaggcctcaacgtgtactggatacatcgtctctaactcagagcgcaccagccagccccacaaacaagggggtacacatacaccaggctgggggcagtcccccagccagttctacctcgagctcttctctcacgaatgacgtcgcaaaacaaccagtgtctcgcgacctgccatctggtcgtcctggaaccactggacctgcaggcgcccaatatactccacactcccaccaattccccagaactaggaagatgttcgataaagggcccgagcagaccgccgatgacgcagacgatgccgctggccataaaagttttatttccgcaaccgtacaaaccggattctgcgattggtcggccagatacttcgctcagcccgttatgaaaatccccgaggaacacgatctggagtcacagataaggaaagaacgcgaatggaggtttctgaggaattcccgggtgcggaggcaagcacagcaggtcatccagaaaggaattacccggctcgacgaccagatctttctgaatcgaaatcccggtgtgccatccgtcgtcaagtttcacccatttactccatgcatagctgtcgctgataaggattcaatttgtttctgggactgggaaaaaggagaaaaactggactacttccacaatggtaatcccaggtatactcgggtgaccgcgatggagtacctgaacgggcaagattgcagcctgttgctgactgctacagatgatggcgctatccgcgtgtggaaaaatttcgcagacctcgagaaaaaccctgaaatggtaaccgcttggcagggcttgtccgatatgttgccaacgacacgcggagccggcatggttgtggattgggagcaggagaccgggctgcttatgtcgagtggcgacgtgagaatcgtccgcatctgggacacggaccgtgagatgaaggtccaggacattccgactggggccgattcctgtgtgacaagtctgagttgcgattctcatcgctccttaatcgtggctggactgggcgacggatccattcgggtgtacgatcgtcgaatggctcttagcgaatgccgagtcatgacttaccgggagcatacagcctgggttgttaaggcctccctgcagaagcgccccgatgggcatatcgtatccgtcagcgttaacggggacgtacggatatttgatcctcggatgcccgaaagcgtcaacgtattacagattgtaaaagggttgacagccctcgatattcacccccaggctgatttgatcgcatgcggtagcgtaaaccagttcacagcaatttataactcaagcggagaactgattaataacatcaagtactacgatggcttcatgggtcagcgcgttggcgctattagttgtctggcctttcatccacattggcctcacctggcggtagggtctaatgactactacatatccgtatattcggtggaaaaacgggtgcgctag

SEQ ID NO: 61746 - DNA, 990 bp, Artificial Sequence
  derived and/or modified sequence
atgggatcaccctccatattcgtctatgattgtagcaatgccggtctgatcgtcaagagttttaagcagtttgcccttcagcgggagcaggagctagaggtggctgcgataaaccccaaccacccattggcccagatgcctctgcctcccagcatgaagaattgcatacagttggccgcttgcgaggctaccgagctgcttcctatgatacccgatctgcccgctgatctgtttacatcctgtcttacaaccccaataaaaatagctctacgatggttctgcatgcagaaatgcgtcagtcttgtgcctggagtcacactggacctgatcgaaaagattcccggaaggctcaatgatcggaggaccccacttggtgaactgaactggatattcaccgcgattacagacactattgcctggaacgtgctgccccgagatctgttccaaaagctcttccgacaagacctgctggttgcgtccctgttcagaaattttctgcttgccgagagaattatgagaagttataactgcacccccgtgagcagccctaggctgcctccaacatacatgcacgcaatgtggcaagcttgggacctggccgtggacatctgtctgagtcaactgccaacaattatcgaggaaggaacagcctttaggcatagtcctttctttgccgagcagcttactgcatttcaagtgtggctgacaatgggggtggagaaccgaaacccgccagagcagcttcctatcgtacttcaagttctgcttagccaagtgcataggctgagagctctggatctgctcggacggttccttgacctcggcccttgggctgtaagcctggccttgtctgtggggatttttccgtacgttcttaagttgctacaatcgtcagctcgggagttgcggcctttactggtgtttatttgggccaaaattttagccgtggactctgtttccatccctgctctgttaccacgcgtcatgtag

SEQ ID NO: 61747 - DNA, 3534 bp, Artificial Sequence
  derived and/or modified sequence
atggaaagtgagatgctgcagtctccgttgctggggctgggagaagaagatgaagccgacctcaccgattggaacttgccactggcattcatgaagaagaggcactgtgaaaaaatcgagggatctaagtctctcgcccagtcatggcgcatgaaggaccggatgaaaacggtgagcgttgcgttagtgctgtgtttgaacgtgggcgttgatcccccagacgttgtgaaaacaacgccatgtgcaagacttgaatgttggattgatcccctctctatgggaccccagaaggcgctcgaaactatcggggcaaatcttcagaaacaatacgaaaactggcagccacgggctaggtataaacaatcgctggacccaactgttgatgaggttaaaaagctttgtacatctctaagacgaaatgcaaaagaggaacgcgtcctatttcactataacggccatggggtaccccgaccgacagtgaacggggaggtgtgggtctttaataagaattatacacaatatatcccattaagcatctatgatctgcagacatggatgggctcaccatccatttttgtatacgattgctccaatgccggattgatcgtcaaatcctttaaacagttcgccctgcaacgcgagcaggagctcgaagttgctgctatcaaccccaatcatccgctggcccagatgcctttgccacccagcatgaaaaactgtattcagctcgcagcctgcgaggccacagagctgctgccaatgattcctgacctcccggctgatctctttacatcttgtctgactacgcctatcaaaatcgctttgcgatggttctgcatgcagaagtgcgtgtccctagtgccaggcgtgacactcgaccttatcgagaagattcccggacggctgaacgacaggagaaccccactgggcgagttgaactggatctttaccgctatcacggatacaatcgcttggaacgtgctacctcgggacctgtttcagaagttattccggcaggatctgctagtggcatctttgttcagaaatttcctcctagctgagcggatcatgcgctcatataattgtacccccgtgtctagtcctcggctcccgccaacctatatgcacgcaatgtggcaggcctgggatctcgcagtggacatctgtttgagtcagctgcccacaattattgaggaaggtactgccttcaggcactcacccttcttcgcagagcagctaaccgcttttcaggtttggctgactatgggggtggagaaccgtaatcccccagagcagctcccaattgtccttcaggtcctcttgagccaggtgcatagattgcgcgcacttgacctgctgggccgattccttgatctgggaccctgggccgtatcgcttgctttatcagtgggcatattcccatatgtgctgaagcttttacaatcctccgccagagagctgcgcccactcctagtttttatttgggccaagattctggccgttgacagtgaactggtggtggctctgagtcatctggttgtccagtacgaatctaatttttgcacagtcgctctgcagttcatagaagaggagaagaactatgcgctacccagccccgcaacaaccgagggagggtctctcacacctgtccgagattctccatgtaccccacgactgcgttcggtgtcgtcttacggcaacatccgcgcagttgccaccgcacggtccctgaataaatctctgcagaacctctcgctgactgaagaatccggcggagccgtggcatttagccctggcaatttgtcaaccagcagctctgcttcctccactttaggatcccctgagaacgaggaacacatcctgagcttcgagacgatagacaagatgaggagagccagctcttactcttctctgaacagcctgatcggagtctcgtttaacagcgtctacacccaaatttggagagtcttgctacatctggcggcagacccctaccctgaggtttctgacgtcgccatgaaggtgttaaactccatcgcgtataaagcaactgtgaacgccaggccccagagggttctggacacgtccagcctgactcagtcagctcccgcttcccctaccaataaaggcgttcacattcaccaggctgggggtagtcctccggcatctagcacgtcctcatcctccctgactaatgacgttgcaaagcagccagtgagtcgtgacttaccaagcggaagacccggaaccaccgggcctgccggagctcaatacacaccccatagtcaccaatttccccgaactcgaaagatgtttgataagggtcccgagcagaccgcagacgatgctgatgacgccgcagggcacaagagctttatatccgccactgtgcaaaccggcttctgcgactggtctgccagatactttgcccagcccgtgatgaaaataccagaagagcacgatcttgaatcccagataagaaaggagagagaatggagatttctgagaaatagccgagtgcgcaggcaagcacagcaggtcattcagaagggtattactcgcctcgacgaccaaatcttcctgaacagaaaccctggagtgcccagtgtcgttaaattccatccttttaccccatgtattgctgttgccgacaaggacagcatctgcttctgggattgggaaaaaggagaaaaactggactactttcacaatgggaatcctaggtatacccgcgtgacagccatggaatacctcaacggccaagactgctcactgcttcttaccgcgaccgatgacggtgcaatccgagtatggaagaattttgccgacctcgaaaaaaaccctgagatggttactgcctggcaggggctatctgatatgctcccaaccactcggggtgcaggcatggtggtggactgggaacaggaaacaggcctgttgatgtcgagcggggacgtccgaatcgtccggatctgggacacggacagagaaatgaaagtgcaagacattcccaccggtgcagatagctgcgtgacaagcctctcttgcgactcgcacagatcgctgattgtagctgggctgggcgacggtagcatcagagtttatgaccgccgtatggccttatctgagtgtcgagtgatgacctacagggaacataccgcctgggtcgtgaaagcgtcattacagaaaaggcccgacggccatatcgtatctgtgtctgtcaatggtgatgtgcgtatattcgatccaaggatgccagagagcgttaatgtcctccagattgtaaagggtttaaccgcgctagacatacacccccaggcagatttgattgcatgcggatctgtgaaccaattcacggcaatttacaactcctctggagagttaatcaacaatattaaatattacgacggattcatggggcaacgggttggggcaatcagctgtctggccttccacccccattggccacacctggccgtgggaagcaacgattattatatatcagtgtactctgtcgaaaaacgcgtgcggtag

SEQ ID NO: 61748 - DNA, 2461 bp, Artificial Sequence
  derived and/or modified sequence
aggccgcggtgcattctgggtcctggcaatatggcgtcctccttgatgggctgatgagatgagtttcactgtagctccaaaccagagggcaaagctcccatgacccaataagcccacattgtccctttcctccgtggttccgtgtcgcccgtttctcaggactcgttctcaggcaggagagagcctcggggctgaaggccaggaccagccaggccgcgcggacctgaggttgaggaaccgggtgcaggcgagcacgatgggccggtcgtggctctggttgcagcagctcagacgagtgcgggacccgcagggctgagagtggctggaggagacccagggccctttgaacccgatcccttggccggagacctcagcccagtcggcccagtgggcgaaccggcaccaagagcggcctgcctgtcttcggaactgctgaggcggtggaggccgagagcagggtcatcgtgaggcctgaagtctcttacgcttttggcagctcccctcgcagcccctctggaaacgtacagcctcaggagcagccagtggcttgggacctggggtggtgtgtgtctgcggagcttcttgggctgccccatttcctagcggcccccacctccccacttcccgctcagagttagagataaggatctcagacttttgcctgagtaagggtctccgcactctttatccatttggttttcgatttcccgtttttgtttcttatttcaccaattctggtacacgctagtttttaaggctggaggttctcgagcgcttgctgccaaggactcccccaccccctcccccactgatggagtccgaaatgctgcaatcgcctcttctgggcctgggggaggaagatgaggctgatcttacagactggaacctacctttggcttttatgaaaaagaggcactgtgagaaaattgaaggctccaaatccttagctcagagctggaggatgaaggatcggatgaagacagtcagtgttgccttagttttgtgcctgaatgttggtgtggaccctcccgatgtggtgaagaccacgccctgtgcacgcttggaatgctggatcggcccggtacaagcagagccttgacccaactgtggatgaagtcaagaagctctgcacgtccttacgtcgcaacgccaaggaggagcgagtcctctttcactacaatggccacggggtgccccggcccacagtcaacggggaggtctgggtcttcaacaagaactacacgcagtacatccctctgtccatatatgacctgcagacgtggatgggcagcccgtcgatcttcgtctacgactgctccaatgctggcttgatcgtcaagtccttcaagcagttcgcactacagcgggagcaggagctggaggtagctgcaatcaacccaaatcaccctcttgctcagatgcctttgcctccgtcgatgaaaaactgcatccagctggcagcctgcgaggccaccgagctgctgcccatgatccccgacctcccggctgacctattcacctcctgcctcaccacccccatcaagatcgccctgcgctggttttgcatgcagaaatgtgtcagtctggtgcctggcgtcacactggatttgatagaaaagatccctggccgcctgaacgacaggaggacgcccctgggtgaactgaactggatcttcacagccatcacagacaccatcgcgtggaacgtgctcccccgggatctcttccaaaagctcttcagacaggacttgctggtggctagtctgtttcgaaattttttattggcggaaaggattatgaggtcgtataactgcactcccgtcagcagcccgcgtctgccgcccacgtacatgcacgccatgtggcaagcctgggacctggctgttgacatctgtctgtctcagctgccgacgatcatcgaggaaggcactgcgtttcggcacagcccgttcttcgccgagcagctgaccgcattccaggtgtggctcaccatgggcgtggagaaccgaaacccacccgaacagctgcccatcgtcctgcaggtgctgttaagccaagtgcaccggctgagagcattggacttgcttggaagatttttggacctgggtccctgggcagtgagcctggccttgtctgtcggcatcttcccctacgtgctgaagctgctccagagctcggcccgagagctgcggccacttctcgttttcatctgggccaagatcctcgcagtggacagcgtgagtatccccgccctcctccccagagtgatgtgaacctgccggcccttctggggatgccgagccctgcgtttccagcctgccctttctccagcctcgctccctctccaggcaccgccgttcccttcctctcttctggggtaaagtgggacgcgcccgcctcggcagccacctctgggtcgtgggggctgtcacctacctgtcctgtccctggccttcccctg

SEQ ID NO: 61749 - DNA, 6382 bp, Artificial Sequence
  derived and/or modified sequence
cggtgcattctgggtcctggcaatatggcgtcctccttgatgggctgatgagatgagtttcactgtagctccaaaccagagggcaaagctcccatgacccaataagcccacattgtccctttcctccgtggttccgtgtcgcccgtttctcaggactcgttctcaggcaggagagagcctcggggctgaaggccaggaccagccaggccgcgcggacctgaggttgaggaaccgggtgcaggcgagcacgatgggccggtcgtggctctggttgcagcagctcagacgagtgcgggacccgcagggctgagagtggctggaggagacccagggccctttgaacccgatcccttggccggagacctcagcccagtcggcccagtgggcgaaccggcaccaagagcggcctgcctgtcttcggaactgctgaggcggtggaggccgagagcagggtcatcgtgaggcctgaagtctcttacgcttttggcagctcccctcgcagcccctctggaaacgtacagcctcaggagcagccagtggcttgggacctggggtggtgtgtgtctgcggagcttcttgggctgccccatttcctagcggcccccacctccccacttcccgctcagagttagagataaggatctcagacttttgcctgagtaagggtctccgcactctttatccatttggttttcgatttcccgtttttgtttcttatttcaccaattctggtacacgctagtttttaaggctggaggttctcgagcgcttgctgccaaggactcccccaccccctcccccactgatggagtccgaaatgctgcaatcgcctcttctgggcctgggggaggaagatgaggctgatcttacagactggaacctacctttggcttttatgaaaaagaggcactgtgagaaaattgaaggctccaaatccttagctcagagctggaggatgaaggatcggatgaagacagtcagtgttgccttagttttgtgcctgaatgttggtgtggaccctcccgatgtggtgaagaccacgccctgtgcacgcttggaatgctggatcgatcctctgtcgatgggtcctcagaaagctctggaaaccatcggtgcaaatttacagaagcagtacgagaactggcagccaagggcccggtacaagcagagccttgacccaactgtggatgaagtcaagaagctctgcacgtccttacgtcgcaacgccaaggaggagcgagtcctctttcactacaatggccacggggtgccccggcccacagtcaacggggaggtctgggtcttcaacaagaactacacgcagtacatccctctgtccatatatgacctgcagacgtggatgggcagcccgtcgatcttcgtctacgactgctccaatgctggcttgatcgtcaagtccttcaagcagttcgcactacagcgggagcaggagctggaggtagctgcaatcaacccaaatcaccctcttgctcagatgcctttgcctccgtcgatgaaaaactgcatccagctggcagcctgcgaggccaccgagctgctgcccatgatccccgacctcccggctgacctattcacctcctgcctcaccacccccatcaagatcgccctgcgctggttttgcatgcagaaatgtgtcagtctggtgcctggcgtcacactggatttgatagaaaagatccctggccgcctgaacgacaggaggacgcccctgggtgaactgaactggatcttcacagccatcacagacaccatcgcgtggaacgtgctcccccgggatctcttccaaaagctcttcagacaggacttgctggtggctagtctgtttcgaaattttttattggcggaaaggattatgaggtcgtataactgcactcccgtcagcagcccgcgtctgccgcccacgtacatgcacgccatgtggcaagcctgggacctggctgttgacatctgtctgtctcagctgccgacgatcatcgaggaaggcactgcgtttcggcacagcccgttcttcgccgagcagctgaccgcattccaggtgtggctcaccatgggcgtggagaaccgaaacccacccgaacagctgcccatcgtcctgcaggtgctgttaagccaagtgcaccggctgagagcattggacttgcttggaagatttttggacctgggtccctgggcagtgagcctggccttgtctgtcggcatcttcccctacgtgctgaagctgctccagagctcggcccgagagctgcggccacttctcgttttcatctgggccaagatcctcgcagtggacagcgagctggtggtggctctgagtcatcttgtggttcagtatgaaagcaatttctgcaccgtggccctgcagttcatagaagaggaaaagaactacgccttgccttctccagcaaccacagagggagggagtttgaccccagtgcgagacagcccgtgcacccccagacttcgttctgtgagctcctatggaaacatccgtgctgtcgccacagccaggagcctcaacaaatctttgcagaacctgagtttgacagaggaatctggtggcgcggtggcgttctcccccggaaacctcagcaccagcagcagcgccagcagcaccctgggcagccccgagaatgaggagcatatcctgtccttcgagaccatcgacaagatgcgccgcgccagctcctactcctccctcaactccctcatcggagtttcctttaacagtgtttacactcagatttggagagtcctgctgcacctggctgctgacccctatccagaggtctcggacgtggccatgaaagtactcaacagcatcgcctacaaggccaccgtgaacgcccggccgcagcgcgtcctggacacctcctccctcacgcagtcggcccccgccagccccaccaacaagggcgtgcacatccaccaggcggggggctcccctccggcgtccagcaccagcagctccagcctgaccaacgatgtggccaagcagccggtcagccgagacttgccttctggccggccgggcaccacaggccccgctggggcgcagtacacccctcactcccaccagttcccccggacacggaagatgttcgacaagggcccagagcagactgcggacgacgcggacgatgctgctggacacaaaagtttcatctccgccacggtgcagacggggttctgcgactggagcgcccgctattttgcccagcccgtcatgaagatcccagaagagcacgacctggagagtcagatccgcaaggagcgggagtggcggttcctgcgaaacagccgtgtcaggaggcaggcccagcaagtcattcagaagggcattacgagattggacgaccaaatatttctgaacaggaaccccggcgtcccctctgtggtgaaattccaccccttcacgccgtgcatcgccgtagccgacaaggacagcatctgcttttgggactgggagaaaggggagaagctggattatttccacaatgggaaccctcggtacacgagggtcactgccatggagtatctgaacggccaggactgctcgcttctgctgacggccacagacgatggtgccatcagggtctggaagaattttgctgatttggaaaagaacccagagatggtgaccgcgtggcaggggctctcggacatgctgccaacgacgcgaggagctgggatggtggtggactgggagcaggagaccggcctcctcatgagctcaggagacgtgcggatcgtccggatctgggacacagaccgtgagatgaaggtgcaggacatccctacgggcgcagacagctgtgtgacgagtctgtcctgtgattcccaccgctcactcatcgtggctggcctcggtgacggctccatccgcgtctacgacagaaggatggcactcagcgaatgccgcgtcatgacgtaccgggagcacacagcctgggtggtgaaggcctccctgcagaagcgtcccgacggccacatcgtgagtgtgagcgtcaatggagatgtgcgcatctttgatccccggatgcctgagtcggtaaatgtgcttcagatcgtgaaggggctgacggccctggacatccacccccaggcggacctgatcgcatgtggctccgtcaatcagttcaccgccatctacaacagcagcggagagctcatcaacaacatcaagtactacgacggcttcatgggccagcgggtcggcgccatcagctgcctggccttccacccgcactggcctcacctggccgtgggaagcaacgactactacatctccgtgtactcggtggagaagcgtgtcagatagcggcgtgacccgggcccaccaggccacggccgcctgctgtacatagtgaagctgtcactcgccggggcacggggcgtcggctgctgcggccccgcagtgtgaacgttggctgctgccttagctgctgatgacggcaggagggccctgctactcgcttttgtctgtcttcgctgtcgtgtctggaatgtcagggaaggggagggctcgggttgacggtggcttcccactgagcaccagcatccaggtgcacccccgcggccacggcgcctctgtccctctcctgttctgtgtttctctgagacgctgaaaggggaaacacctcactttatttccatgtaatcagagcattagctgcagaaaaaccccccgacagagccctggcggagaggcaggcgctggggctcctacgggtccctggggcagctgtccccatcaggccaagagcgagcgagaggcgctgccccagccaggcccaccacctctcacagtcagtgcacgcaagcagggacatttcctagccagctgggggacactggaaattcgggaaaccaagagagaggaagaaggagacgcccctccaactggcgggtgtgaaggaagccgcccaggggtccgggctgtccttggccgctggcagcatcactgagcaggaagcgcacagcccaccctccccgcacctccaggtctctggactccagttttggcccctctcacacagagctgtcagcaggggccgctgtggcggtgcacaggggaggcaggtccttggcgaggtagcccctgccttaatccacggggctcctttccctccgaagggctgctcttccccacaggcgcggggacagcagcccgacctgtggtctccatgcctgtgccctcacacaggtgtagcacacgcatgtgcagatggcaccacggccggcacctgggggcacacacatgcaggcggcgtggtctccctgctctgtccccacacgttcctcacatacaggcaagaggcactgccgggtcccggacggctccgggtgacaccagccccgtctccagccttgagccgcccatgctgatgcgacctcggctgacagctgggcctgtggtgcagacaggagctgtgtggacagtcccgcccaggaggggccgcagggcgtgtatgagcagttttgcaaacagaacacaaccacaatgatggtattttgaaaagtgttctttccgtgttcgtcgggaatcaggattattgagaggtgaaggagccaggtggcttcattctggcggtgagaggcccacgaccacgggagtgagagctggtgtggcgaggcccggctctcctgcggtgtggctggtggcctgccgtggccaagagcatcttctgggtggatggaaccctgcctggtcacatttggccagagacacacctggccctcagggggctgagctggagactgagctggggctggccgggacgtgacaaggcaggacagaggcggcccctccgctgctcctttttggaatgcgagctcccaccagaagaaggttccggcacgaatcccatccccacgtctgggccgagaaagcagcccgggtccggaaggtgtagagagtcccggcctcactcagctcacagggcgtgccaggcggcaacaccagaatcttccagaagcccagctccacccgcacacgcagcttcccatccagtccttcaactcaattcttacccaacacgcgtttctgtttgttttgagacaaaatcaccacctgtcaaaaggcaggtggctccagaggggtcaagacccccccccgcccccgctccaccctggagcccacccccatgggcaccgcgtgccgcctgcacgtgggctgtcttcacaggtctgatgtgaaaattcaatcacgacgttaaccggctcgagagagcgccggcctagaggctcattatctatttattttaccaaacgcgaattgagacggactttgacaaaacacgaaatggtaatgtgaagctaagagcagagagtgaccaacagtaaacaacacgcgcagactccg

SEQ ID NO: 61750 - DNA, 990 bp, Artificial Sequence
  derived and/or modified sequence
atgggcagccccagcatcttcgtgtacgactgcagcaacgccggcctgatcgtgaagagcttcaagcagttcgccctgcagagagagcaggagctggaggtggccgccatcaaccccaaccaccccctggcccagatgcccctgccccccagcatgaagaactgcatccagctggccgcctgcgaggccaccgagctgctgcccatgatccccgacctgcccgccgacctgttcaccagctgcctgaccacccccatcaagatcgccctgagatggttctgcatgcagaagtgcgtgagcctggtgcccggcgtgaccctggacctgatcgagaagatccccggcagactgaacgacagaagaacccccctgggcgagctgaactggatcttcaccgccatcaccgacaccatcgcctggaacgtgctgcccagagacctgttccagaagctgttcagacaggacctgctggtggccagcctgttcagaaacttcctgctggccgagagaatcatgagaagctacaactgcacccccgtgagcagccccagactgccccccacctacatgcacgccatgtggcaggcctgggacctggccgtggacatctgcctgagccagctgcccaccatcatcgaggagggcaccgccttcagacacagccccttcttcgccgagcagctgaccgccttccaggtgtggctgaccatgggcgtggagaacagaaacccccccgagcagctgcccatcgtgctgcaggtgctgctgagccaggtgcacagactgagagccctggacctgctgggcagattcctggacctgggcccctgggccgtgagcctggccctgagcgtgggcatcttcccctacgtgctgaagctgctgcagagcagcgccagagagctgagacccctgctggtgttcatctgggccaagatcctggccgtggacagcgtgagcatccccgccctgctgcccagagtgatgtag

SEQ ID NO: 61751 - DNA, 3534 bp, Artificial Sequence
  derived and/or modified sequence
atggagagcgagatgctgcagagccccctgctgggcctgggcgaggaggacgaggccgacctgaccgactggaacctgcccctggccttcatgaagaagagacactgcgagaagatcgagggcagcaagagcctggcccagagctggagaatgaaggacagaatgaagaccgtgagcgtggccctggtgctgtgcctgaacgtgggcgtggacccccccgacgtggtgaagaccaccccctgcgccagactggagtgctggatcgaccccctgagcatgggcccccagaaggccctggagaccatcggcgccaacctgcagaagcagtacgagaactggcagcccagagccagatacaagcagagcctggaccccaccgtggacgaggtgaagaagctgtgcaccagcctgagaagaaacgccaaggaggagagagtgctgttccactacaacggccacggcgtgcccagacccaccgtgaacggcgaggtgtgggtgttcaacaagaactacacccagtacatccccctgagcatctacgacctgcagacctggatgggcagccccagcatcttcgtgtacgactgcagcaacgccggcctgatcgtgaagagcttcaagcagttcgccctgcagagagagcaggagctggaggtggccgccatcaaccccaaccaccccctggcccagatgcccctgccccccagcatgaagaactgcatccagctggccgcctgcgaggccaccgagctgctgcccatgatccccgacctgcccgccgacctgttcaccagctgcctgaccacccccatcaagatcgccctgagatggttctgcatgcagaagtgcgtgagcctggtgcccggcgtgaccctggacctgatcgagaagatccccggcagactgaacgacagaagaacccccctgggcgagctgaactggatcttcaccgccatcaccgacaccatcgcctggaacgtgctgcccagagacctgttccagaagctgttcagacaggacctgctggtggccagcctgttcagaaacttcctgctggccgagagaatcatgagaagctacaactgcacccccgtgagcagccccagactgccccccacctacatgcacgccatgtggcaggcctgggacctggccgtggacatctgcctgagccagctgcccaccatcatcgaggagggcaccgccttcagacacagccccttcttcgccgagcagctgaccgccttccaggtgtggctgaccatgggcgtggagaacagaaacccccccgagcagctgcccatcgtgctgcaggtgctgctgagccaggtgcacagactgagagccctggacctgctgggcagattcctggacctgggcccctgggccgtgagcctggccctgagcgtgggcatcttcccctacgtgctgaagctgctgcagagcagcgccagagagctgagacccctgctggtgttcatctgggccaagatcctggccgtggacagcgagctggtggtggccctgagccacctggtggtgcagtacgagagcaacttctgcaccgtggccctgcagttcatcgaggaggagaagaactacgccctgcccagccccgccaccaccgagggcggcagcctgacccccgtgagagacagcccctgcacccccagactgagaagcgtgagcagctacggcaacatcagagccgtggccaccgccagaagcctgaacaagagcctgcagaacctgagcctgaccgaggagagcggcggcgccgtggccttcagccccggcaacctgagcaccagcagcagcgccagcagcaccctgggcagccccgagaacgaggagcacatcctgagcttcgagaccatcgacaagatgagaagagccagcagctacagcagcctgaacagcctgatcggcgtgagcttcaacagcgtgtacacccagatctggagagtgctgctgcacctggccgccgacccctaccccgaggtgagcgacgtggccatgaaggtgctgaacagcatcgcctacaaggccaccgtgaacgccagaccccagagagtgctggacaccagcagcctgacccagagcgcccccgccagccccaccaacaagggcgtgcacatccaccaggccggcggcagcccccccgccagcagcaccagcagcagcagcctgaccaacgacgtggccaagcagcccgtgagcagagacctgcccagcggcagacccggcaccaccggccccgccggcgcccagtacaccccccacagccaccagttccccagaaccagaaagatgttcgacaagggccccgagcagaccgccgacgacgccgacgacgccgccggccacaagagcttcatcagcgccaccgtgcagaccggcttctgcgactggagcgccagatacttcgcccagcccgtgatgaagatccccgaggagcacgacctggagagccagatcagaaaggagagagagtggagattcctgagaaacagcagagtgagaagacaggcccagcaggtgatccagaagggcatcaccagactggacgaccagatcttcctgaacagaaaccccggcgtgcccagcgtggtgaagttccaccccttcaccccctgcatcgccgtggccgacaaggacagcatctgcttctgggactgggagaagggcgagaagctggactacttccacaacggcaaccccagatacaccagagtgaccgccatggagtacctgaacggccaggactgcagcctgctgctgaccgccaccgacgacggcgccatcagagtgtggaagaacttcgccgacctggagaagaaccccgagatggtgaccgcctggcagggcctgagcgacatgctgcccaccaccagaggcgccggcatggtggtggactgggagcaggagaccggcctgctgatgagcagcggcgacgtgagaatcgtgagaatctgggacaccgacagagagatgaaggtgcaggacatccccaccggcgccgacagctgcgtgaccagcctgagctgcgacagccacagaagcctgatcgtggccggcctgggcgacggcagcatcagagtgtacgacagaagaatggccctgagcgagtgcagagtgatgacctacagagagcacaccgcctgggtggtgaaggccagcctgcagaagagacccgacggccacatcgtgagcgtgagcgtgaacggcgacgtgagaatcttcgaccccagaatgcccgagagcgtgaacgtgctgcagatcgtgaagggcctgaccgccctggacatccacccccaggccgacctgatcgcctgcggcagcgtgaaccagttcaccgccatctacaacagcagcggcgagctgatcaacaacatcaagtactacgacggcttcatgggccagagagtgggcgccatcagctgcctggccttccacccccactggccccacctggccgtgggcagcaacgactactacatcagcgtgtacagcgtggagaagagagtgagatag

SEQ ID NO: 61752 - protein, 166 aa, Artificial Sequence
  derived and/or modified sequence
MAELVPFAVPIESDKTLLVWELSSGPTAEALHHSLFTAFSQFGLLYSVRVFPNAAVAHPGFYAVIKFYSARAAHRAQKACDRKQLFQKSPVKVRLGTRHKAVQHQALALNSSKCQELANYYFGFNGCSKRIIKVPCSPWKQYGQEEEGYLSDFSLEEEEFRLPELD

SEQ ID NO: 61753 - DNA, 501 bp, Artificial Sequence
  derived and/or modified sequence
atggctgagttagtacctttcgcagtgccgatcgagtccgacaaaacccttttggtatgggagctctcctcgggccccaccgctgaggccctgcatcattcactgtttaccgccttctctcaatttgggctgttgtacagtgtcagggtgtttccaaatgctgccgtggcgcatcctggcttctacgccgtcatcaagttctattcagcccgggccgcccaccgagctcagaaagcctgtgacagaaagcagcttttccagaagtcgccggttaaggtgcgcttaggaacacgccacaaggcagtccagcaccaggccctcgcgctgaatagctctaagtgccaggagttagcaaattattacttcggatttaacggctgttccaaacgtatcataaaagtgccatgtagcccatggaagcagtatggacaggaggaagaaggatacctgagcgatttctcgctcgaagaggaagaatttcgcttaccggagctggactag

SEQ ID NO: 61754 - DNA, 501 bp, Artificial Sequence
  derived and/or modified sequence
atggccgagctggtgccctttgctgtgcccattgaaagtgacaagaccctgctggtgtgggagctgagcagcggccccacagctgaggccctgcaccacagcctcttcaccgccttcagccagtttggcctgctgtacagcgtgcgggtcttccccaatgctgctgtggcccaccctggcttctatgctgtgatcaagttctacagcgcccgggccgcccaccgggcccagaaggcctgtgacaggaagcagctgttccagaagagccctgtgaaggtgcggctgggcaccaggcacaaggctgtgcagcaccaggccctggccctgaacagcagcaagtgccaggagctggccaactactacttcggcttcaacggctgcagcaagaggatcatcaaggtgccctgcagcccctggaagcagtatggccaggaggaggagggctacctgagtgacttcagcctggaggaggaggagttccggctgcctgagctggactag

SEQ ID NO: 61755 - DNA, 501 bp, Artificial Sequence
  derived and/or modified sequence
atggccgagctggtgcccttcgccgtgcccatcgagagcgacaagaccctcctggtgtgggagctttccagcggccccactgccgaggcactgcatcattcactgttcacagcgttctcccagtttggcctactgtactccgtgcgggtttttcctaacgcggccgtcgcccatcccggattctatgcggttatcaagttctatagcgcacgagcagcgcaccgggctcagaaggcctgcgatcgaaagcagttgttccagaagtcgcctgttaaagttaggctgggcacccgccacaaggcggtgcagcatcaggcactggccttaaattctagtaagtgccaagaattggccaattattacttcgggtttaacgggtgctccaagagaattattaaagtgccatgcagtccgtggaagcagtacggtcaggaggaggaagggtatctttctgatttcagcttggaggaggaagaattccgactgccagagctggattag

SEQ ID NO: 61756 - DNA, 501 bp, Artificial Sequence
  derived and/or modified sequence
atggcggagttggtacctttcgccgtgcctattgaatctgacaaaacacttctggtttgggagctgagttctggacccacagcggaagccttgcaccatagccttttcacagccttcagccaattcggactactgtattcagtgcgggtgtttccaaacgctgctgtggctcatcctggattttacgccgtcattaagttctattctgccagagccgctcacagagcccagaaggcctgcgatagaaaacaattgttccagaaatctccagtgaaggtgcgtcttggcacacgccataaggcagtgcagcaccaagccctcgctttaaacagttctaaatgccaggagttagccaattattattttggttttaatggctgttctaaacggattattaaagtgccttgttccccctggaaacaatatggccaagaggaagaaggctatttgtcagacttctctctggaggaggaggaattccgcttacctgagttagactag

SEQ ID NO: 61757 - DNA, 812 bp, Artificial Sequence
  derived and/or modified sequence
ggcgcaatgctggggcgagggttagccgcgcaggtgcggtgaagggaggatggcggagttggtaccttttgcggttcccatcgagagtgacaaaaccttgctagtgtgggagctgagctccggacccacggccgaggctttgcatcattctctgttcacagcattttctcagtttggccttctgtattcagtccgggtcttcccaaatgctgcagtggcccatcctggtttctatgccgtcattaagttttattctgcaagggctgcccacagagcccaaaaggcatgcgaccggaagcagctttttcagaaatctccagtcaaggttcgtcttggcaccagacataaggcagttcaacatcaagcccttgccctgaacagttccaaatgccaagaactggcgaattactactttggtttcaatgggtgttccaaaaggatcatcaaggtcccttgctctccctggaagcagtatggccaagaggaggaagggtatctctcggatttcagcttggaggaggaagagttcaggctgccagaacttgactagcatttctgaatatcccaaggcgaggtcatgtaacttccttgggaagctctgtcgtgcccctaccccacgccgccccaccactataggctgctggagtcctggaaccacctgggtcggccgcccaaatctttcctggcgaaggggagggaaggggtgttctggtggagtgggaagggaggcttgggtaggattgtgggataagatcgccctggtgacgaggagcggatctcgaacggaacttaataaaggttgcctagataaa

SEQ ID NO: 61758 - DNA, 501 bp, Artificial Sequence
  derived and/or modified sequence
atggccgagctggtgcccttcgccgtgcccatcgagagcgacaagaccctgctggtgtgggagctgagcagcggccccaccgccgaggccctgcaccacagcctgttcaccgccttcagccagttcggcctgctgtacagcgtgagagtgttccccaacgccgccgtggcccaccccggcttctacgccgtgatcaagttctacagcgccagagccgcccacagagcccagaaggcctgcgacagaaagcagctgttccagaagagccccgtgaaggtgagactgggcaccagacacaaggccgtgcagcaccaggccctggccctgaacagcagcaagtgccaggagctggccaactactacttcggcttcaacggctgcagcaagagaatcatcaaggtgccctgcagcccctggaagcagtacggccaggaggaggagggctacctgagcgacttcagcctggaggaggaggagttcagactgcccgagctggactag

SEQ ID NO: 61759 - protein, 130 aa, Artificial Sequence
  derived and/or modified sequence
FGFNGCSKRIIKLQELSDLEERENEDSMVPLPKQSLKFFCALEVVLPSCDCRSPGIGLVEEPMDKVEEESGKIAVEYRPSEDIVGVRCEEELHGLIQVPCSPWKQYGQEEEGYLSDFSLEEEEFRLPELD

SEQ ID NO: 61760 - protein, 251 aa, Artificial Sequence
  derived and/or modified sequence
MAELVPFAVPIESDKTLLVWELSSGPTAEALHHSLFTAFSQFGLLYSVRVFPNAAVAHPGFYAVIKFYSARAAHRAQKACDRKQLFQKSPVKVRLGTRHKAVQHQALALNSSKCQELANYYFGFNGCSKRIIKLQELSDLEERENEDSMVPLPKQSLKFFCALEVVLPSCDCRSPGIGLVEEPMDKVEEESGKIAVEYRPSEDIVGVRCEEELHGLIQVPCSPWKQYGQEEEGYLSDFSLEEEEFRLPELD

SEQ ID NO: 61761 - DNA, 756 bp, Artificial Sequence
  derived and/or modified sequence
atggcggaactcgtgccctttgctgtgccaatcgagagtgataaaactcttcttgtatgggagctcagtagcggccctaccgcggaagctctacaccatagcctgttcaccgcttttagtcagtttggccttctgtatagcgtcagggtatttcctaatgccgctgttgcccaccctggattttacgcagttatcaagttctatagcgcccgcgctgctcatcgggcccagaaggcctgtgacaggaaacaattgttccaaaagagtcctgtcaaggtcagactcggtacaaggcacaaggcagtccagcaccaagcattagccttaaactctagcaaatgccaagagctcgccaattattactttgggttcaatggctgctccaagaggattataaagttgcaggagctttccgaccttgaggagagagaaaacgaagacagcatggtgcctcttcctaaacaatccctaaagttcttctgtgcccttgaggtcgtgctgccctcttgtgactgtaggtcaccaggaatcggcctggtagaagagccgatggataaagtcgaggaagagagtgggaagattgccgtggaatatcgacctagtgaggatatcgttggcgtcagatgcgaggaagaactccacggtctcatacaagttccgtgctctccatggaagcagtacggccaggaagaagaaggatacctgtcggatttcagcctggaggaagaggagttccgtcttcccgagctggactag

SEQ ID NO: 61762 - DNA, 756 bp, Artificial Sequence
  derived and/or modified sequence
atggccgagctggtgccctttgctgtgcccattgaaagtgacaagaccctgctggtgtgggagctgagcagcggccccacagctgaggccctgcaccacagcctcttcaccgccttcagccagtttggcctgctgtacagcgtgcgggtcttccccaatgctgctgtggcccaccctggcttctatgctgtgatcaagttctacagcgcccgggccgcccaccgggcccagaaggcctgtgacaggaagcagctgttccagaagagccctgtgaaggtgcggctgggcaccaggcacaaggctgtgcagcaccaggccctggccctgaacagcagcaagtgccaggagctggccaactactacttcggcttcaacggctgcagcaagaggatcatcaagctgcaggagctgagtgacctggaggagcgggagaatgaagacagcatggtgcccctgcccaagcagagcctgaagttcttctgtgccctggaggtggtgctgcccagctgtgactgccgcagccctggcatcggcctggtggaggagcccatggacaaggtggaggaggagagcggcaagattgctgtggagtaccggcccagcgaggacatcgtgggcgtgcgctgtgaggaggagctgcacggcctcatccaggtgccctgcagcccctggaagcagtatggccaggaggaggagggctacctgagtgacttcagcctggaggaggaggagttccggctgcctgagctggactag

SEQ ID NO: 61763 - DNA, 756 bp, Artificial Sequence
  derived and/or modified sequence
atggccgagctggtgcccttcgccgtgcccatcgagagcgacaagacccttctggtttgggagctcagttcaggccctacagcagaggccctgcatcactctttatttaccgcattctcccagttcgggctgctgtacagtgtgagagtattccccaacgctgccgtggcccatcctggcttctacgctgtgattaaattctactccgccagagccgcacacagggcccagaaagcctgcgatcggaagcagttatttcaaaaaagccccgtgaaggtacgactgggcaccaggcataaagctgtgcagcatcaggctctcgcccttaactcctcaaagtgtcaagagctggctaactactactttgggtttaatggctgctctaaaaggatcataaagcttcaggagctgagcgaccttgaggaaagggaaaacgaggatagtatggtgcccctgccgaagcaatctctgaagtttttctgtgccctggaagtggttctaccttcttgcgactgcagaagccctggtatcggtcttgtcgaagagcccatggataaggtggaggaagaatccgggaagatcgccgtggagtaccgaccaagcgaggacatagtgggtgtccgatgcgaagaagagctgcatggcctcatccaagtgccgtgttctccctggaagcagtacggacaggaggaggaaggatatttgagtgacttttctctggaagaagaagagttccggctgccagaactggactag

SEQ ID NO: 61764 - DNA, 756 bp, Artificial Sequence
  derived and/or modified sequence
atggcagaactagttcctttcgccgtgcccatagaaagtgacaagacactgcttgtgtgggagctcagcagtgggcctaccgctgaagctttgcatcactcacttttcactgctttctcacagtttgggctactctattctgtaagagtttttcctaacgcagccgtagcccatccagggttctacgccgtgattaagttttactcggctcgggcagcccatagggcccaaaaggcgtgtgatagaaaacagctgttccaaaaatctcctgtgaaggtaagactcggcactcggcacaaggccgtccagcatcaggccctggccctcaactccagcaagtgccaagaattggctaactattatttcggattcaacgggtgctccaagcgcatcattaaactgcaggagctatctgacttggaggagagggaaaacgaggattctatggttccacttccgaagcagagcttaaaatttttttgcgccctggaagtggtgttgccaagttgcgactgtaggtcaccaggaattggtctggtagaggagcccatggacaaggtggaagaggagtccggcaagatcgcagtcgaatatcgcccttctgaagatatcgttggcgtccgctgcgaggaggaactccatggcttgatccaggtgccttgctctccttggaaacagtatggccaggaggaagagggctaccttagtgatttttccctggaagaagaagagttcaggttgcctgagctggattag

SEQ ID NO: 61765 - DNA, 1067 bp, Artificial Sequence
  derived and/or modified sequence
ggcgcaatgctggggcgagggttagccgcgcaggtgcggtgaagggaggatggcggagttggtaccttttgcggttcccatcgagagtgacaaaaccttgctagtgtgggagctgagctccggacccacggccgaggctttgcatcattctctgttcacagcattttctcagtttggccttctgtattcagtccgggtcttcccaaatgctgcagtggcccatcctggtttctatgccgtcattaagttttattctgcaagggctgcccacagagcccaaaaggcatgcgaccggaagcagctttttcagaaatctccagtcaaggttcgtcttggcaccagacataaggcagttcaacatcaagcccttgccctgaacagttccaaatgccaagaactggcgaattactactttggtttcaatgggtgttccaaaaggatcatcaagcttcaggagctttctgaccttgaagaaagggaaaatgaagatagcatggtgccacttccgaagcaaagcctgaagttcttctgtgctttagaagtggtgttgccatcctgtgattgcaggagtcctggcattggcttggtggaggagcctatggataaggtggaggaagaaagtggtaaaatagctgtggagtacagacccagtgaagacatcgtaggtgtcagatgcgaagaagaactacacggtttaattcaagtcccttgctctccctggaagcagtatggccaagaggaggaagggtatctctcggatttcagcttggaggaggaagagttcaggctgccagaacttgactagcatttctgaatatcccaaggcgaggtcatgtaacttccttgggaagctctgtcgtgcccctaccccacgccgccccaccactataggctgctggagtcctggaaccacctgggtcggccgcccaaatctttcctggcgaaggggagggaaggggtgttctggtggagtgggaagggaggcttgggtaggattgtgggataagatcgccctggtgacgaggagcggatctcgaacggaacttaataaaggttgcctagataaa

SEQ ID NO: 61766 - DNA, 756 bp, Artificial Sequence
  derived and/or modified sequence
atggccgagctggtgcccttcgccgtgcccatcgagagcgacaagaccctgctggtgtgggagctgagcagcggccccaccgccgaggccctgcaccacagcctgttcaccgccttcagccagttcggcctgctgtacagcgtgagagtgttccccaacgccgccgtggcccaccccggcttctacgccgtgatcaagttctacagcgccagagccgcccacagagcccagaaggcctgcgacagaaagcagctgttccagaagagccccgtgaaggtgagactgggcaccagacacaaggccgtgcagcaccaggccctggccctgaacagcagcaagtgccaggagctggccaactactacttcggcttcaacggctgcagcaagagaatcatcaagctgcaggagctgagcgacctggaggagagagagaacgaggacagcatggtgcccctgcccaagcagagcctgaagttcttctgcgccctggaggtggtgctgcccagctgcgactgcagaagccccggcatcggcctggtggaggagcccatggacaaggtggaggaggagagcggcaagatcgccgtggagtacagacccagcgaggacatcgtgggcgtgagatgcgaggaggagctgcacggcctgatccaggtgccctgcagcccctggaagcagtacggccaggaggaggagggctacctgagcgacttcagcctggaggaggaggagttcagactgcccgagctggactag

SEQ ID NO: 61767 - DNA, 393 bp, Artificial Sequence
  derived and/or modified sequence
ttcggattcaacgggtgctccaaacgcatcattaaactccaggaattatcggacttagaagaaagagagaacgaagactctatggtgccgctgcccaagcaaagtttgaaattcttctgtgctctggaagtggtactgccaagctgcgattgccgctcccccgggatcggcctcgtcgaggaaccaatggacaaggtcgaagaggaatcgggtaagatcgcagtagagtatagacctagcgaagacattgtgggcgttcggtgtgaagaggagctgcatggactgatacaggtcccatgcagcccttggaaacaatacggccaagaagaagaaggatacttgtccgacttttccctagaagaggaagaatttcgcctccccgagctggattag

SEQ ID NO: 61768 - DNA, 393 bp, Artificial Sequence
  derived and/or modified sequence
tttggcttcaacggctgcagcaagaggatcatcaagctgcaggagctgagtgacctggaggagagagaaaatgaagattccatggtgcccctgcccaagcagagcctgaagttcttctgtgccctggaggtggtgctgcccagctgtgactgccgcagccctggcatcggcctggtggaggagcccatggacaaggtggaggaggagagcggcaagattgctgtggagtaccggcccagtgaagatattgtgggcgtgcgctgtgaggaggagctgcacggcctcatccaggtgccctgcagcccctggaagcagtatggccaggaggaggagggctacctgagtgacttcagcctggaggaggaggagttccggctgcctgagctggactag

SEQ ID NO: 61769 - DNA, 393 bp, Artificial Sequence
  derived and/or modified sequence
ttcggcttcaacggctgcagcaagcggatcatcaagctgcaggagctgagcgatcttgaggagcgtgaaaacgaagacagtatggtgcctctcccgaagcagtccctcaagttcttttgcgcactggaagtggtcctaccttcctgcgattgtaggtctcccgggatcggcttggttgaggagcctatggacaaagtcgaagaggagtcaggcaaaatcgccgtggagtatcggcccagcgaagatattgtgggcgtaagatgcgaagaagaattacatggcctgatccaggtcccttgttccccctggaagcagtacggacaggaagaagaaggctatctgagtgacttttctttggaggaggaggaattccgcctgcccgagctggactag

SEQ ID NO: 61770 - DNA, 393 bp, Artificial Sequence
  derived and/or modified sequence
tttggtttcaacggatgttccaagcggatcataaaactccaggaacttagtgacctagaagaaagggaaaatgaagactcgatggttcccttgccaaagcaaagcctcaagtttttttgcgctctggaagtggtcctgccttcatgcgactgccggagtcctggcatcggattggtcgaggaaccaatggacaaggtggaagaagagtctgggaaaattgccgttgagtataggccatccgaggacattgttggagtgcgctgcgaagaggagttgcatggattgattcaagtgccatgcagcccgtggaagcaatatggccaggaggaggaaggatatctttccgacttttccttggaggaagaagagtttcgcctgcctgagctggattag

SEQ ID NO: 61771 - DNA, 669 bp, Artificial Sequence
  derived and/or modified sequence
tttggtttcaatgggtgttccaaaaggatcatcaagcttcaggagctttctgaccttgaagaaagggaaaatgaagatagcatggtgccacttccgaagcaaagcctgaagttcttctgtgctttagaagtggtgttgccatcctgtgattgcaggagtcctggcattggcttggtggaggagcctatggataaggtggaggaagaaagtggtaaaatagctgtggagtacagacccagtgaagacatcgtaggtgtcagatgcgaagaagaactacacggtttaattcaagtcccttgctctccctggaagcagtatggccaagaggaggaagggtatctctcggatttcagcttggaggaggaagagttcaggctgccagaacttgactagcatttctgaatatcccaaggcgaggtcatgtaacttccttgggaagctctgtcgtgcccctaccccacgccgccccaccactataggctgctggagtcctggaaccacctgggtcggccgcccaaatctttcctggcgaaggggagggaaggggtgttctggtggagtgggaagggaggcttgggtaggattgtgggataagatcgccctggtgacgaggagcggatctcgaacggaacttaataaaggttgcctagataaagatatggtaaataa

SEQ ID NO: 61772 - DNA, 393 bp, Artificial Sequence
  derived and/or modified sequence
ttcggcttcaacggctgcagcaagagaatcatcaagctgcaggagctgagcgacctggaggagagagagaacgaggacagcatggtgcccctgcccaagcagagcctgaagttcttctgcgccctggaggtggtgctgcccagctgcgactgcagaagccccggcatcggcctggtggaggagcccatggacaaggtggaggaggagagcggcaagatcgccgtggagtacagacccagcgaggacatcgtgggcgtgagatgcgaggaggagctgcacggcctgatccaggtgccctgcagcccctggaagcagtacggccaggaggaggagggctacctgagcgacttcagcctggaggaggaggagttcagactgcccgagctggactag

SEQ ID NO: 61773 - protein, 143 aa, Artificial Sequence
  derived and/or modified sequence
MHLLVPPPQHSLFTAFSQFGLLYSVRVFPNAAVAHPGFYAVIKFYSARAAHRAQKACDRKQLFQKSPVKVRLGTRHKAVQHQALALNSSKCQELANYYFGFNGCSKRIIKVPCSPWKQYGQEEEGYLSDFSLEEEEFRLPELD

SEQ ID NO: 61774 - DNA, 432 bp, Artificial Sequence
  derived and/or modified sequence
atgcacctgctggtgcccccacctcagcactccctgttcaccgccttcagtcagttcgggctgttgtactccgtgagagtgtttcctaacgccgcagtggcacatccagggttctacgcagtgattaaattctattcggcaagggcagcccatcgagctcagaaagcatgcgatcggaaacagctttttcaaaaaagccccgtgaaggtcagactgggcactcgacacaaagcggtccagcaccaggccctagccctgaacagttctaaatgtcaggagctcgccaactattacttcgggttcaatgggtgtagtaaacggattattaaggtcccttgtagcccttggaagcaatatggacaggaggaagagggataccttagcgacttcagcctcgaggaggaggagtttagactgccggagcttgactag

SEQ ID NO: 61775 - DNA, 432 bp, Artificial Sequence
  derived and/or modified sequence
atgcacctgctggtgcccccaccccagcacagcctcttcaccgccttcagccagtttggcctgctgtacagcgtgcgggtcttccccaatgctgctgtggcccaccctggcttctacgccgtcatcaagttctacagcgcccgggccgcccaccgggcccagaaggcctgtgacaggaagcagctgttccagaagagccctgtgaaggtgcggctgggcaccaggcacaaggctgtgcagcaccaggccctggccctgaacagcagcaagtgccaggagctggccaactactacttcggcttcaacggctgcagcaagaggatcatcaaggtgccctgcagcccctggaagcagtatggccaggaggaggagggctacctgagtgacttcagcctggaggaggaggagttccggctgcctgagctggactag

SEQ ID NO: 61776 - DNA, 432 bp, Artificial Sequence
  derived and/or modified sequence
atgcacctgctggtgccccccccccagcacagcctgttcaccgcctttagtcagtttggcctcctgtactctgtgagagtgttccccaatgcagccgtggctcatcccgggttctatgcggtgatcaagttttactccgcgagggcggctcatcgggcgcaaaaagcatgcgaccggaagcagctgttccagaagagcccagtaaaagtgcgtctgggcacacgtcacaaggcagtgcaacatcaagccctcgctctgaactcctcaaagtgccaggagcttgcgaattattacttcgggttcaatggatgcagtaaaaggattattaaggtgccctgttctccctggaagcaatacggacaggaggaagaaggctatctttctgatttcagtcttgaggaagaggagtttcgccttccggaactcgactag

SEQ ID NO: 61777 - DNA, 432 bp, Artificial Sequence
  derived and/or modified sequence
atgcacctccttgttccacccccacagcactcactttttacagcgtttagccaattcggcttgctgtattccgtgcgagttttccccaacgctgctgtcgcacaccccggtttttacgccgtcatcaagttttatagtgcgagggccgctcacagggcccagaaggcttgtgacagaaagcagctgttccagaaatcaccagtaaaagtgagactgggaacaagacataaggccgtacaacaccaagccctggccctgaacagctccaagtgtcaggagctcgctaattactacttcggtttcaacgggtgttcaaaaagaatcataaaagtgccctgttctccttggaagcagtatgggcaggaagaagaaggatacctctctgacttttccctggaagaagaggagtttagacttccagaattggattag

SEQ ID NO: 61778 - DNA, 432 bp, Artificial Sequence
  derived and/or modified sequence
atgcatttacttgtcccacccccacagcattctctgttcacagcattttctcagtttggccttctgtattcagtccgggtcttcccaaatgctgcagtggcccatcctggtttctatgccgtcattaagttttattctgcaagggctgcccacagagcccaaaaggcatgcgaccggaagcagctttttcagaaatctccagtcaaggttcgtcttggcaccagacataaggcagttcaacatcaagcccttgccctgaacagttccaaatgccaagaactggcgaattactactttggtttcaatgggtgttccaaaaggatcatcaaggtcccttgctctccctggaagcagtatggccaagaggaggaagggtatctctcggatttcagcttggaggaggaagagttcaggctgccagaacttgactag

SEQ ID NO: 61779 - DNA, 432 bp, Artificial Sequence
  derived and/or modified sequence
atgcacctgctggtgccccccccccagcacagcctgttcaccgccttcagccagttcggcctgctgtacagcgtgagagtgttccccaacgccgccgtggcccaccccggcttctacgccgtgatcaagttctacagcgccagagccgcccacagagcccagaaggcctgcgacagaaagcagctgttccagaagagccccgtgaaggtgagactgggcaccagacacaaggccgtgcagcaccaggccctggccctgaacagcagcaagtgccaggagctggccaactactacttcggcttcaacggctgcagcaagagaatcatcaaggtgccctgcagcccctggaagcagtacggccaggaggaggagggctacctgagcgacttcagcctggaggaggaggagttcagactgcccgagctggactag

SEQ ID NO: 61780 - protein, 116 aa, Artificial Sequence
  derived and/or modified sequence
MHLLVPPPQHSLFTAFSQFGLLYSVRVFPNAAVAHPGFYAVIKFYSARAAHRAQKACDRKQLFQKSPVKVRLGTRHKAVQHQALALNSSKCQELANYYFGFNGCSKRIIKDHYHSL

SEQ ID NO: 61781 - DNA, 351 bp, Artificial Sequence
  derived and/or modified sequence
atgcacttgctggtaccacccccacagcactctctgttcacggctttcagccaattcggccttctgtactccgtgcgcgtgttcccaaatgccgcagtcgcccaccccggcttttacgctgtcatcaaattttactccgcaagagcagctcaccgtgcccagaaggcctgcgacagaaagcagcttttccagaagtctccagtgaaggtcagattgggaactcggcacaaggccgtgcagcaccaggccctcgcgctgaactcttctaaatgtcaggagctggccaattactacttcggcttcaatgggtgcagcaaaaggataatcaaagatcattaccactcactctag

SEQ ID NO: 61782 - DNA, 351 bp, Artificial Sequence
  derived and/or modified sequence
atgcacctgctggtgcccccaccccagcacagcctcttcaccgccttcagccagtttggcctgctgtacagcgtgcgggtcttccccaatgctgctgtggcccaccctggcttctacgccgtcatcaagttctacagcgcccgggccgcccaccgggcccagaaggcctgtgacaggaagcagctgttccagaagagccctgtgaaggtgcggctgggcaccaggcacaaggctgtgcagcaccaggccctggccctgaacagcagcaagtgccaggagctggccaactactacttcggcttcaacggctgcagcaagaggatcatcaaggaccactaccacagcctgtag

SEQ ID NO: 61783 - DNA, 351 bp, Artificial Sequence
  derived and/or modified sequence
atgcacctgctggtgccccccccccagcacagcctgttcaccgccttcagccagttcgggttactgtactccgtgagagtgtttccaaatgccgcagtggcccatccaggcttttatgccgtcataaagttttattcagcgcgtgcagcccacagagctcagaaggcttgcgatagaaaacagctgtttcagaaatcccctgtcaaagtgcggctgggaacacgacacaaggccgttcaacatcaggccttggcacttaattcatctaagtgccaggagctggccaattactattttggatttaatggctgcagcaagagaataatcaaggaccactatcacagcctctag

SEQ ID NO: 61784 - DNA, 351 bp, Artificial Sequence
  derived and/or modified sequence
atgcaccttctagtaccgcctccgcagcattcactgtttaccgcttttagtcagtttggcctactctactccgtgagagtgttccctaacgccgctgttgcccaccccggtttctatgccgtgatcaagttctatagcgcacgtgccgcacatagagctcagaaggcttgcgatcgcaagcagttattccagaaaagccccgttaaggtccgactggggacaaggcacaaagcagtgcagcatcaggccttggctttaaacagctctaagtgccaagaactcgctaactactacttcggcttcaacggttgtagcaaacgtatcattaaagatcactatcactcactatag

SEQ ID NO: 61785 - DNA, 542 bp, Artificial Sequence
  derived and/or modified sequence
tctgggcgtgagatttcatgcatttacttgtcccacccccacagcattctctgttcacagcattttctcagtttggccttctgtattcagtccgggtcttcccaaatgctgcagtggcccatcctggtttctatgccgtcattaagttttattctgcaagggctgcccacagagcccaaaaggcatgcgaccggaagcagctttttcagaaatctccagtcaaggttcgtcttggcaccagacataaggcagttcaacatcaagcccttgccctgaacagttccaaatgccaagaactggcgaattactactttggtttcaatgggtgttccaaaaggatcatcaaggaccattatcattccttatgaaaaggaagacagcccagaagcttgctattcagaaggctttgtcagatgcattccagaaactgttgattgttgttctaggtaagactgtcttgatcatccttgaagtacttcagtttcagtaagcaaataaactcattttgaaaagttaattgaataaaaatattgatatctaaa

SEQ ID NO: 61786 - DNA, 351 bp, Artificial Sequence
  derived and/or modified sequence
atgcacctgctggtgccccccccccagcacagcctgttcaccgccttcagccagttcggcctgctgtacagcgtgagagtgttccccaacgccgccgtggcccaccccggcttctacgccgtgatcaagttctacagcgccagagccgcccacagagcccagaaggcctgcgacagaaagcagctgttccagaagagccccgtgaaggtgagactgggcaccagacacaaggccgtgcagcaccaggccctggccctgaacagcagcaagtgccaggagctggccaactactacttcggcttcaacggctgcagcaagagaatcatcaaggaccactaccacagcctgtag

SEQ ID NO: 61787 - protein, 261 aa, Artificial Sequence
  derived and/or modified sequence
MHLLVPPPQHSLFTAFSQFGLLYSVRVFPNAAVAHPGFYAVIKFYSARAAHRAQKACDRKQLFQKSPVKVRLGTRHKAVQHQALALNSSKCQELANYYFGFNGCSKRIIKLQELSDLEERENEDSMVPLPKQSLKFFCALEVVLPSCDCRSPGIGLVEEPMDKVEEGPLSFLMKRKTAQKLAIQKALSDAFQKLLIVVLESGKIAVEYRPSEDIVGVRCEEELHGLIQVPCSPWKQYGQEEEGYLSDFSLEEEEFRLPELD

SEQ ID NO: 61788 - DNA, 786 bp, Artificial Sequence
  derived and/or modified sequence
atgcatctgctggttccgccccctcaacactcccttttcactgcatttagccagttcggcctgctctacagcgtgagagtgtttcccaatgcagcagtcgcgcaccccggtttctacgccgtaattaaattctactccgcccgagcggcccaccgagcccagaaggcctgtgacaggaagcagttgttccagaagagcccagtgaaagttcgcctgggtacccggcataaagccgtgcagcaccaagccctcgctttaaatagcagtaagtgtcaagaattagctaattactactttggcttcaatggctgttctaaaagaatcattaaactgcaggagctgtccgatttggaagaaagggaaaacgaggactccatggtgcctctaccaaaacagtcgctgaagttcttttgtgcactggaggtggtgctcccaagttgtgattgtcgaagtccagggatcggactcgtggaagagcctatggacaaggtggaagagggtccgctctcttttctcatgaaaaggaagactgctcaaaagttagccattcaaaaggctctgtccgatgccttccagaagcttctgatcgtcgtattggaaagcgggaagatcgccgtcgaatacagaccctcagaagatatcgtaggagtgcgctgcgaggaagaactccacggcctgatccaggtgccatgctctccgtggaagcagtacgggcaggaggaggagggttacctgagcgacttctctttagaggaggaggagtttcggctgcctgaacttgactag

SEQ ID NO: 61789 - DNA, 786 bp, Artificial Sequence
  derived and/or modified sequence
atgcacctgctggtgcccccaccccagcacagcctcttcaccgccttcagccagtttggcctgctgtacagcgtgcgggtcttccccaatgctgctgtggcccaccctggcttctacgccgtcatcaagttctacagcgcccgggccgcccaccgggcccagaaggcctgtgacaggaagcagctgttccagaagagccctgtgaaggtgcggctgggcaccaggcacaaggctgtgcagcaccaggccctggccctgaacagcagcaagtgccaggagctggccaactactacttcggcttcaacggctgcagcaagaggatcatcaagctgcaggagctgagtgacctggaggagagagaaaatgaagattccatggtgcccctgcccaagcagagcctgaagttcttctgtgccctggaggtggtgctgcccagctgtgactgccgcagccctggcatcggcctggtggaggagcccatggacaaggtggaggagggccccctgtccttcctgatgaagaggaagacagcccagaagctggccatccagaaggccctgagtgatgccttccagaagctgctgattgtggtgctggagagcggcaagattgctgtggagtaccggcccagcgaggacatcgtgggcgtgcgctgtgaggaggagctgcacggcctcatccaggtgccctgcagcccctggaagcagtatggccaggaggaggagggctacctgagtgacttcagcctggaggaggaggagttccggctgcctgagctggactag

SEQ ID NO: 61790 - DNA, 786 bp, Artificial Sequence
  derived and/or modified sequence
atgcacctgctggtgccccccccccagcacagcctgttcaccgccttctcccagttcggactgctgtatagtgtacgagtgtttcccaacgctgcggtggcacaccccggtttctacgccgtcataaaattctactctgcccgggctgctcacagggcacagaaagcatgtgaccgcaaacagctgttccagaagagtccagtgaaggtccgactgggaacgcgtcacaaagccgtgcagcaccaggcactcgcactgaactcttccaagtgccaggaactcgctaattattattttggctttaatgggtgcagcaagaggatcatcaaactgcaggagctcagcgaccttgaggaacgagagaatgaggactctatggtgcccctgcctaagcagagtcttaaattcttttgcgcactggaggtggtgctgcccagttgcgattgcagatcacctggaataggattggttgaagagcctatggataaagtggaagaaggccctctctccttcctgatgaagcggaagaccgcccaaaagctggcaatccagaaggctctgtcagatgcctttcagaagctccttatcgtcgtgttagaatctggcaagatcgctgtggaataccgtccttccgaagatatcgtgggggtgcggtgcgaagaggaattgcacgggttaattcaggtcccttgtagcccatggaagcagtacggccaggaggaggagggttacctgtccgacttcagcctggaggaagaggaattccggctgcccgaactcgattag

SEQ ID NO: 61791 - DNA, 786 bp, Artificial Sequence
  derived and/or modified sequence
atgcatttgctggttcctcctcctcaacacagtctctttacagccttcagtcaatttggattgctttatagcgtacgagtttttcccaacgccgctgtggcccatccaggtttctatgctgttattaaattctatagcgcacgggctgcccacagggcccaaaaagcatgtgaccgaaagcaactcttccaaaaatcccccgtaaaagtgcgcttgggcacccggcacaaggccgtgcagcatcaggccttagcactaaactcctctaagtgccaagagctggccaattattacttcggcttcaatggctgctctaaacggataataaagctccaggagctgagcgatctggaagagcgggagaatgaagactctatggtgcctcttccaaagcagtccctgaagttcttctgtgctctcgaagttgttctcccttcctgcgactgccggagccctggaatcggactggtggaggagcctatggacaaggttgaggaaggccctttgtcatttttgatgaaacggaaaacggcccagaaactagcaatccaaaaagccctgagcgacgcctttcaaaaactgttgatcgtggtgctggagagtggaaagattgcagtcgagtatcgacccagcgaggacatcgtgggagtgcggtgcgaggaggagctgcacggccttatccaggtgccatgtagcccatggaagcagtacggacaggaggaggaagggtacctttctgatttcagtcttgaagaggaagagtttcgattgccagagctggattag

SEQ ID NO: 61792 - DNA, 1535 bp, Artificial Sequence
  derived and/or modified sequence
tgctggggcgagggttagccgcgcaggtgcggtgaagggaggatggcggagttggtaccttttgcggttcccatcgagagtgacaaaaccttgctagtgtgggagctgagctccggacccacggccgaggctttgcatgtgagccggggccaggatggagggagggatggagaaagctgcccacccgctgactgggagttccggagtcctgcctcagaccctcacctgcctgagcctccgctgaaggactcttaattataaaggggatcccaactgacaactgacgacccccaacagatttttagagtcccggagaggtatctctccaccttcagaacgttttaccttccagtgcttcttaaagtttaggattttaagaggaaaacctgttgattaagtgggaagtgttttgaatcgcatccttcgcgaagagaggtttggggaatatgagggcatgtgcggttttgttttctgggcgtgagatttcatgcatttacttgtcccacccccacagcattctctgttcacagcattttctcagtttggccttctgtattcagtccgggtcttcccaaatgctgcagtggcccatcctggtttctatgccgtcattaagttttattctgcaagggctgcccacagagcccaaaaggcatgcgaccggaagcagctttttcagaaatctccagtcaaggttcgtcttggcaccagacataaggcagttcaacatcaagcccttgccctgaacagttccaaatgccaagaactggcgaattactactttggtttcaatgggtgttccaaaaggatcatcaagcttcaggagctttctgaccttgaagaaagggaaaatgaagatagcatggtgccacttccgaagcaaagcctgaagttcttctgtgctttagaagtggtgttgccatcctgtgattgcaggagtcctggcattggcttggtggaggagcctatggataaggtggaggaaggaccattatcattccttatgaaaaggaagacagcccagaagcttgctattcagaaggctttgtcagatgcattccagaaactgttgattgttgttctagaaagtggtaaaatagctgtggagtacagacccagtgaagacatcgtaggtgtcagatgcgaagaagaactacacggtttaattcaagtcccttgctctccctggaagcagtatggccaagaggaggaagggtatctctcggatttcagcttggaggaggaagagttcaggctgccagaacttgactagcatttctgaatatcccaaggcgaggtcatgtaacttccttgggaagctctgtcgtgcccctaccccacgccgccccaccactataggctgctggagtcctggaaccacctgggtcggccgcccaaatctttcctggcgaaggggagggaaggggtgttctggtggagtgggaagggaggcttgggtaggattgtgggataagatcgccctggtgacgaggagcggatctcgaacggaacttaataaaggttgcctagataaa

SEQ ID NO: 61793 - DNA, 786 bp, Artificial Sequence
  derived and/or modified sequence
atgcacctgctggtgccccccccccagcacagcctgttcaccgccttcagccagttcggcctgctgtacagcgtgagagtgttccccaacgccgccgtggcccaccccggcttctacgccgtgatcaagttctacagcgccagagccgcccacagagcccagaaggcctgcgacagaaagcagctgttccagaagagccccgtgaaggtgagactgggcaccagacacaaggccgtgcagcaccaggccctggccctgaacagcagcaagtgccaggagctggccaactactacttcggcttcaacggctgcagcaagagaatcatcaagctgcaggagctgagcgacctggaggagagagagaacgaggacagcatggtgcccctgcccaagcagagcctgaagttcttctgcgccctggaggtggtgctgcccagctgcgactgcagaagccccggcatcggcctggtggaggagcccatggacaaggtggaggagggccccctgagcttcctgatgaagagaaagaccgcccagaagctggccatccagaaggccctgagcgacgccttccagaagctgctgatcgtggtgctggagagcggcaagatcgccgtggagtacagacccagcgaggacatcgtgggcgtgagatgcgaggaggagctgcacggcctgatccaggtgccctgcagcccctggaagcagtacggccaggaggaggagggctacctgagcgacttcagcctggaggaggaggagttcagactgcccgagctggactag

SEQ ID NO: 61794 - protein, 95 aa, Artificial Sequence
  derived and/or modified sequence
MDGFYDQQVPYMVTNSQRGRNCNEKPTNVRKRKFINRDLAHDSEELFQDLSQLQETWLAEAQVPDNDEQFVPDYQAESLAFHGLPLKIKKEPHSP

SEQ ID NO: 61795 - protein, 454 aa, Artificial Sequence
  derived and/or modified sequence
MDGFYDQQVPYMVTNSQRGRNCNEKPTNVRKRKFINRDLAHDSEELFQDLSQLQETWLAEAQVPDNDEQFVPDYQAESLAFHGLPLKIKKEPHSPCSEISSACSQEQPFKFSYGEKCLYNVSAYDQKPQVGMRPSNPPTPSSTPVSPLHHASPNSTHTPKPDRAFPAHLPPSQSIPDSSYPMDHRFRRQLSEPCNSFPPLPTMPREGRPMYQRQMSEPNIPFPPQGFKQEYHDPVYEHNTMVGSAASQSFPPPLMIKQEPRDFAYDSGCMFEKGPRQFYDDTCVVPEKFDGDIKQEPGMYREGPTYQRRGSLQLWQFLVALLDDPSNSHFIAWTGRGMEFKLIEPEEVARRWGIQKNRPAMNYDKLSRSLRYYYEKGIMQKVAGERYVYKFVCDPEALFSMAFPDNQRPLLKTDMERHINEEDTVPLSHFDESMAYMPEGGCCNPHPYNEGYVY

SEQ ID NO: 61796 - DNA, 372 bp, Artificial Sequence
  derived and/or modified sequence
atggacggcttctacgaccagcaggtgccctacatggtgaccaacagccagagaggcagaaactgcaacgagaagcccaccaacgtgagaaagagaaagttcatcaacagagacctggcccacgacagcgaggagctgttccaggacctgagccagctgcaggagacctggctggccgaggcccaggtgcccgacaacgacgagcagttcgtgcccgactaccaggccgagagcctggccttccacggcctgcccctgaagatcaagaaggagccccacagcccctgcagcgagatcagcagcgcctgcagccaggagcagcccttcaagttcagctacggcgagaagtgcctgtacaacgtgagcgcctag

SEQ ID NO: 61797 - DNA, 288 bp, Artificial Sequence
  derived and/or modified sequence
atggacggcttctacgaccagcaggtgccctacatggtgaccaacagccagagaggcagaaactgcaacgagaagcccaccaacgtgagaaagagaaagttcatcaacagagacctggcccacgacagcgaggagctgttccaggacctgagccagctgcaggagacctggctggccgaggcccaggtgcccgacaacgacgagcagttcgtgcccgactaccaggccgagagcctggccttccacggcctgcccctgaagatcaagaaggagccccacagcccctag

SEQ ID NO: 61798 - DNA, 1365 bp, Artificial Sequence
  derived and/or modified sequence
atggacggcttctacgaccagcaggtgccctacatggtgaccaacagccagagaggcagaaactgcaacgagaagcccaccaacgtgagaaagagaaagttcatcaacagagacctggcccacgacagcgaggagctgttccaggacctgagccagctgcaggagacctggctggccgaggcccaggtgcccgacaacgacgagcagttcgtgcccgactaccaggccgagagcctggccttccacggcctgcccctgaagatcaagaaggagccccacagcccctgcagcgagatcagcagcgcctgcagccaggagcagcccttcaagttcagctacggcgagaagtgcctgtacaacgtgagcgcctacgaccagaagccccaggtgggcatgagacccagcaacccccccacccccagcagcacccccgtgagccccctgcaccacgccagccccaacagcacccacacccccaagcccgacagagccttccccgcccacctgccccccagccagagcatccccgacagcagctaccccatggaccacagattcagaagacagctgagcgagccctgcaacagcttcccccccctgcccaccatgcccagagagggcagacccatgtaccagagacagatgagcgagcccaacatccccttccccccccagggcttcaagcaggagtaccacgaccccgtgtacgagcacaacaccatggtgggcagcgccgccagccagagcttccccccccccctgatgatcaagcaggagcccagagacttcgcctacgacagcggctgcatgttcgagaagggccccagacagttctacgacgacacctgcgtggtgcccgagaagttcgacggcgacatcaagcaggagcccggcatgtacagagagggccccacctaccagagaagaggcagcctgcagctgtggcagttcctggtggccctgctggacgaccccagcaacagccacttcatcgcctggaccggcagaggcatggagttcaagctgatcgagcccgaggaggtggccagaagatggggcatccagaagaacagacccgccatgaactacgacaagctgagcagaagcctgagatactactacgagaagggcatcatgcagaaggtggccggcgagagatacgtgtacaagttcgtgtgcgaccccgaggccctgttcagcatggccttccccgacaaccagagacccctgctgaagaccgacatggagagacacatcaacgaggaggacaccgtgcccctgagccacttcgacgagagcatggcctacatgcccgagggcggctgctgcaacccccacccctacaacgagggctacgtgtactag

SEQ ID NO: 61799 - DNA, 372 bp, Artificial Sequence
  derived and/or modified sequence
atggatggcttctacgatcaacaggtcccctatatggtaaccaatagccagcgcggtagaaactgtaacgaaaagccgacaaatgtgaggaagagaaagttcattaatcgggacctagcccatgacagtgaagaacttttccaggacctgagccagctgcaggaaacatggctcgccgaggctcaggttccagacaatgatgagcagtttgtcccagactaccaagccgaaagtctggcttttcatgggttgccattaaagattaagaaagaaccacattccccgtgttcggagatttctagcgcatgcagtcaggaacagcccttcaaattcagctacggagagaagtgcctctacaatgtttcagcctag

SEQ ID NO: 61800 - DNA, 288 bp, Artificial Sequence
  derived and/or modified sequence
atggacggcttctacgatcaacaggtgccctacatggtgactaacagccaaagaggaagaaactgtaatgagaaacctactaacgtgcggaagagaaaattcatcaatagggatcttgcccacgactcagaagagctattccaggacctttcccaactgcaggagacatggctcgctgaggcccaagtcccggacaatgacgagcagtttgtgcccgactaccaggccgagtcacttgcttttcacggactgccacttaaaattaagaaagagccccactcaccttag

SEQ ID NO: 61801 - DNA, 1365 bp, Artificial Sequence
  derived and/or modified sequence
atggacggattctatgaccagcaggttccttatatggtgaccaactcccagcggggccgcaattgtaatgagaaacccaccaacgtacgcaaacgaaagttcattaacagggatttggcccatgattccgaggagctcttccaggatctgagccagctgcaagagacctggctggccgaggcccaggttccagataatgatgagcagttcgtccccgattatcaggcagaaagcctggcattccacggtctcccgcttaaaatcaagaaggaaccccacagcccgtgttcggaaatctcaagtgcctgttctcaggagcagccctttaagttctcgtatggagagaagtgcctctacaacgttagcgcttatgaccaaaaaccgcaggttggaatgcgccccagtaacccccctactccgtcaagcacgcctgtcagccctctacatcatgcatcaccaaattctactcacactccaaagccagacagggcgtttcctgcacacctccccccttcgcagtctatccccgactcttcctaccctatggatcacaggttcagacggcagctcagtgaaccttgtaactcatttcccccactccctacaatgccacgcgagggtcgtccgatgtaccagagacagatgtcagaacctaatattccatttccaccccaggggttcaaacaagaataccacgaccccgtgtacgaacacaacacaatggttggatctgcggcgagccagtcatttcccccgcccttgatgattaaacaggaaccacgggatttcgcttacgactcagggtgcatgttcgaaaagggcccgaggcagttttacgatgatacgtgtgtcgttccggagaaattcgacggcgatatcaagcaggaaccaggcatgtaccgggaaggtcctacttatcagcggaggggttctcttcaattatggcagttcctggtggcactcctggacgacccgagtaactcacattttatcgcttggaccggacggggaatggaattcaaactgatcgagcctgaggaagtagccagaagatggggtatccagaagaaccgtccagcgatgaactatgacaagttgtcacgatcgcttaggtactactatgagaagggtattatgcaaaaagtggctggcgaaaggtacgtttataagtttgtgtgtgacccagaggctcttttctcaatggcgttccctgataaccagaggccactactgaagacagatatggaaagacacattaatgaagaggatactgtgcctctttcccattttgatgaatccatggcctatatgcccgagggagggtgctgtaatccccacccctacaacgaggggtacgtgtactag

SEQ ID NO: 61802 - DNA, 554 bp, Artificial Sequence
  derived and/or modified sequence
cgttattggctgcgggaagaacctcgccgggacctaacccgaagctccgccccctcgcggttaccctggatacccgtcaggctcgggctgcagagaaggttgatagaagtccagatcctgaggaaatctccagctaaatgctcaaaatataaaatactgagctgagatttgcgaagagcagcagcatggatggattttatgaccagcaagtgccttacatggtcaccaatagtcagcgtgggagaaattgtaacgagaaaccaacaaatgtcaggaaaagaaaattcattaacagagatctggctcatgattcagaagaactctttcaagatctaagtcaattacaggaaacatggcttgcagaagctcaggtacctgacaatgatgagcagtttgtaccagactatcaggctgaaagtttggcttttcatggcctgccactgaaaatcaagaaagaaccccacagtccatgttcagaaatcagctctgcctgcagtcaagaacagccctttaaattcagctatggagaaaagtgcctgtacaatgtcagtgcc

SEQ ID NO: 61803 - DNA, 580 bp, Artificial Sequence
  derived and/or modified sequence
aagctccgccccctcgcggttaccctggatacccgtcaggctcgggctgcagagaaggaggatcagggcaagtggcttcagagatgcagccctcactgcttaacgtcctagttattgtccttgaaacccgagccatctcaccgctcgcccccaaccctgggctctggctgtttaaaagctggagaggaagtgaaagcgtcaagtacagttgatagaagtccagatcctgaggaaatctccagctaaatgctcaaaatataaaatactgagctgagatttgcgaagagcagcagcatggatggattttatgaccagcaagtgccttacatggtcaccaatagtcagcgtgggagaaattgtaacgagaaaccaacaaatgtcaggaaaagaaaattcattaacagagatctggctcatgattcagaagaactctttcaagatctaagtcaattacaggaaacatggcttgcagaagctcaggtacctgacaatgatgagcagtttgtaccagactatcaggctgaaagtttggcttttcatggcctgccactgaaaatcaagaaagaaccccacagtccat

SEQ ID NO: 61804 - DNA, 546 bp, Artificial Sequence
  derived and/or modified sequence
agaggcgctttcggcttccaagggggaagtgctgggctataattaatgtttttattaaatttggagggaagtttttgcagcctttcgcctagcgtggccttcaggtgggtctttccaacaactttttatgtctctccagataattgcatggttgtgggtcgcaaaaactatcctgatgaaagaggtgtctccgtctctttagtcccgttaggtgcaaagcaagtctcgttgatcgccattgctagttttgcacacgtttgcgaatcagagctgcccggggtacaccgaccgcgcagggaaacatcgagagtgtaaataaatacatcgcctcttgttcggatttttgctactaccgaaaatatgtaaattgtgaactctgttggctctctttggatccaggttgatagaagtccagatcctgaggaaatctccagctaaatgctcaaaatataaaatactgagctgagatttgcgaagagcagcagcatggatggattttatgaccagcaagtgccttacatggtcaccaatagtcagcgtgggaga

SEQ ID NO: 61805 - DNA, 4402 bp, Artificial Sequence
  derived and/or modified sequence
gagctctgtcagaggcgctttcggcttccaagggggaagtgctgggctataattaatgtttttattaaatttggagggaagtttttgcagcctttcgcctagcgtggccttcaggttgatagaagtccagatcctgaggaaatctccagctaaatgctcaaaatataaaatactgagctgagatttgcgaagagcagcagcatggatggattttatgaccagcaagtgccttacatggtcaccaatagtcagcgtgggagaaattgtaacgagaaaccaacaaatgtcaggaaaagaaaattcattaacagagatctggctcatgattcagaagaactctttcaagatctaagtcaattacaggaaacatggcttgcagaagctcaggtacctgacaatgatgagcagtttgtaccagactatcaggctgaaagtttggcttttcatggcctgccactgaaaatcaagaaagaaccccacagtccatgttcagaaatcagctctgcctgcagtcaagaacagccctttaaattcagctatggagaaaagtgcctgtacaatgtcagtgcctatgatcagaagccacaagtgggaatgaggccctccaacccccccacaccatccagcacgccagtgtccccactgcatcatgcatctccaaactcaactcatacaccgaaacctgaccgggccttcccagctcacctccctccatcgcagtccataccagatagcagctaccccatggaccacagatttcgccgccagctttctgaaccctgtaactcctttcctcctttgccgacgatgccaagggaaggacgtcctatgtaccaacgccagatgtctgagccaaacatccccttcccaccacaaggctttaagcaggagtaccacgacccagtgtatgaacacaacaccatggttggcagtgcggccagccaaagctttccccctcctctgatgattaaacaggaacccagagattttgcatatgactcaggctgtatgtttgaaaagggccccaggcagttttatgatgacacctgtgttgtcccagaaaaattcgatggagacatcaaacaagagccaggaatgtatcgggaaggacccacataccaacggcgaggatcacttcagctctggcagtttttggtagctcttctggatgacccttcaaattctcattttattgcctggactggtcgaggcatggaatttaaactgattgagcctgaagaggtggcccgacgttggggcattcagaaaaacaggccagctatgaactatgataaacttagccgttcactccgctattactatgagaaaggaattatgcaaaaggtggctggagagagatatgtctacaagtttgtgtgtgatccagaagcccttttctccatggcctttccagataatcagcgtccactgctgaagacagacatggaacgtcacatcaacgaggaggacacagtgcctctttctcactttgatgagagcatggcctacatgccggaagggggctgctgcaacccccacccctacaacgaaggctacgtgtattaacacaagtgacagtcaagcagggcgtttttgcgcttttccttttttctgcaagatacagagaattgctgaatctttgttttatttctgttgtttgtattttatttttaaataataatacacaaaaaggggcttttcctgttgcattattctatggtctgccatggactgtgcactttatttgagggtgggtgggagtaatctaaacatttattctgtgtaacaggaagctaatgggtgaatgggcagagggatttggggattactttttacttaggcttgggatggggtcctacaagttttgagtatgatgaaactatatcatgtctgtttgatttcataacaacataagataatgtttattttatcggggtatctatggtacagttaatttcacgttgtgtaaatatccacttggagactatttgccttgggcattttcccctgtcatttatgagtctctgcaggtgtacaaaaaaaccccaatctactgtaaatggcagtttaattgttagaaatgactgtttttgcaccacttgtaaaaaggtatttagcgattgcatttgctgtttgttgttttattttgctttatatatgacttgcagaggataaccataaaatgggtaattctctctgaagttgaataatcaccatgactgtaaatgaggggcacaattttggactctggcgccaaactgagtcataggccagtagcattacgtgtatctggtgccaccttgctgtttagatacaaatcataccgtcttttaaatattttgaagcccatttcagttaaataatgacatgtcatggtcctttggaatcttcatttaaatgttaaatctggaatcaaaatgaagcaaaaaatatctgtctccttttcactttcttcagtacataaatacattatttaatcaataagaattaactgtactaaatcatgtattatgctgttctagttacagcaaacactctttaagaaaaatatccaatacactaaataggtactatagtaatttttagacatggtacccattgatatgcatttaaaccttttactgctgtgttatgttgataacatatataaatattagataatgctaatgcttctgctgctgtcttttctgtaatattctctttcatgctgaatttactatgaccatttataagcagtgcagttaactacagatagcatttcaggacaaaatagatgactcaaaccatttattgcttaaaaaatagcttacgccatgctatgctataagcagcttttatgcacattgacaaatgaagagtaagcttcagcttgctaaaggaaactgtggaaccttttgtaacttttggtgatatggaaaattatttacaaaccgtcaaagaatatgaggaagttgctgtatgacatagtgctggcactgatattatccatcatctctttttggacacttctgtaaatgtgattggattgtttgaaagaagatttaaagtttcaaagttttttgttctgtttttgctttgcatttggagaaaatattgaaagcagggtatgttgtttcattcaccttgaaaaaaccatgagtaaatggggatatagaatctctgaatagctcgctaaaagattcaagcaagggacatgaattttgttccatctatcaataatatccagaagaacaacttttttaaagagtctatagcaaaaagcaaaaaaaaaaaaaaattctaaacacaaagtcaaaataaacctattgtaaaagcatttcgtgatgagcatgaaaaagattgtttaaagatgatccccccagctacccattttccaaaactacacagatcacagctcatttctctaagtggagcagttatcaagaaacccaaacaccaaaattgctactcttcacatttaatcctacaaaaagtactccaatttcaaaatatgtatgtaacctgcgatttcaatgattgttgttcatatacatcatgtattattttggcccattttgggcctaaaaaagaaaactatgccttaaaaatcagaaccttttctccccactatgcttatgtggccatctacagcacttagaataaaaacagatgttaaaatattcagtgaaagttttattggaaaaaggaattgagatatataattgagatttggtgaaattgaaggagaaaatttaagtgagtctttaaaatatattctgaatgaaaactgtattgaggattcatttttgttccttttttttctttttctcttttctcctttttcttctttttaatagtctagttttagtcagtcagtgaggaagaattgggccatgctaacgttatcacaagagaacaatggcagaaatggtattagttatataatatttaaggacaaactatatgttttgctgttttaacgtagtgactcactgaactaaatacataattgaccaacattaagtgtatttccaatacagaagggttgaaaatattacattataaactcttttgaaaaatgtatctaaaattttttaagttctgttttgattccactttttggttgagtttttatgtttttgttttcaggtagattaataaatctggcagctgatttctgcaagattcttgtgttttgaatttctcattgaattggctactcaaacatagaaatcatttgttaatgatgtaatgtcttctctcagcttttatcttcactgctgtttgctgtctcttgatgatgacatgttaatacccaatagattaattgcaacaaacacttatactcaaataactaagtaaaaataatttttcttgttatgtccatgaaaagtgcttcagaataaaaatccacaagactgac

SEQ ID NO: 61806 - DNA, 372 bp, Artificial Sequence
  derived and/or modified sequence
atggatggcttctatgaccagcaggtgccctacatggtgaccaacagccagaggggcaggaactgcaatgagaagcccaccaacgtgaggaagaggaagttcatcaacagagacctggcccatgattctgaggagctgttccaggacctgagccagctgcaggagacctggctggccgaggcccaggtgcctgacaatgatgagcagtttgtgcctgactaccaggccgagagcctggccttccacggcctgcccctgaagatcaagaaggagccccacagcccctgcagcgagatcagcagcgcctgcagccaggagcagcccttcaagttctcctatggagagaagtgcctgtacaacgtgtctgcctag

SEQ ID NO: 61807 - DNA, 288 bp, Artificial Sequence
  derived and/or modified sequence
atggatggcttctatgaccagcaggtgccctacatggtgaccaacagccagaggggcaggaactgcaatgagaagcccaccaacgtgaggaagaggaagttcatcaacagagacctggcccatgattctgaggagctgttccaggacctgagccagctgcaggagacctggctggccgaggcccaggtgcctgacaatgatgagcagtttgtgcctgactaccaggccgagagcctggccttccacggcctgcccctgaagatcaagaaggagccccacagcccctag

SEQ ID NO: 61808 - DNA, 1365 bp, Artificial Sequence
  derived and/or modified sequence
atggatggcttctatgaccagcaggtgccctacatggtgaccaacagccagaggggcaggaactgcaatgagaagcccaccaacgtgaggaagaggaagttcatcaacagagacctggcccatgattctgaggagctgttccaggacctgagccagctgcaggagacctggctggccgaggcccaggtgcctgacaatgatgagcagtttgtgcctgactaccaggccgagagcctggccttccacggcctgcccctgaagatcaagaaggagccccacagcccctgcagcgagatcagcagcgcctgcagccaggagcagcccttcaagttctcctatggagagaagtgcctgtacaacgtgtctgcctatgaccagaagccccaggtgggcatgaggcccagcaacccccccacccccagcagcacccctgtgagccccctgcaccacgccagccccaacagcacccacacccccaagccagaccgggccttccctgcccacctgccccccagccagagcatcccagacagcagctaccccatggaccaccgcttccggcggcagctgtctgagccctgcaacagcttcccccccctgcccaccatgccccgggagggccggcccatgtaccagaggcagatgtctgagcccaacatccccttccccccccagggcttcaagcaggagtaccatgaccctgtgtatgagcacaacaccatggtgggcagcgctgccagccagagcttccccccacccctgatgatcaagcaggagccccgggactttgcctatgattctggctgcatgtttgagaagggcccccggcagttctatgatgacacctgtgtggtgcctgagaagtttgatggagacatcaagcaggagcccggcatgtaccgggagggccccacctaccagaggcggggcagcctgcagctgtggcagttcctggtggccctgctggatgaccccagcaacagccacttcatcgcctggacaggccggggcatggagttcaagctgattgagcctgaggaggtggcccggcgctggggcatccagaagaacagacctgccatgaactatgacaagctgagccgcagcctgcgctactactatgagaagggcatcatgcagaaggtggccggggagagatatgtgtacaagtttgtgtgtgaccctgaggccctcttctccatggccttcccagacaaccagaggcccctgctgaagacagacatggagcggcacatcaatgaggaggacacagtgcccctgagccactttgatgagagcatggcctacatgcctgagggcggctgctgcaacccccacccctacaatgaaggctacgtgtactag

SEQ ID NO: 61809 - DNA, 372 bp, Artificial Sequence
  derived and/or modified sequence
atggacggcttctacgaccagcaggtgccctacatggtgaccaactctcagcgggggcgtaactgcaacgagaagcctacaaacgtgcggaagcgcaagtttataaatagagacttagctcatgattccgaggagctcttccaggacctatcgcagctgcaggaaacctggcttgctgaagcccaggtccctgacaacgatgaacagttcgtgccagattaccaggcagagtctctggcttttcatggcctgccactgaagattaagaaagaaccacacagcccttgcagcgagatatccagcgcctgtagccaggagcagccattcaagttctcttatggcgaaaaatgcctgtataatgtctctgcctag

SEQ ID NO: 61810 - DNA, 288 bp, Artificial Sequence
  derived and/or modified sequence
atggacggcttctacgaccagcaggtgccctacatggtgaccaactcacagcgtggtcgtaactgcaatgagaaacctacaaatgtcaggaaaagaaaattcatcaatagggacctggcacacgactctgaggagctgttccaggacctctcacagttacaggagacctggctcgccgaagcccaagtcccggacaacgacgagcagtttgtccctgactaccaggccgaaagcttggcctttcacgggttacccctcaagattaagaaagagccacattctccatag

SEQ ID NO: 61811 - DNA, 1365 bp, Artificial Sequence
  derived and/or modified sequence
atggacggcttctacgaccagcaggtgccctacatggtgaccaactcccagagaggccgcaactgtaacgagaagccgacgaacgtccgaaagagaaaatttataaacagggacttggcccatgatagtgaggagctgtttcaggacctgtcccagctgcaagagacctggctggccgaagcacaggttcctgacaacgatgaacagttcgtgccggattatcaagcagaatccttggcctttcatggactacccctgaaaattaagaaggagcctcactctccctgctccgagatatcctcagcttgcagccaggagcagccatttaagttttcatatggcgagaagtgcctgtataacgttagcgcctacgaccagaagccgcaagtgggcatgagaccctcaaacccacccacgccctcatcaacgcccgtgtccccactccaccatgcctcccctaatagcactcatactccaaagccggaccgagcgttccctgcccacttgcctcctagtcagtcaatcccagactcttcttaccccatggatcaccgctttaggcggcagctgtcggaaccttgtaactcctttcccccactccctacgatgccgcgtgagggaagaccgatgtaccagaggcaaatgtccgagcccaacattccttttccaccacaagggtttaagcaggagtatcacgacccagtgtatgagcacaatactatggtaggtagcgccgctagccagtcctttcctccgccgctgatgattaagcaggaacccagggattttgcttatgactcaggatgcatgttcgaaaaaggcccacgacagttctatgacgacacctgtgtggtgcccgaaaagtttgacggagatataaaacaagaaccaggtatgtaccgggaagggcctacctatcagagacgaggttccctgcaactgtggcagttcttggtggccctgttagacgatcccagcaactcccattttattgcgtggacaggacgcgggatggagtttaaactcattgagcccgaggaagtggcgagaaggtgggggattcagaaaaacagaccggccatgaattatgataagttatcacgctcgcttagatactattatgaaaaggggattatgcaaaaggtcgcaggagagcggtacgtttataagtttgtttgtgatccagaggccctcttcagtatggcctttccggacaaccagcgccctttgctgaaaactgatatggagaggcatataaatgaggaggatactgtaccacttagccacttcgatgaatctatggcttatatgcctgaaggagggtgctgcaacccacacccttataatgaggggtacgtgtattag

SEQ ID NO: 61812 - DNA, 372 bp, Artificial Sequence
  derived and/or modified sequence
atggatggcttctatgaccagcaagtcccgtatatggtgacaaatagtcagcgcggtaggaactgtaacgagaagcccacaaacgtcagaaagcgcaagttcatcaacagagatctggcgcacgattcagaggagctgttccaggatctgtcccagctgcaggagacctggctggccgaggcccaggtgccggataatgacgagcagttcgtgcctgattaccaggccgagtccctcgccttccatggcttgcccttaaaaataaagaaggagccacatagcccttgctccgagataagctcagcttgctctcaagagcaacccttcaaatttagctatggtgaaaaatgtttatataatgtgtccgcatag

SEQ ID NO: 61813 - DNA, 288 bp, Artificial Sequence
  derived and/or modified sequence
atggacggcttctatgatcagcaggtcccttacatggtgacgaactcacagcgcggtcgcaactgcaatgagaaacctaccaacgtgcgcaaaaggaagtttatcaatagggacctggcacatgacagtgaagaattgttccaggacctgtctcagctccaggagacctggctggctgaggctcaggtccccgataatgatgagcagttcgtgccagactaccaggctgaaagcttggcctttcatgggctgccacttaagattaagaaggagccccatagcccatag

SEQ ID NO: 61814 - DNA, 1365 bp, Artificial Sequence
  derived and/or modified sequence
atggacggattctacgaccaacaggtgccctacatggtgacgaattcacaaaggggaagaaactgcaatgagaagcccacgaacgtcagaaagcggaaattcattaatagagatcttgctcatgactcagaagaacttttccaagatctttctcagctccaggagacatggttggcagaggctcaggtaccagataacgatgagcagtttgtgcctgactatcaagccgagtctttggctttccacgggcttcctctaaagatcaaaaaggaaccacacagcccttgtagtgagatctcatctgcctgttcccaagaacaaccgtttaagttcagttacggggagaagtgcctgtacaacgttagtgcctacgaccagaagccacaggtggggatgaggccctctaacccacctacccctagttccactcccgtgtcgccactccaccacgcctctccaaattctacacacacgcccaagcctgatagggccttccctgcacacctccccccatcacaatccatcccagattcctcttacccaatggatcaccgctttcgccgtcagcttagcgagccttgcaactcatttccgccattgccaactatgccaagggagggacgccctatgtaccagaggcagatgtcggaaccaaatattcccttcccgcctcagggcttcaaacaggagtaccacgacccagtctacgaacacaatacgatggtcggctctgcggctagccagagtttccccccaccactgatgataaaacaggaacctagagatttcgcttacgactcgggctgcatgttcgaaaagggacccagacaattttatgacgatacctgcgtagtgcctgaaaagttcgacggagatattaagcaggaacccggaatgtaccgcgagggcccaacttaccagcgcaggggctctctgcaactgtggcagtttctggtagctttgctggacgatccttcaaattcccattttatagcttggactggcagaggtatggagttcaagctgattgaaccggaagaggtcgcacgtaggtggggaatacagaagaacagacctgccatgaactacgataaactgagtaggagtctgcgctattattacgagaaaggcataatgcagaaggtcgccggagaacgctacgtgtacaagtttgtctgcgatccagaggccctgttttcaatggccttcccagacaatcagcgtcctctgctcaaaacagatatggaaagacacattaacgaggaggatacagtacctctgtcgcatttcgacgaaagcatggcttacatgccagaggggggatgctgtaatccccatccttataatgaaggttacgtatactag

SEQ ID NO: 61815 - protein, 437 aa, Artificial Sequence
  derived and/or modified sequence
MLQDLSASVFFPPCSQHRTLAQVPDNDEQFVPDYQAESLAFHGLPLKIKKEPHSPCSEISSACSQEQPFKFSYGEKCLYNVSAYDQKPQVGMRPSNPPTPSSTPVSPLHHASPNSTHTPKPDRAFPAHLPPSQSIPDSSYPMDHRFRRQLSEPCNSFPPLPTMPREGRPMYQRQMSEPNIPFPPQGFKQEYHDPVYEHNTMVGSAASQSFPPPLMIKQEPRDFAYDSEVPSCHSIYMRQEGFLAHPSRTEGCMFEKGPRQFYDDTCVVPEKFDGDIKQEPGMYREGPTYQRRGSLQLWQFLVALLDDPSNSHFIAWTGRGMEFKLIEPEEVARRWGIQKNRPAMNYDKLSRSLRYYYEKGIMQKVAGERYVYKFVCDPEALFSMAFPDNQRPLLKTDMERHINEEDTVPLSHFDESMAYMPEGGCCNPHPYNEGYVY

SEQ ID NO: 61816 - DNA, 1314 bp, Artificial Sequence
  derived and/or modified sequence
atgctgcaggacctgagcgccagcgtgttcttccccccctgcagccagcacagaaccctggcccaggtgcccgacaacgacgagcagttcgtgcccgactaccaggccgagagcctggccttccacggcctgcccctgaagatcaagaaggagccccacagcccctgcagcgagatcagcagcgcctgcagccaggagcagcccttcaagttcagctacggcgagaagtgcctgtacaacgtgagcgcctacgaccagaagccccaggtgggcatgagacccagcaacccccccacccccagcagcacccccgtgagccccctgcaccacgccagccccaacagcacccacacccccaagcccgacagagccttccccgcccacctgccccccagccagagcatccccgacagcagctaccccatggaccacagattcagaagacagctgagcgagccctgcaacagcttcccccccctgcccaccatgcccagagagggcagacccatgtaccagagacagatgagcgagcccaacatccccttccccccccagggcttcaagcaggagtaccacgaccccgtgtacgagcacaacaccatggtgggcagcgccgccagccagagcttccccccccccctgatgatcaagcaggagcccagagacttcgcctacgacagcgaggtgcccagctgccacagcatctacatgagacaggagggcttcctggcccaccccagcagaaccgagggctgcatgttcgagaagggccccagacagttctacgacgacacctgcgtggtgcccgagaagttcgacggcgacatcaagcaggagcccggcatgtacagagagggccccacctaccagagaagaggcagcctgcagctgtggcagttcctggtggccctgctggacgaccccagcaacagccacttcatcgcctggaccggcagaggcatggagttcaagctgatcgagcccgaggaggtggccagaagatggggcatccagaagaacagacccgccatgaactacgacaagctgagcagaagcctgagatactactacgagaagggcatcatgcagaaggtggccggcgagagatacgtgtacaagttcgtgtgcgaccccgaggccctgttcagcatggccttccccgacaaccagagacccctgctgaagaccgacatggagagacacatcaacgaggaggacaccgtgcccctgagccacttcgacgagagcatggcctacatgcccgagggcggctgctgcaacccccacccctacaacgagggctacgtgtactag

SEQ ID NO: 61817 - DNA, 1314 bp, Artificial Sequence
  derived and/or modified sequence
atgctccaggatctgtcagcttcagtattttttcccccttgctctcaacataggactctagcacaggtacccgataacgacgagcaatttgtcccggattatcaggccgaatccctggctttccatggcttgcccctcaaaatcaagaaggagccccacagcccttgttccgaaatatcttcagcttgctctcaggaacaacctttcaaattctcatatggcgagaaatgtctgtataacgtgtctgcctatgatcagaaaccacaggtgggaatgcggccttccaatccacctactcccagcagcacacctgtgtccccattgcatcatgcttcgccaaactccacacatacacccaagccagacagggcattccccgcacatcttccccctagtcagtcaatcccagattcctcatatcctatggatcacagattcagaagacagctgagcgagccctgcaacagctttccacccctcccaaccatgcctcgagagggccgaccaatgtaccagaggcaaatgtcggagcctaatatccctttccctccacaggggttcaagcaggagtaccacgaccccgtgtacgaacacaatactatggtcggcagcgctgcctcacagagctttccaccgccactgatgataaagcaagaaccccgtgattttgcatacgacagcgaggtgccgtcttgccactctatttatatgaggcaagaaggattcttagcgcatccgagtcggacagagggatgtatgtttgaaaaggggccccgccagttttacgacgacacttgcgttgtccctgagaaattcgatggtgatatcaaacaggagccgggaatgtaccgcgaaggccccacttatcaaaggaggggttcattgcagttgtggcagtttctagtcgccctgctagacgatcctagcaattctcactttatcgcatggaccggcagagggatggagttcaagctaattgaacctgaagaggtcgcccggaggtggggaatccagaagaatagacctgccatgaactatgacaagctctctcgcagtctgagatactattacgagaaggggatcatgcagaaggtggctggggaaaggtacgtgtataagttcgtgtgtgaccccgaggcgctatttagtatggcttttcctgacaatcagagaccacttttaaagacagacatggagaggcatattaacgaggaggatacggtgcccctgtcccatttcgacgaaagcatggcctatatgccagaaggcggctgttgcaatccgcacccgtacaacgaaggatatgtatactag

SEQ ID NO: 61818 - DNA, 3363 bp, Artificial Sequence
  derived and/or modified sequence
gtcatgcatacattagagcctctgatgagtttgtctttggggactctggggctgtactacccagtgtcatcacaaattaccaggagaaattgcttccagctcacaatcacatctgcttttggcaagaactaatgcaccaagacttcaagttctaagcctctgttcagattttaattgcaattgatcaggtttatattattgtacctccagagacctcctagagccagaacccggctggcttgctgtttcctttagagcagcgcatatcattatttggtgttctggtggaggacttttctgatggcagaaattagtttctctgggttcatcaggacgggatgcttcaagatttaagtgcaagtgtcttctttccaccttgttcacaacacagaacgttagctcaggtacctgacaatgatgagcagtttgtaccagactatcaggctgaaagtttggcttttcatggcctgccactgaaaatcaagaaagaaccccacagtccatgttcagaaatcagctctgcctgcagtcaagaacagccctttaaattcagctatggagaaaagtgcctgtacaatgtcagtgcctatgatcagaagccacaagtgggaatgaggccctccaacccccccacaccatccagcacgccagtgtccccactgcatcatgcatctccaaactcaactcatacaccgaaacctgaccgggccttcccagctcacctccctccatcgcagtccataccagatagcagctaccccatggaccacagatttcgccgccagctttctgaaccctgtaactcctttcctcctttgccgacgatgccaagggaaggacgtcctatgtaccaacgccagatgtctgagccaaacatccccttcccaccacaaggctttaagcaggagtaccacgacccagtgtatgaacacaacaccatggttggcagtgcggccagccaaagctttccccctcctctgatgattaaacaggaacccagagattttgcatatgactcagaagtgcctagctgccactccatttatatgaggcaagaaggcttcctggctcatcccagcagaacagaaggctgtatgtttgaaaagggccccaggcagttttatgatgacacctgtgttgtcccagaaaaattcgatggagacatcaaacaagagccaggaatgtatcgggaaggacccacataccaacggcgaggatcacttcagctctggcagtttttggtagctcttctggatgacccttcaaattctcattttattgcctggactggtcgaggcatggaatttaaactgattgagcctgaagaggtggcccgacgttggggcattcagaaaaacaggccagctatgaactatgataaacttagccgttcactccgctattactatgagaaaggaattatgcaaaaggtggctggagagagatatgtctacaagtttgtgtgtgatccagaagcccttttctccatggcctttccagataatcagcgtccactgctgaagacagacatggaacgtcacatcaacgaggaggacacagtgcctctttctcactttgatgagagcatggcctacatgccggaagggggctgctgcaacccccacccctacaacgaaggctacgtgtattaacacaagtgacagtcaagcagggcgtttttgcgcttttccttttttctgcaagatacagagaattgctgaatctttgttttatttctgttgtttgtattttatttttaaataataatacacaaaaaggggcttttcctgttgcattattctatggtctgccatggactgtgcactttatttgagggtgggtgggagtaatctaaacatttattctgtgtaacaggaagctaatgggtgaatgggcagagggatttggggattactttttacttaggcttgggatggggtcctacaagttttgagtatgatgaaactatatcatgtctgtttgatttcataacaacataagataatgtttattttatcggggtatctatggtacagttaatttcacgttgtgtaaatatccacttggagactatttgccttgggcattttcccctgtcatttatgagtctctgcaggtgtacaaaaaaaccccaatctactgtaaatggcagtttaattgttagaaatgactgtttttgcaccacttgtaaaaaggtatttagcgattgcatttgctgtttgttgttttattttgctttatatatgacttgcagaggataaccataaaatgggtaattctctctgaagttgaataatcaccatgactgtaaatgaggggcacaattttggactctggcgccaaactgagtcataggccagtagcattacgtgtatctggtgccaccttgctgtttagatacaaatcataccgtcttttaaatattttgaagcccatttcagttaaataatgacatgtcatggtcctttggaatcttcatttaaatgttaaatctggaatcaaaatgaagcaaaaaatatctgtctccttttcactttcttcagtacataaatacattatttaatcaataagaattaactgtactaaatcatgtattatgctgttctagttacagcaaacactctttaagaaaaatatccaatacactaaataggtactatagtaatttttagacatggtacccattgatatgcatttaaaccttttactgctgtgttatgttgataacatatataaatattagataatgctaatgcttctgctgctgtcttttctgtaatattctctttcatgctgaatttactatgaccatttataagcagtgcagttaactacagatagcatttcaggacaaaatagatgactcaaaccatttattgcttaaaaaatagcttacgccatgctatgctataagcagcttttatgcacattgacaaatgaagagtaagcttcagcttgctaaaggaaactgtggaaccttttgtaacttttggtgatatggaaaattatttacaaaccgtcaaagaatatgaggaagttgctgtatgacatagtgctggcactgatattatccatcatctctttttggacacttctgtaaatgtgattggattgtttgaaagaagatttaaagtttcaaagttttttgttctgtttttgctttgcatttggagaaaatattgaaagcagggtatgttgtttcattcaccttgaaaaaaccatgagtaaatggggatatagaatctctgaatagctcgctaaaagattcaagcaagggacatgaattttgttccatctatcaataatatccagaagaacaacttttttaaagagtctatagcaaaaagcaaaaaaaaaaaaaaa

SEQ ID NO: 61819 - DNA, 1314 bp, Artificial Sequence
  derived and/or modified sequence
atgctgcaggacctgagcgccagcgtcttcttccccccctgcagccagcacaggaccctggcccaggtgcctgacaatgatgagcagtttgtgcctgactaccaggccgagagcctggccttccacggcctgcccctgaagatcaagaaggagccccacagcccctgcagcgagatcagcagcgcctgcagccaggagcagcccttcaagttctcctatggagagaagtgcctgtacaacgtgtctgcctatgaccagaagccccaggtgggcatgaggcccagcaacccccccacccccagcagcacccctgtgagccccctgcaccacgccagccccaacagcacccacacccccaagccagaccgggccttccctgcccacctgccccccagccagagcatcccagacagcagctaccccatggaccaccgcttccggcggcagctgtctgagccctgcaacagcttcccccccctgcccaccatgccccgggagggccggcccatgtaccagaggcagatgtctgagcccaacatccccttccccccccagggcttcaagcaggagtaccatgaccctgtgtatgagcacaacaccatggtgggcagcgctgccagccagagcttccccccacccctgatgatcaagcaggagccccgggactttgcctatgattctgaggtgcccagctgccacagcatctacatgaggcaggagggcttcctggcccaccccagcaggacagagggctgcatgtttgagaagggcccccggcagttctatgatgacacctgtgtggtgcctgagaagtttgatggagacatcaagcaggagcccggcatgtaccgggagggccccacctaccagaggcggggcagcctgcagctgtggcagttcctggtggccctgctggatgaccccagcaacagccacttcatcgcctggacaggccggggcatggagttcaagctgattgagcctgaggaggtggcccggcgctggggcatccagaagaacagacctgccatgaactatgacaagctgagccgcagcctgcgctactactatgagaagggcatcatgcagaaggtggccggggagcgctacgtgtacaagtttgtgtgtgaccctgaggccctcttctccatggccttcccagacaaccagaggcccctgctgaagacagacatggagcggcacatcaatgaagaagatactgtgcccctgagccactttgatgagagcatggcctacatgcctgagggcggctgctgcaacccccacccctacaatgaaggctacgtgtactag

SEQ ID NO: 61820 - DNA, 1314 bp, Artificial Sequence
  derived and/or modified sequence
atgctgcaggacctgagcgccagcgtgttcttccccccctgcagccagcatagaaccctggcgcaggtaccagataacgatgaacagttcgtgcctgactaccaggctgagtcccttgctttccacggacttcctctcaaaatcaagaaagaaccacattctccctgtagtgagattagcagtgcatgttcccaggagcagcctttcaagttctcatacggggagaagtgtctgtataacgtgagcgcatatgatcagaaaccgcaagtgggcatgaggccctccaacccgccaaccccgtctagcaccccagtatcccccctccatcacgccagtcctaacagtacccacacaccaaaaccagaccgtgctttcccagctcacctgccaccatctcagtctatccccgattcatcctatcccatggatcacaggtttcgcagacagctcagcgaaccctgcaacagctttcctccgctcccgacaatgcctcgcgaaggtagacctatgtatcaaagacagatgtctgagccaaatattccctttccccctcagggattcaagcaggagtatcatgaccccgtgtacgagcataacactatggtggggagtgcagcatctcagagtttccccccacccctcatgatcaaacaggaaccccgcgacttcgcatacgacagtgaggtcccctcctgccatagtatctatatgagacaggaaggattcctagcgcatcctagccgaactgaggggtgcatgttcgagaagggcccgagacagttttatgacgatacttgcgtggtgccagagaaatttgacggagacataaagcaggagccaggcatgtaccgcgagggacccacataccagcgcagagggtctctacaactgtggcaattcttggttgcactcctggatgacccgtcaaacagccactttatcgcttggaccggtcgggggatggagtttaaactaatcgaaccagaggaagtggccagacgttggggaatccagaaaaatcgccccgcaatgaactacgacaagctgagcagaagtctgcgctattactacgagaagggcatcatgcagaaagtggcgggcgagaggtatgtgtacaagttcgtgtgcgatcctgaagccttgttcagcatggcttttccagacaatcaacgccctttattgaagacagatatggaaaggcacataaatgaagaagatacagtccctctctcccacttcgatgagagcatggcatatatgcccgagggcggatgctgtaacccacacccatacaacgaagggtacgtgtattag

SEQ ID NO: 61821 - DNA, 1314 bp, Artificial Sequence
  derived and/or modified sequence
atgctgcaagatctgagtgcctcggtattttttcccccttgctcacagcaccgtactctcgcccaggtgcctgacaacgatgagcagttcgttcccgactaccaggccgagtctttggccttccacggattacccctgaagatcaaaaaagagcctcattcaccctgctcagagattagctccgcctgcagccaggaacagcctttcaaattcagctacggtgaaaaatgcctctataacgtaagtgcttacgaccagaagccccaggtagggatgcgacctagtaaccctcctacaccgtccagtacacctgtgagccctctacatcatgccagcccaaattcaacacacactcctaaaccagatagggcctttccagcacatctgcccccttctcaaagcatacccgacagttcctaccctatggatcacagatttagaagacaacttagcgaaccttgcaattcctttccaccccttcctaccatgccaagagaaggtagacctatgtatcagcgacagatgagcgaacccaacatcccttttcccccacagggtttcaagcaggagtaccacgaccccgtgtatgaacataatacgatggtgggcagcgccgcttcccagtcttttcctcccccactaatgatcaaacaggaacccagggactttgcctacgactctgaggtccccagttgtcactcaatttacatgaggcaggaaggatttctggcccacccatctcgaactgaaggctgcatgtttgagaagggaccgaggcagttttatgacgacacttgcgtggtcccggagaagtttgacggggacatcaaacaggaacccggaatgtaccgagaggggcctacatatcagcgccgaggcagtctacagctgtggcaattcctcgttgccttattggacgaccctagcaattctcatttcatcgcttggactggtcgtggtatggaattcaaactcatcgagcctgaggaggttgcccgaaggtggggtatccagaagaatagacccgcaatgaactatgataaactcagtcgttctctgaggtattactacgaaaaaggcatcatgcaaaaggtggccggtgagcgatacgtttataaattcgtgtgcgatcccgaagctctgttctcaatggctttcccggacaaccagaggccactcctcaagacagatatggagcgccacatcaatgaggaggatactgttccccttagccatttcgacgagtccatggcgtatatgcctgagggtgggtgttgtaaccctcacccctacaacgagggatacgtgtactag

SEQ ID NO: 61822 - protein, 419 aa, Artificial Sequence
  derived and/or modified sequence
MLQDLSASVFFPPCSQHRTLVAFHGLPLKIKKEPHSPCSEISSACSQEQPFKFSYGEKCLYNVSAYDQKPQVGMRPSNPPTPSSTPVSPLHHASPNSTHTPKPDRAFPAHLPPSQSIPDSSYPMDHRFRRQLSEPCNSFPPLPTMPREGRPMYQRQMSEPNIPFPPQGFKQEYHDPVYEHNTMVGSAASQSFPPPLMIKQEPRDFAYDSEVPSCHSIYMRQEGFLAHPSRTEGCMFEKGPRQFYDDTCVVPEKFDGDIKQEPGMYREGPTYQRRGSLQLWQFLVALLDDPSNSHFIAWTGRGMEFKLIEPEEVARRWGIQKNRPAMNYDKLSRSLRYYYEKGIMQKVAGERYVYKFVCDPEALFSMAFPDNQRPLLKTDMERHINEEDTVPLSHFDESMAYMPEGGCCNPHPYNEGYVY

SEQ ID NO: 61823 - DNA, 1260 bp, Artificial Sequence
  derived and/or modified sequence
atgctgcaggacctgagcgccagcgtgttcttccccccctgcagccagcacagaaccctggtggccttccacggcctgcccctgaagatcaagaaggagccccacagcccctgcagcgagatcagcagcgcctgcagccaggagcagcccttcaagttcagctacggcgagaagtgcctgtacaacgtgagcgcctacgaccagaagccccaggtgggcatgagacccagcaacccccccacccccagcagcacccccgtgagccccctgcaccacgccagccccaacagcacccacacccccaagcccgacagagccttccccgcccacctgccccccagccagagcatccccgacagcagctaccccatggaccacagattcagaagacagctgagcgagccctgcaacagcttcccccccctgcccaccatgcccagagagggcagacccatgtaccagagacagatgagcgagcccaacatccccttccccccccagggcttcaagcaggagtaccacgaccccgtgtacgagcacaacaccatggtgggcagcgccgccagccagagcttccccccccccctgatgatcaagcaggagcccagagacttcgcctacgacagcgaggtgcccagctgccacagcatctacatgagacaggagggcttcctggcccaccccagcagaaccgagggctgcatgttcgagaagggccccagacagttctacgacgacacctgcgtggtgcccgagaagttcgacggcgacatcaagcaggagcccggcatgtacagagagggccccacctaccagagaagaggcagcctgcagctgtggcagttcctggtggccctgctggacgaccccagcaacagccacttcatcgcctggaccggcagaggcatggagttcaagctgatcgagcccgaggaggtggccagaagatggggcatccagaagaacagacccgccatgaactacgacaagctgagcagaagcctgagatactactacgagaagggcatcatgcagaaggtggccggcgagagatacgtgtacaagttcgtgtgcgaccccgaggccctgttcagcatggccttccccgacaaccagagacccctgctgaagaccgacatggagagacacatcaacgaggaggacaccgtgcccctgagccacttcgacgagagcatggcctacatgcccgagggcggctgctgcaacccccacccctacaacgagggctacgtgtactag

SEQ ID NO: 61824 - DNA, 1260 bp, Artificial Sequence
  derived and/or modified sequence
atgctccaggacctttcagcatctgtgtttttcccaccatgcagtcagcaccgaacacttgtggctttccatgggctcccgctcaaaattaagaaagagcctcatagcccttgctcagaaatctcatccgcatgtagccaggagcagcctttcaagttttcttacggcgaaaagtgcctctacaacgtcagcgcctacgaccagaagccgcaggtgggaatgcgcccatcaaacccacccaccccttctagcacccctgtcagtccacttcaccatgcctctcctaactctacacacactcctaaacccgatagggccttccccgcccacctacctccctcccagagcatccccgactcatcgtatcctatggaccatcggttcagacggcagctatccgagccctgtaacagcttccccccgctgcctaccatgcctcgcgaaggcaggccgatgtatcaaagacaaatgtcagaacccaacatcccatttcctccccagggcttcaagcaagagtaccatgaccctgtctacgagcataatacaatggtcggatccgcagcttcgcagtcctttccaccacctttaatgattaagcaagaaccaagggattttgcttatgacagcgaggtgccgtcttgtcactccatttacatgaggcaagaagggttcctcgctcatccctccagaaccgagggctgcatgtttgaaaaggggccacgccagttctatgacgacacctgcgtggtacccgaaaaatttgacggcgatatcaagcaggaaccagggatgtacagggaggggcccacgtatcagaggcggggatccctgcaactttggcagtttctcgtcgccctgctggacgacccatcaaactcacactttatcgcatggaccggcaggggcatggagtttaagttgattgagcccgaagaagtagcacggcgctggggcattcagaagaacagaccagcaatgaattacgacaaactctctcggagcctccggtactactacgagaaaggaattatgcagaaggtggccggagaaagatacgtgtataagtttgtgtgcgaccctgaggcactcttctctatggcctttcctgacaaccagagacctctgctgaaaactgacatggaacggcatattaatgaggaagatacagtgccactgtcacatttcgatgagtccatggcctacatgccagaaggcggatgttgcaatccacatccttataatgaaggctatgtgtactag

SEQ ID NO: 61825 - DNA, 6231 bp, Artificial Sequence
  derived and/or modified sequence
gtcatgcatacattagagcctctgatgagtttgtctttggggactctggggctgtactacccagtgtcatcacaaattaccaggagaaattgcttccagctcacaatcacatctgcttttggcaagaactaatgcaccaagacttcaagttctaagcctctgttcagattttaattgcaattgatcaggtttatattattgtacctccagagacctcctagagccagaacccggctggcttgctgtttcctttagagcagcgcatatcattatttggtgttctggtggaggacttttctgatggcagaaattagtttctctgggttcatcaggacgggatgcttcaagatttaagtgcaagtgtcttctttccaccttgttcacaacacagaacgttagtggcttttcatggcctgccactgaaaatcaagaaagaaccccacagtccatgttcagaaatcagctctgcctgcagtcaagaacagccctttaaattcagctatggagaaaagtgcctgtacaatgtcagtgcctatgatcagaagccacaagtgggaatgaggccctccaacccccccacaccatccagcacgccagtgtccccactgcatcatgcatctccaaactcaactcatacaccgaaacctgaccgggccttcccagctcacctccctccatcgcagtccataccagatagcagctaccccatggaccacagatttcgccgccagctttctgaaccctgtaactcctttcctcctttgccgacgatgccaagggaaggacgtcctatgtaccaacgccagatgtctgagccaaacatccccttcccaccacaaggctttaagcaggagtaccacgacccagtgtatgaacacaacaccatggttggcagtgcggccagccaaagctttccccctcctctgatgattaaacaggaacccagagattttgcatatgactcagaagtgcctagctgccactccatttatatgaggcaagaaggcttcctggctcatcccagcagaacagaaggctgtatgtttgaaaagggccccaggcagttttatgatgacacctgtgttgtcccagaaaaattcgatggagacatcaaacaagagccaggaatgtatcgggaaggacccacataccaacggcgaggatcacttcagctctggcagtttttggtagctcttctggatgacccttcaaattctcattttattgcctggactggtcgaggcatggaatttaaactgattgagcctgaagaggtggcccgacgttggggcattcagaaaaacaggccagctatgaactatgataaacttagccgttcactccgctattactatgagaaaggaattatgcaaaaggtggctggagagagatatgtctacaagtttgtgtgtgatccagaagcccttttctccatggcctttccagataatcagcgtccactgctgaagacagacatggaacgtcacatcaacgaggaggacacagtgcctctttctcactttgatgagagcatggcctacatgccggaagggggctgctgcaacccccacccctacaacgaaggctacgtgtattaacacaagtgacagtcaagcagggcgtttttgcgcttttccttttttctgcaagatacagagaattgctgaatctttgttttatttctgttgtttgtattttatttttaaataataatacacaaaaaggggcttttcctgttgcattattctatggtctgccatggactgtgcactttatttgagggtgggtgggagtaatctaaacatttattctgtgtaacaggaagctaatgggtgaatgggcagagggatttggggattactttttacttaggcttgggatggggtcctacaagttttgagtatgatgaaactatatcatgtctgtttgatttcataacaacataagataatgtttattttatcggggtatctatggtacagttaatttcacgttgtgtaaatatccacttggagactatttgccttgggcattttcccctgtcatttatgagtctctgcaggtgtacaaaaaaaccccaatctactgtaaatggcagtttaattgttagaaatgactgtttttgcaccacttgtaaaaaggtatttagcgattgcatttgctgtttgttgttttattttgctttatatatgacttgcagaggataaccataaaatgggtaattctctctgaagttgaataatcaccatgactgtaaatgaggggcacaattttggactctggcgccaaactgagtcataggccagtagcattacgtgtatctggtgccaccttgctgtttagatacaaatcataccgtcttttaaatattttgaagcccatttcagttaaataatgacatgtcatggtcctttggaatcttcatttaaatgttaaatctggaatcaaaatgaagcaaaaaatatctgtctccttttcactttcttcagtacataaatacattatttaatcaataagaattaactgtactaaatcatgtattatgctgttctagttacagcaaacactctttaagaaaaatatccaatacactaaataggtactatagtaatttttagacatggtacccattgatatgcatttaaaccttttactgctgtgttatgttgataacatatataaatattagataatgctaatgcttctgctgctgtcttttctgtaatattctctttcatgctgaatttactatgaccatttataagcagtgcagttaactacagatagcatttcaggacaaaatagatgactcaaaccatttattgcttaaaaaatagcttacgccatgctatgctataagcagcttttatgcacattgacaaatgaagagtaagcttcagcttgctaaaggaaactgtggaaccttttgtaacttttggtgatatggaaaattatttacaaaccgtcaaagaatatgaggaagttgctgtatgacatagtgctggcactgatattatccatcatctctttttggacacttctgtaaatgtgattggattgtttgaaagaagatttaaagtttcaaagttttttgttctgtttttgctttgcatttggagaaaatattgaaagcagggtatgttgtttcattcaccttgaaaaaaccatgagtaaatggggatatagaatctctgaatagctcgctaaaagattcaagcaagggacatgaattttgttccatctatcaataatatccagaagaacaacttttttaaagagtctatagcaaaaagcaaaaaaaaaaaaaaattctaaacacaaagtcaaaataaacctattgtaaaagcatttcgtgatgagcatgaaaaagattgtttaaagatgatccccccagctacccattttccaaaactacacagatcacagctcatttctctaagtggagcagttatcaagaaacccaaacaccaaaattgctactcttcacatttaatcctacaaaaagtactccaatttcaaaatatgtatgtaacctgcgatttcaatgattgttgttcatatacatcatgtattattttggcccattttgggcctaaaaaagaaaactatgccttaaaaatcagaaccttttctccccactatgcttatgtggccatctacagcacttagaataaaaacagatgttaaaatattcagtgaaagttttattggaaaaaggaattgagatatataattgagatttggtgaaattgaaggagaaaatttaagtgagtctttaaaatatattctgaatgaaaactgtattgaggattcatttttgttccttttttttctttttctcttttctcctttttcttctttttaatagtctagttttagtcagtcagtgaggaagaattgggccatgctaacgttatcacaagagaacaatggcagaaatggtattagttatataatatttaaggacaaactatatgttttgctgttttaacgtagtgactcactgaactaaatacataattgaccaacattaagtgtatttccaatacagaagggttgaaaatattacattataaactcttttgaaaaatgtatctaaaattttttaagttctgttttgattccactttttggttgagtttttatgtttttgttttcaggtagattaataaatctggcagctgatttctgcaagattcttgtgttttgaatttctcattgaattggctactcaaacatagaaatcatttgttaatgatgtaatgtcttctctcagcttttatcttcactgctgtttgctgtctcttgatgatgacatgttaatacccaatagattaattgcaacaaacacttatactcaaataactaagtaaaaataatttttcttgttatgtccatgaaaagtgcttcagaataaaaatccacaagactgacagtgcagaacatttttctcaaatcatgggcggatcttggaggtctagtttcccgtagatgctgtaaccaattaccacaacttcagtaatttacacaaatttatcttatagttctggaggcagaagttcaaaagaagccttaagagactaaaaccaagatgtccttaggtctggttccttctggaggctccaggggagattcttccagctttcacttctagagtctgctgacattccttggctcctggctacatcacttcaatctctgcttccatggtcacatactcttctactatagtcaaatttccttcctgcctcttataaggatgcttgtgattacatttaggggatgctcagataatccaggacaatctctccatctcaagatccttaacttaatgacgtgtgccaagtccctttggctagataattattcataggtcccagggattaggacatggatgtaaggggtgagggcagggctgttattcagaacaccgcacggaggaggaagactgtgtagcaaagactctaattgatttactcaggaacagtggagttctgctgagggatctaggatttgaaagtactagagtttgcttttatttaccactgagatattttccccttattctgcataaataattttgaaaactttctatattaaatttcaactattccactaaaatgtctggtaatcacatcaagcctttagattattcaaatccttccccagcccccaggaaaacactaagtcatgaaacagaaaaacagaaggtatgataataatagtaataacagttaaatcagtggtctaatccagattttattttttaatacatttcttttggtgttaatatgggttactatgtgatcttatcatttgctagtgattattacttattaggtaagaacaatgtgtaaaatatgtctattactcaaaagaacaattgcaaaatgagtcaacttatctttatataaccaggaaagaaatatattgccagaagctacagaattttgccagatgatagggatttctaaaatgagccactttgtctatcatgcagccttttcagagcttgtaatgagaaaacattacagaggagaaggtcatttggatgtttgttacttggaatcctagaaaacaaaaactaaaatttaaaaataagaagtgagtaagctattttccatttgcgatttggtatggagaagagaggaaatagaattattaaaaaaatacaaattgggtaaaagtgatggtggaaaaaatataaagaaggcaaatgtacatattaagcaattctactaagaattggaaaaatcaagtttcaaaaagatggtaatagttgggcatgatactagaaaatttcacccagtttattcagagctcaactagtacttttaggacttctttttttatatacatgagactcactttgacatacttaaaaaaaaaacagtttatggaaagtacagtttaagaggagaatttgattagactaagtggatatctttatagaaatattaatgatttcagaattttcagttacaagtgtatataccgtggctattgtttatggattcatatgtaaggtagggtcttttttgcatatagactccagtattagttactttcattctaaaattatatttatgcttctatggggaagaaaatttttaattcacttggttgtattaaaattatacttacggtttgagaaaacatgctatgaaaatcatgattatagcaaattaaatatgctcaaaatttaaatctaaaataaaagcccagaaactg

SEQ ID NO: 61826 - DNA, 1260 bp, Artificial Sequence
  derived and/or modified sequence
atgctgcaggacctgagcgccagcgtcttcttccccccctgcagccagcacaggaccctggtggccttccacggcctgcccctgaagatcaagaaggagccccacagcccctgcagcgagatcagcagcgcctgcagccaggagcagcccttcaagttctcctatggagagaagtgcctgtacaacgtgtctgcctatgaccagaagccccaggtgggcatgaggcccagcaacccccccacccccagcagcacccctgtgagccccctgcaccacgccagccccaacagcacccacacccccaagccagaccgggccttccctgcccacctgccccccagccagagcatcccagacagcagctaccccatggaccaccgcttccggcggcagctgtctgagccctgcaacagcttcccccccctgcccaccatgccccgggagggccggcccatgtaccagaggcagatgtctgagcccaacatccccttccccccccagggcttcaagcaggagtaccatgaccctgtgtatgagcacaacaccatggtgggcagcgctgccagccagagcttccccccacccctgatgatcaagcaggagccccgggactttgcctatgattctgaggtgcccagctgccacagcatctacatgaggcaggagggcttcctggcccaccccagcaggacagagggctgcatgtttgagaagggcccccggcagttctatgatgacacctgtgtggtgcctgagaagtttgatggagacatcaagcaggagcccggcatgtaccgggagggccccacctaccagaggcggggcagcctgcagctgtggcagttcctggtggccctgctggatgaccccagcaacagccacttcatcgcctggacaggccggggcatggagttcaagctgattgagcctgaggaggtggcccggcgctggggcatccagaagaacagacctgccatgaactatgacaagctgagccgcagcctgcgctactactatgagaagggcatcatgcagaaggtggccggggagcgctacgtgtacaagtttgtgtgtgaccctgaggccctcttctccatggccttcccagacaaccagaggcccctgctgaagacagacatggagcggcacatcaatgaagaagatactgtgcccctgagccactttgatgagagcatggcctacatgcctgagggcggctgctgcaacccccacccctacaatgaaggctacgtgtactag

SEQ ID NO: 61827 - DNA, 1260 bp, Artificial Sequence
  derived and/or modified sequence
atgctgcaggacctgagcgccagcgtgttcttccccccctgcagccaacatcggacgctggtagcctttcacggacttcctctgaagattaaaaaagaaccacactcgccttgctccgaaatctcttcagcctgttctcaggagcagccgttcaaattctcctatggagaaaagtgtctgtacaatgttagcgcatatgaccagaagccccaggtcggcatgagaccttccaatcctccaacaccgtcatcaacacccgtgtccccactccatcatgcatcccccaatagcacccacactcctaagccggatagagcttttccggcacatctgccaccgtcccagtcgattcctgattctagctatcccatggaccacagattccgaagacagctgagcgagccatgcaactcttttccacctttacccactatgccgcgagaaggtcggcccatgtatcagcgccagatgagtgaacccaacatcccctttccaccacaagggtttaagcaagagtatcatgacccagtatatgaacacaacacaatggtgggtagcgctgcatcacagtccttccctcctcctctcatgattaagcaagagcctagagatttcgcttatgatagtgaagtgccctcctgtcattccatttacatgaggcaggagggcttcctggctcatccttcacgcaccgagggatgcatgttcgagaaaggtccacggcaattctacgatgacacctgcgttgtgcccgaaaagtttgacggcgatattaagcaggagcctgggatgtaccgcgaaggaccgacataccaacgcagaggaagcctgcagctttggcagttcctggtggccctcttggacgacccatcaaacagtcactttattgcctggaccggccgcgggatggagttcaagctgatcgagccagaggaagtcgcccgtaggtgggggatccagaagaacagaccagcaatgaactacgataaactgagccgcagtctccgatattactatgaaaagggtattatgcagaaggtggcaggcgaaaggtacgtgtacaaattcgtttgcgacccggaggctcttttcagtatggcttttccagataatcagagaccgctgctgaaaacagacatggagcgccacattaatgaagaagacacagtcccactgtcccatttcgatgaaagcatggcttacatgcctgaaggagggtgttgcaatcctcacccatataatgaaggatatgtttattag

SEQ ID NO: 61828 - DNA, 1260 bp, Artificial Sequence
  derived and/or modified sequence
atgctccaggacctcagtgcctccgtgttcttccccccttgcagtcagcacagaaccttagtggcattccatggtctgccactcaagattaagaaggaaccacacagcccttgtagcgagatctctagtgcctgcagccaggagcagccattcaagttctcatatggggagaagtgcctgtataacgtgagcgcctacgaccagaaacctcaggtgggtatgcggcctagtaaccctccaaccccgtcatccacccccgtttcacccctccatcacgcaagtcccaactcgactcacactcccaaacctgatcgcgcttttcctgcccacctgccaccgagccagtccatacctgactctagctatccaatggaccatcggttcagacgacagctgagcgaaccctgcaactcatttcctcctttgccgaccatgccacgggaaggaaggcccatgtaccagcgtcaaatgagcgaacctaacattccattccctccgcaaggcttcaaacaagagtaccatgaccccgtatatgagcacaataccatggtagggtcagctgctagtcagagctttccacctcccctcatgatcaagcaggaaccacgggactttgcttatgacagtgaggtgccatcttgccatagcatctatatgcgccaggagggatttctggcccatccctccagaacagaaggttgtatgttcgaaaagggaccgcgacagttctatgatgatacctgtgtcgtaccggaaaaatttgatggagacatcaaacaagaaccaggaatgtacagagaaggcccaacatatcagaggagagggtctctgcagctgtggcagtttctggttgctcttctcgacgacccgtccaactcccacttcattgcctggacaggcaggggcatggaatttaaacttatcgaaccagaagaagttgcccgacgttggggaattcagaaaaaccgacccgctatgaattatgacaagctttctcgttcattgcgttactactacgaaaaggggatcatgcaaaaggtcgccggagagcgctacgtatataagttcgtgtgtgatccggaagccctgttctccatggcctttcccgacaatcagaggccacttctcaagacagacatggagagacacatcaatgaagaagacaccgttcccctctcccatttcgacgagagtatggcatatatgccagagggcggatgttgcaaccctcacccatataacgaaggctacgtgtactag

SEQ ID NO: 61829 - protein, 374 aa, Artificial Sequence
  derived and/or modified sequence
MLQDLSASVFFPPCSQHRTLAQVPDNDEQFVPDYQAESLAFHGLPLKIKKEPHSPCSEISSACSQEQPFKFSYGEKCLYNVRFRRQLSEPCNSFPPLPTMPREGRPMYQRQMSEPNIPFPPQGFKQEYHDPVYEHNTMVGSAASQSFPPPLMIKQEPRDFAYDSEVPSCHSIYMRQEGFLAHPSRTEGCMFEKGPRQFYDDTCVVPEKFDGDIKQEPGMYREGPTYQRRGSLQLWQFLVALLDDPSNSHFIAWTGRGMEFKLIEPEEVARRWGIQKNRPAMNYDKLSRSLRYYYEKGIMQKVAGERYVYKFVCDPEALFSMAFPDNQRPLLKTDMERHINEEDTVPLSHFDESMAYMPEGGCCNPHPYNEGYVY

SEQ ID NO: 61830 - DNA, 1125 bp, Artificial Sequence
  derived and/or modified sequence
atgctgcaggacctgagcgccagcgtgttcttccccccctgcagccagcacagaaccctggcccaggtgcccgacaacgacgagcagttcgtgcccgactaccaggccgagagcctggccttccacggcctgcccctgaagatcaagaaggagccccacagcccctgcagcgagatcagcagcgcctgcagccaggagcagcccttcaagttcagctacggcgagaagtgcctgtacaacgtgagattcagaagacagctgagcgagccctgcaacagcttcccccccctgcccaccatgcccagagagggcagacccatgtaccagagacagatgagcgagcccaacatccccttccccccccagggcttcaagcaggagtaccacgaccccgtgtacgagcacaacaccatggtgggcagcgccgccagccagagcttccccccccccctgatgatcaagcaggagcccagagacttcgcctacgacagcgaggtgcccagctgccacagcatctacatgagacaggagggcttcctggcccaccccagcagaaccgagggctgcatgttcgagaagggccccagacagttctacgacgacacctgcgtggtgcccgagaagttcgacggcgacatcaagcaggagcccggcatgtacagagagggccccacctaccagagaagaggcagcctgcagctgtggcagttcctggtggccctgctggacgaccccagcaacagccacttcatcgcctggaccggcagaggcatggagttcaagctgatcgagcccgaggaggtggccagaagatggggcatccagaagaacagacccgccatgaactacgacaagctgagcagaagcctgagatactactacgagaagggcatcatgcagaaggtggccggcgagagatacgtgtacaagttcgtgtgcgaccccgaggccctgttcagcatggccttccccgacaaccagagacccctgctgaagaccgacatggagagacacatcaacgaggaggacaccgtgcccctgagccacttcgacgagagcatggcctacatgcccgagggcggctgctgcaacccccacccctacaacgagggctacgtgtactag

SEQ ID NO: 61831 - DNA, 1125 bp, Artificial Sequence
  derived and/or modified sequence
atgcttcaggacctgtctgccagcgttttcttcccaccttgctcacagcacagaacattagctcaagtcccagataatgatgaacaattcgtacccgactatcaagcagaaagcctagcttttcatgggctccccctgaagatcaaaaaggagccacattccccttgtagtgagatctcctctgcttgctctcaagaacagccattcaagtttagttatggcgagaagtgtctgtacaacgttcggtttagaagacagttgagtgaaccctgtaactcattcccacctctcccaaccatgcccagggaagggcgccccatgtaccagagacagatgagcgagcctaatatacccttcccaccgcaggggtttaagcaagaatatcacgatcccgtgtatgagcacaacacaatggtcgggtctgccgctagtcagagctttccaccaccgctgatgatcaagcaagaacctcgggatttcgcatatgatagtgaggttcctagctgtcattcaatttacatgcgccaggaagggtttttggcccacccatcccgtactgagggctgcatgtttgagaagggcccacggcagttctacgacgacacctgcgtggtcccagaaaaatttgacggagacattaagcaggagccaggaatgtaccgggaggggccaacatatcagcggcggggctctctccagctgtggcagtttctagtcgctctcctggacgaccccagcaattctcacttcatcgcctggaccgggagagggatggagtttaagcttattgaacctgaagaggtcgctagacgatgggggattcagaaaaaccgcccggccatgaattacgataagttgtccagaagtcttcgctactattatgagaaagggattatgcagaaggtcgccggagagagatatgtctataaattcgtgtgcgatcctgaagccttattcagtatggcctttccagacaatcaaaggcccctcctgaagactgacatggaacgacacatcaacgaggaggacaccgtgcctctctcccactttgacgagtcaatggcttacatgcctgaaggcgggtgttgcaatcctcatccgtacaacgaagggtacgtgtattag

SEQ ID NO: 61832 - DNA, 6096 bp, Artificial Sequence
  derived and/or modified sequence
gtcatgcatacattagagcctctgatgagtttgtctttggggactctggggctgtactacccagtgtcatcacaaattaccaggagaaattgcttccagctcacaatcacatctgcttttggcaagaactaatgcaccaagacttcaagttctaagcctctgttcagattttaattgcaattgatcaggtttatattattgtacctccagagacctcctagagccagaacccggctggcttgctgtttcctttagagcagcgcatatcattatttggtgttctggtggaggacttttctgatggcagaaattagtttctctgggttcatcaggacgggatgcttcaagatttaagtgcaagtgtcttctttccaccttgttcacaacacagaacgttagctcaggtacctgacaatgatgagcagtttgtaccagactatcaggctgaaagtttggcttttcatggcctgccactgaaaatcaagaaagaaccccacagtccatgttcagaaatcagctctgcctgcagtcaagaacagccctttaaattcagctatggagaaaagtgcctgtacaatgtcagatttcgccgccagctttctgaaccctgtaactcctttcctcctttgccgacgatgccaagggaaggacgtcctatgtaccaacgccagatgtctgagccaaacatccccttcccaccacaaggctttaagcaggagtaccacgacccagtgtatgaacacaacaccatggttggcagtgcggccagccaaagctttccccctcctctgatgattaaacaggaacccagagattttgcatatgactcagaagtgcctagctgccactccatttatatgaggcaagaaggcttcctggctcatcccagcagaacagaaggctgtatgtttgaaaagggccccaggcagttttatgatgacacctgtgttgtcccagaaaaattcgatggagacatcaaacaagagccaggaatgtatcgggaaggacccacataccaacggcgaggatcacttcagctctggcagtttttggtagctcttctggatgacccttcaaattctcattttattgcctggactggtcgaggcatggaatttaaactgattgagcctgaagaggtggcccgacgttggggcattcagaaaaacaggccagctatgaactatgataaacttagccgttcactccgctattactatgagaaaggaattatgcaaaaggtggctggagagagatatgtctacaagtttgtgtgtgatccagaagcccttttctccatggcctttccagataatcagcgtccactgctgaagacagacatggaacgtcacatcaacgaggaggacacagtgcctctttctcactttgatgagagcatggcctacatgccggaagggggctgctgcaacccccacccctacaacgaaggctacgtgtattaacacaagtgacagtcaagcagggcgtttttgcgcttttccttttttctgcaagatacagagaattgctgaatctttgttttatttctgttgtttgtattttatttttaaataataatacacaaaaaggggcttttcctgttgcattattctatggtctgccatggactgtgcactttatttgagggtgggtgggagtaatctaaacatttattctgtgtaacaggaagctaatgggtgaatgggcagagggatttggggattactttttacttaggcttgggatggggtcctacaagttttgagtatgatgaaactatatcatgtctgtttgatttcataacaacataagataatgtttattttatcggggtatctatggtacagttaatttcacgttgtgtaaatatccacttggagactatttgccttgggcattttcccctgtcatttatgagtctctgcaggtgtacaaaaaaaccccaatctactgtaaatggcagtttaattgttagaaatgactgtttttgcaccacttgtaaaaaggtatttagcgattgcatttgctgtttgttgttttattttgctttatatatgacttgcagaggataaccataaaatgggtaattctctctgaagttgaataatcaccatgactgtaaatgaggggcacaattttggactctggcgccaaactgagtcataggccagtagcattacgtgtatctggtgccaccttgctgtttagatacaaatcataccgtcttttaaatattttgaagcccatttcagttaaataatgacatgtcatggtcctttggaatcttcatttaaatgttaaatctggaatcaaaatgaagcaaaaaatatctgtctccttttcactttcttcagtacataaatacattatttaatcaataagaattaactgtactaaatcatgtattatgctgttctagttacagcaaacactctttaagaaaaatatccaatacactaaataggtactatagtaatttttagacatggtacccattgatatgcatttaaaccttttactgctgtgttatgttgataacatatataaatattagataatgctaatgcttctgctgctgtcttttctgtaatattctctttcatgctgaatttactatgaccatttataagcagtgcagttaactacagatagcatttcaggacaaaatagatgactcaaaccatttattgcttaaaaaatagcttacgccatgctatgctataagcagcttttatgcacattgacaaatgaagagtaagcttcagcttgctaaaggaaactgtggaaccttttgtaacttttggtgatatggaaaattatttacaaaccgtcaaagaatatgaggaagttgctgtatgacatagtgctggcactgatattatccatcatctctttttggacacttctgtaaatgtgattggattgtttgaaagaagatttaaagtttcaaagttttttgttctgtttttgctttgcatttggagaaaatattgaaagcagggtatgttgtttcattcaccttgaaaaaaccatgagtaaatggggatatagaatctctgaatagctcgctaaaagattcaagcaagggacatgaattttgttccatctatcaataatatccagaagaacaacttttttaaagagtctatagcaaaaagcaaaaaaaaaaaaaaattctaaacacaaagtcaaaataaacctattgtaaaagcatttcgtgatgagcatgaaaaagattgtttaaagatgatccccccagctacccattttccaaaactacacagatcacagctcatttctctaagtggagcagttatcaagaaacccaaacaccaaaattgctactcttcacatttaatcctacaaaaagtactccaatttcaaaatatgtatgtaacctgcgatttcaatgattgttgttcatatacatcatgtattattttggcccattttgggcctaaaaaagaaaactatgccttaaaaatcagaaccttttctccccactatgcttatgtggccatctacagcacttagaataaaaacagatgttaaaatattcagtgaaagttttattggaaaaaggaattgagatatataattgagatttggtgaaattgaaggagaaaatttaagtgagtctttaaaatatattctgaatgaaaactgtattgaggattcatttttgttccttttttttctttttctcttttctcctttttcttctttttaatagtctagttttagtcagtcagtgaggaagaattgggccatgctaacgttatcacaagagaacaatggcagaaatggtattagttatataatatttaaggacaaactatatgttttgctgttttaacgtagtgactcactgaactaaatacataattgaccaacattaagtgtatttccaatacagaagggttgaaaatattacattataaactcttttgaaaaatgtatctaaaattttttaagttctgttttgattccactttttggttgagtttttatgtttttgttttcaggtagattaataaatctggcagctgatttctgcaagattcttgtgttttgaatttctcattgaattggctactcaaacatagaaatcatttgttaatgatgtaatgtcttctctcagcttttatcttcactgctgtttgctgtctcttgatgatgacatgttaatacccaatagattaattgcaacaaacacttatactcaaataactaagtaaaaataatttttcttgttatgtccatgaaaagtgcttcagaataaaaatccacaagactgacagtgcagaacatttttctcaaatcatgggcggatcttggaggtctagtttcccgtagatgctgtaaccaattaccacaacttcagtaatttacacaaatttatcttatagttctggaggcagaagttcaaaagaagccttaagagactaaaaccaagatgtccttaggtctggttccttctggaggctccaggggagattcttccagctttcacttctagagtctgctgacattccttggctcctggctacatcacttcaatctctgcttccatggtcacatactcttctactatagtcaaatttccttcctgcctcttataaggatgcttgtgattacatttaggggatgctcagataatccaggacaatctctccatctcaagatccttaacttaatgacgtgtgccaagtccctttggctagataattattcataggtcccagggattaggacatggatgtaaggggtgagggcagggctgttattcagaacaccgcacggaggaggaagactgtgtagcaaagactctaattgatttactcaggaacagtggagttctgctgagggatctaggatttgaaagtactagagtttgcttttatttaccactgagatattttccccttattctgcataaataattttgaaaactttctatattaaatttcaactattccactaaaatgtctggtaatcacatcaagcctttagattattcaaatccttccccagcccccaggaaaacactaagtcatgaaacagaaaaacagaaggtatgataataatagtaataacagttaaatcagtggtctaatccagattttattttttaatacatttcttttggtgttaatatgggttactatgtgatcttatcatttgctagtgattattacttattaggtaagaacaatgtgtaaaatatgtctattactcaaaagaacaattgcaaaatgagtcaacttatctttatataaccaggaaagaaatatattgccagaagctacagaattttgccagatgatagggatttctaaaatgagccactttgtctatcatgcagccttttcagagcttgtaatgagaaaacattacagaggagaaggtcatttggatgtttgttacttggaatcctagaaaacaaaaactaaaatttaaaaataagaagtgagtaagctattttccatttgcgatttggtatggagaagagaggaaatagaattattaaaaaaatacaaattgggtaaaagtgatggtggaaaaaatataaagaaggcaaatgtacatattaagcaattctactaagaattggaaaaatcaagtttcaaaaagatggtaatagttgggcatgatactagaaaatttcacccagtttattcagagctcaactagtacttttaggacttctttttttatatacatgagactcactttgacatacttaaaaaaaaaacagtttatggaaagtacagtttaagaggagaatttgattagactaagtggatatctttatagaaatattaatgatttcagaattttcagttacaagtgtatataccgtggctattgtttatggattcatatgtaaggtagggtcttttttgcatatagactccagtattagttactttcattctaaaattatatttatgcttctatggggaagaaaatttttaattcacttggttgtattaaaattatacttacggtttgagaaaacatgctatgaaaatcatgattatagcaaattaaatatgctcaaaatttaaatctaaaataaaagcccagaaactg

SEQ ID NO: 61833 - DNA, 1125 bp, Artificial Sequence
  derived and/or modified sequence
atgctgcaggacctgagcgccagcgtcttcttccccccctgcagccagcacaggaccctggcccaggtgcctgacaatgatgagcagtttgtgcctgactaccaggccgagagcctggccttccacggcctgcccctgaagatcaagaaggagccccacagcccctgcagcgagatcagcagcgcctgcagccaggagcagcccttcaagttctcctatggagagaagtgcctgtacaacgtgcgcttccggcggcagctgtctgagccctgcaacagcttcccccccctgcccaccatgccccgggagggccggcccatgtaccagaggcagatgtctgagcccaacatccccttccccccccagggcttcaagcaggagtaccatgaccctgtgtatgagcacaacaccatggtgggcagcgctgccagccagagcttccccccacccctgatgatcaagcaggagccccgggactttgcctatgacagcgaggtgcccagctgccacagcatctacatgaggcaggagggcttcctggcccaccccagcaggacagagggctgcatgtttgagaagggcccccggcagttctatgatgacacctgtgtggtgcctgagaagtttgatggagacatcaagcaggagcccggcatgtaccgggagggccccacctaccagaggcggggcagcctgcagctgtggcagttcctggtggccctgctggatgaccccagcaacagccacttcatcgcctggacaggccggggcatggagttcaagctgattgagcctgaggaggtggcccggcgctggggcatccagaagaacagacctgccatgaactatgacaagctgagccgcagcctgcgctactactatgagaagggcatcatgcagaaggtggccggggagagatatgtgtacaagtttgtgtgtgaccctgaggccctcttctccatggccttcccagacaaccagaggcccctgctgaagacagacatggagcggcacatcaatgaggaggacacagtgcccctgagccactttgatgagagcatggcctacatgcctgagggcggctgctgcaacccccacccctacaatgaaggctacgtgtactag

SEQ ID NO: 61834 - DNA, 1125 bp, Artificial Sequence
  derived and/or modified sequence
atgctgcaggacctgagcgccagcgtgttcttccccccctgcagccaacatcgaacgttggcccaagttccagataacgacgaacagtttgtccccgattatcaggctgaaagtctcgcctttcacggactgcccctaaaaatcaagaaggaaccgcattcaccatgcagtgaaatctcttccgcctgctcacaagagcaaccttttaaatttagctacggggagaagtgcctctacaacgtacgatttcggcggcagctaagtgagccatgcaacagcttccctccactccccacaatgcctcgagagggccggcctatgtatcagagacaaatgagtgaacctaacataccgtttccgccacagggcttcaagcaagagtaccacgatcctgtttacgagcacaatactatggtaggatccgccgccagccagagttttccgccaccgttgatgattaagcaggagccacgcgatttcgcttacgattcagaagtcccatcgtgccattctatatacatgaggcaggagggttttctagctcacccctcccgcactgaaggctgcatgtttgaaaagggcccacgccaattctatgacgatacatgtgtggtccccgagaagttcgacggtgatataaagcaggaaccaggaatgtaccgggagggtcctacctaccagagacgtggttccctccagctgtggcagttcttggtggccctgctcgacgatccctccaactcccattttattgcatggaccggccggggaatggagttcaagcttatcgaaccggaggaggttgcgcgcagatgggggattcaaaagaatcgacccgccatgaattatgacaagctgtcccggtcactgcgatactactacgagaaagggattatgcagaaagtagccggagagcgttatgtctacaaatttgtttgcgacccagaagcgctgttcagcatggctttcccagataatcagcgacctctgctgaagacagatatggaacgacatataaatgaggaggatactgttcccctaagtcattttgacgaatcaatggcgtacatgcccgaggggggctgttgcaatccccacccttataacgaggggtacgtgtactag

SEQ ID NO: 61835 - DNA, 1125 bp, Artificial Sequence
  derived and/or modified sequence
atgttgcaagatctctccgcgtccgttttttttccgccatgttctcagcataggacgctcgctcaggttcccgataatgatgaacagttcgtccctgattaccaggcagagtcactggcatttcatggcctgcccctgaagattaagaaggagccccacagtccctgctccgaaatctcttcagcctgtagccaggagcaaccgttcaagtttagttacggtgaaaaatgcctgtataatgtgaggtttagaagacaattgtcagaaccttgcaattcatttccaccactgcccaccatgcctcgggaaggtagacccatgtatcagcgccagatgagcgaacctaatattcccttcccacctcagggattcaaacaagagtatcatgacccggtgtacgagcataacacaatggtgggcagcgctgcgagccaaagcttcccgcctccactgatgattaaacaggaacctagggacttcgcatatgactcagaggtcccgtcttgccactctatatacatgaggcaggaaggttttctggcccacccgtctagaaccgaagggtgcatgtttgagaaaggaccccgacagttttacgatgatacttgcgtggtgcccgagaaattcgacggagatataaagcaggaaccaggcatgtacagggaggggccaacatatcagagacgaggctctttgcagctctggcagttcctcgtcgccctgttagacgaccctagcaattctcactttattgcctggactgggaggggcatggagtttaaactcatagagccagaggaagtggcacgcaggtgggggattcagaagaatcgaccagcaatgaactacgataaactctcacgttccttacgctactattacgaaaaagggatcatgcagaaggttgcgggtgaacgttacgtttacaaatttgtttgcgatcctgaggcattgtttagtatggcgtttccagacaaccagaggccacttctgaagacagatatggaacggcatatcaatgaggaggacactgtgcctctgagccatttcgacgagtcgatggcctacatgcctgaagggggatgttgcaatccccacccgtacaatgaaggctatgtatactag

SEQ ID NO: 61836 - protein, 808 aa, Artificial Sequence
  derived and/or modified sequence
MGAPACALALCVAVAIVAGASSESLGTEQRVVGRAAEVPGPEPGQQEQLVFGSGDAVELSCPPPGGGPMGPTVWVKDGTGLVPSERVLVGPQRLQVLNASHEDSGAYSCRQRLTQRVLCHFSVRVTDAPSSGDDEDGEDEAEDTGVDTGAPYWTRPERMDKKLLAVPAANTVRFRCPAAGNPTPSISWLKNGREFRGEHRIGGIKLRHQQWSLVMESVVPSDRGNYTCVVENKFGSIRQTYTLDVLERSPHRPILQAGLPANQTAVLGSDVEFHCKVYSDAQPHIQWLKHVEVNGSKVGPDGTPYVTVLKSWISESVEADVRLRLANVSERDGGEYLCRATNFIGVAEKAFWLSVHGPRAAEEELVEADEAGSVYAGILSYGVGFFLFILVVAAVTLCRLRSPPKKGLGSPTVHKISRFPLKRQVSLESNASMSSNTPLVRIARLSSGEGPTLANVSELELPADPKWELSRARLTLGKPLGEGCFGQVVMAEAIGIDKDRAAKPVTVAVKMLKDDATDKDLSDLVSEMEMMKMIGKHKNIINLLGACTQGGPLYVLVEYAAKGNLREFLRARRPPGLDYSFDTCKPPEEQLTFKDLVSCAYQVARGMEYLASQKCIHRDLAARNVLVTEDNVMKIADFGLARDVHNLDYYKKTTNGRLPVKWMAPEALFDRVYTHQSDVWSFGVLLWEIFTLGGSPYPGIPVEELFKLLKEGHRMDKPANCTHDLYMIMRECWHAAPSQRPTFKQLVEDLDRVLTVTSTDEYLDLSAPFEQYSPGGQDTPSSSSSGDDSVFAHDLLPPAPPSSGGSRT

SEQ ID NO: 61837 - DNA, 2427 bp, Artificial Sequence
  derived and/or modified sequence
atgggcgcccccgcctgcgccctggccctgtgcgtggccgtggccatcgtggccggcgccagcagcgagagcctgggcaccgagcagagagtggtgggcagagccgccgaggtgcccggccccgagcccggccagcaggagcagctggtgttcggcagcggcgacgccgtggagctgagctgccccccccccggcggcggccccatgggccccaccgtgtgggtgaaggacggcaccggcctggtgcccagcgagagagtgctggtgggcccccagagactgcaggtgctgaacgccagccacgaggacagcggcgcctacagctgcagacagagactgacccagagagtgctgtgccacttcagcgtgagagtgaccgacgcccccagcagcggcgacgacgaggacggcgaggacgaggccgaggacaccggcgtggacaccggcgccccctactggaccagacccgagagaatggacaagaagctgctggccgtgcccgccgccaacaccgtgagattcagatgccccgccgccggcaaccccacccccagcatcagctggctgaagaacggcagagagttcagaggcgagcacagaatcggcggcatcaagctgagacaccagcagtggagcctggtgatggagagcgtggtgcccagcgacagaggcaactacacctgcgtggtggagaacaagttcggcagcatcagacagacctacaccctggacgtgctggagagaagcccccacagacccatcctgcaggccggcctgcccgccaaccagaccgccgtgctgggcagcgacgtggagttccactgcaaggtgtacagcgacgcccagccccacatccagtggctgaagcacgtggaggtgaacggcagcaaggtgggccccgacggcaccccctacgtgaccgtgctgaagagctggatcagcgagagcgtggaggccgacgtgagactgagactggccaacgtgagcgagagagacggcggcgagtacctgtgcagagccaccaacttcatcggcgtggccgagaaggccttctggctgagcgtgcacggccccagagccgccgaggaggagctggtggaggccgacgaggccggcagcgtgtacgccggcatcctgagctacggcgtgggcttcttcctgttcatcctggtggtggccgccgtgaccctgtgcagactgagaagcccccccaagaagggcctgggcagccccaccgtgcacaagatcagcagattccccctgaagagacaggtgagcctggagagcaacgccagcatgagcagcaacacccccctggtgagaatcgccagactgagcagcggcgagggccccaccctggccaacgtgagcgagctggagctgcccgccgaccccaagtgggagctgagcagagccagactgaccctgggcaagcccctgggcgagggctgcttcggccaggtggtgatggccgaggccatcggcatcgacaaggacagagccgccaagcccgtgaccgtggccgtgaagatgctgaaggacgacgccaccgacaaggacctgagcgacctggtgagcgagatggagatgatgaagatgatcggcaagcacaagaacatcatcaacctgctgggcgcctgcacccagggcggccccctgtacgtgctggtggagtacgccgccaagggcaacctgagagagttcctgagagccagaagaccccccggcctggactacagcttcgacacctgcaagccccccgaggagcagctgaccttcaaggacctggtgagctgcgcctaccaggtggccagaggcatggagtacctggccagccagaagtgcatccacagagacctggccgccagaaacgtgctggtgaccgaggacaacgtgatgaagatcgccgacttcggcctggccagagacgtgcacaacctggactactacaagaagaccaccaacggcagactgcccgtgaagtggatggcccccgaggccctgttcgacagagtgtacacccaccagagcgacgtgtggagcttcggcgtgctgctgtgggagatcttcaccctgggcggcagcccctaccccggcatccccgtggaggagctgttcaagctgctgaaggagggccacagaatggacaagcccgccaactgcacccacgacctgtacatgatcatgagagagtgctggcacgccgcccccagccagagacccaccttcaagcagctggtggaggacctggacagagtgctgaccgtgaccagcaccgacgagtacctggacctgagcgcccccttcgagcagtacagccccggcggccaggacacccccagcagcagcagcagcggcgacgacagcgtgttcgcccacgacctgctgccccccgccccccccagcagcggcggcagcagaacctag

SEQ ID NO: 61838 - DNA, 2427 bp, Artificial Sequence
  derived and/or modified sequence
atgggagcccccgcgtgcgcactcgcactgtgcgtcgcggtggcgattgtcgccggagcatcctcagaatccctggggactgagcaaagggtcgtcggccgagctgccgaggtgcctgggccagagcccgggcagcaagagcagctggtcttcggtagtggcgacgctgtggagctgagctgtcctcctcctggagggggccccatgggacccactgtctgggtcaaggacggtactgggctggtcccaagtgagagagtgctggtgggccctcagaggctgcaggttctcaacgcatctcacgaagactctggagcatattcatgccgacaaagattaactcagcgtgttttatgtcacttctcagtccgcgtgacagatgctcctagctcgggagacgacgaagatggagaggatgaggccgaagatacaggcgtcgacacaggcgcaccttactggaccagacctgagcggatggacaagaagctgctggccgtccccgctgctaatacagttaggtttcggtgccccgccgctggaaaccccacaccatcaatctcttggctcaagaatggtcgcgaatttcgaggtgagcacaggataggcggcataaagttgcgccaccagcaatggtccctagtcatggaaagcgtggtacctagcgataggggtaattacacatgtgtcgttgaaaataaattcggcagcatccgccaaacatatacccttgatgttttagaacgatccccacatcgtcccattttacaagccggcttgccagctaatcaaactgccgtccttggaagcgatgtggaatttcattgcaaggtgtactctgatgcacagcctcacattcagtggttgaaacacgtcgaggtgaatggatctaaagtgggacccgatggaactccttatgtgaccgtgctgaagagctggatctctgaatctgttgaagcagacgtgcggctgagactggcaaacgtgtctgaaagggatggcggggaatacctgtgccgagctaccaattttatcggagttgctgaaaaggccttttggttgagcgtgcacggtccccgagccgcagaggaggaactggttgaagcagacgaagccgggtccgtgtacgctggaatcctctcctatggcgtgggattcttcctgttcatactcgtggttgccgccgtgacattatgtcgcctcagatccccaccgaaaaaaggacttggaagcccgacagttcacaagatcagtagatttcccttgaaaagacaggtttctttggaatccaacgcatcaatgagctccaataccccattggtgcggatcgctcggctgtcttcaggggaaggccctactcttgctaatgtgagcgaacttgaactcccagccgaccctaagtgggaattgtctcgggcacggctgaccctcggaaaaccactcggagaaggatgctttggccaggttgtgatggcagaggctattgggattgacaaggaccgcgccgcaaagccggtaactgttgccgtgaagatgctcaaagacgacgccacagacaaagatctgagtgacctggtgtccgagatggagatgatgaaaatgatcgggaagcacaaaaatatcataaatctgttgggagcctgcacccaaggcggaccactatacgtactagtggagtatgctgctaaaggcaatctgcgtgagttcctcagggcgcggcggcctcctggcctagactactcctttgacacatgtaaacccccggaagagcagttgactttcaaagatcttgtcagttgcgcttaccaggtcgcccgaggcatggagtacctggctagccagaagtgcatccacagagatttggctgcccgaaatgtgctagtgacggaggacaacgtgatgaaaattgccgactttgggttggctcgcgatgtgcacaacctggattactataagaaaaccaccaacggtcgcctaccggtgaagtggatggcgcctgaagcgctgttcgaccgcgtttacacacatcagagcgacgtgtggtccttcggggtgcttctctgggaaatcttcaccttgggcgggagtccttatccaggcatccctgtcgaggaacttttcaaactgcttaaggaggggcacaggatggacaagcctgcgaattgcacgcacgatctttatatgattatgcgggaatgttggcatgcggccccttcacagcggccaactttcaaacagttagtggaggatctagaccgggtgctcaccgtgaccagtactgacgagtacctggatctgagtgcccctttcgagcagtatagtcctggggggcaagacactccgagttcttcttcatctggcgacgattccgtgttcgctcatgaccttttaccacctgcccctccttcaagcggaggctcccgaacgtag

SEQ ID NO: 61839 - DNA, 4293 bp, Artificial Sequence
  derived and/or modified sequence
gtcgcgggcagctggcgccgcgcggtcctgctctgccggtcgcacggacgcaccggcgggccgccggccggagggacggggcgggagctgggcccgcggacagcgagccggagcgggagccgcgcgtagcgagccgggctccggcgctcgccagtctcccgagcggcgcccgcctcccgccggtgcccgcgccgggccgtggggggcagcatgcccgcgcgcgctgcctgaggacgccgcggcccccgcccccgccatgggcgcccctgcctgcgccctcgcgctctgcgtggccgtggccatcgtggccggcgcctcctcggagtccttggggacggagcagcgcgtcgtggggcgagcggcagaagtcccgggcccagagcccggccagcaggagcagttggtcttcggcagcggggatgctgtggagctgagctgtcccccgcccgggggtggtcccatggggcccactgtctgggtcaaggatggcacagggctggtgccctcggagcgtgtcctggtggggccccagcggctgcaggtgctgaatgcctcccacgaggactccggggcctacagctgccggcagcggctcacgcagcgcgtactgtgccacttcagtgtgcgggtgacagacgctccatcctcgggagatgacgaagacggggaggacgaggctgaggacacaggtgtggacacaggggccccttactggacacggcccgagcggatggacaagaagctgctggccgtgccggccgccaacaccgtccgcttccgctgcccagccgctggcaaccccactccctccatctcctggctgaagaacggcagggagttccgcggcgagcaccgcattggaggcatcaagctgcggcatcagcagtggagcctggtcatggaaagcgtggtgccctcggaccgcggcaactacacctgcgtcgtggagaacaagtttggcagcatccggcagacgtacacgctggacgtgctggagcgctccccgcaccggcccatcctgcaggcggggctgccggccaaccagacggcggtgctgggcagcgacgtggagttccactgcaaggtgtacagtgacgcacagccccacatccagtggctcaagcacgtggaggtgaatggcagcaaggtgggcccggacggcacaccctacgttaccgtgctcaagtcctggatcagtgagagtgtggaggccgacgtgcgcctccgcctggccaatgtgtcggagcgggacgggggcgagtacctctgtcgagccaccaatttcataggcgtggccgagaaggccttttggctgagcgttcacgggccccgagcagccgaggaggagctggtggaggctgacgaggcgggcagtgtgtatgcaggcatcctcagctacggggtgggcttcttcctgttcatcctggtggtggcggctgtgacgctctgccgcctgcgcagcccccccaagaaaggcctgggctcccccaccgtgcacaagatctcccgcttcccgctcaagcgacaggtgtccctggagtccaacgcgtccatgagctccaacacaccactggtgcgcatcgcaaggctgtcctcaggggagggccccacgctggccaatgtctccgagctcgagctgcctgccgaccccaaatgggagctgtctcgggcccggctgaccctgggcaagccccttggggagggctgcttcggccaggtggtcatggcggaggccatcggcattgacaaggaccgggccgccaagcctgtcaccgtagccgtgaagatgctgaaagacgatgccactgacaaggacctgtcggacctggtgtctgagatggagatgatgaagatgatcgggaaacacaaaaacatcatcaacctgctgggcgcctgcacgcagggcgggcccctgtacgtgctggtggagtacgcggccaagggtaacctgcgggagtttctgcgggcgcggcggcccccgggcctggactactccttcgacacctgcaagccgcccgaggagcagctcaccttcaaggacctggtgtcctgtgcctaccaggtggcccggggcatggagtacttggcctcccagaagtgcatccacagggacctggctgcccgcaatgtgctggtgaccgaggacaacgtgatgaagatcgcagacttcgggctggcccgggacgtgcacaacctcgactactacaagaagacgaccaacggccggctgcccgtgaagtggatggcgcctgaggccttgtttgaccgagtctacactcaccagagtgacgtctggtcctttggggtcctgctctgggagatcttcacgctggggggctccccgtaccccggcatccctgtggaggagctcttcaagctgctgaaggagggccaccgcatggacaagcccgccaactgcacacacgacctgtacatgatcatgcgggagtgctggcatgccgcgccctcccagaggcccaccttcaagcagctggtggaggacctggaccgtgtccttaccgtgacgtccaccgacgagtacctggacctgtcggcgcctttcgagcagtactccccgggtggccaggacacccccagctccagctcctcaggggacgactccgtgtttgcccacgacctgctgcccccggccccacccagcagtgggggctcgcggacgtgaagggccactggtccccaacaatgtgaggggtccctagcagcccaccctgctgctggtgcacagccactccccggcatgagactcagtgcagatggagagacagctacacagagctttggtctgtgtgtgtgtgtgtgcgtgtgtgtgtgtgtgtgtgcacatccgcgtgtgcctgtgtgcgtgcgcatcttgcctccaggtgcagaggtaccctgggtgtccccgctgctgtgcaacggtctcctgactggtgctgcagcaccgaggggcctttgttctggggggacccagtgcagaatgtaagtgggcccacccggtgggacccccgtggggcagggagctgggcccgacatggctccggcctctgcctttgcaccacgggacatcacagggtgggcctcggcccctcccacacccaaagctgagcctgcagggaagccccacatgtccagcaccttgtgcctggggtgttagtggcaccgcctccccacctccaggctttcccacttcccaccctgcccctcagagactgaaattacgggtacctgaagatgggagcctttaccttttatgcaaaaggtttattccggaaactagtgtacatttctataaatagatgctgtgtatatggtatatatacatatatatatataacatatatggaagaggaaaaggctggtacaacggaggcctgcgaccctgggggcacaggaggcaggcatggccctgggcggggcgtgggggggcgtggagggaggccccagggggtctcacccatgcaagcagaggaccagggccttttctggcaccgcagttttgttttaaaactggacctgtatatttgtaaagctatttatgggcccctggcactcttgttcccacaccccaacacttccagcatttagctggccacatggcggagagttttaatttttaacttattgacaaccgagaaggtttatcccgccgatagagggacggccaagaatgtacgtccagcctgccccggagctggaggatcccctccaagcctaaaaggttgttaatagttggaggtgattccagtgaagatattttatttcctttgtcctttttcaggagaattagatttctataggatttttctttaggagatttattttttggacttcaaagcaagctggtattttcatacaaattcttctaattgctgtgtgtcccaggcagggagacggtttccagggaggggccggccctgtgtgcaggttccgatgttattagatgttacaagtttatatatatctatatatataatttattgagtttttacaagatgtatttgttgtagacttaacacttcttacgcaatgcttctagagttttatagcctggactgctacctttcaaagcttggagggaagccgtgaattcagttggttcgttctgtactgttactgggccctgagtctgggcagctgtcccttgcttgcctgcagggccatggctcagggtggtctcttcttggggcccagtgcatggtggccagaggtgtcacccaaaccggcaggtgcgattttgttaacccagcgacgaactttccgaaaaataaagacacctggttgctaacctgg

SEQ ID NO: 61840 - DNA, 2427 bp, Artificial Sequence
  derived and/or modified sequence
atgggcgccccagcctgtgccctggccctgtgtgtggccgtggccatcgtggccggggccagcagcgagagcctgggcacagagcagagggtggtgggccgggctgctgaggtgcccggccctgagcccggccagcaggagcagctggtgtttggaagtggagatgctgtggagctgagctgccccccacctgggggcggccccatgggccccaccgtgtgggtgaaggatggcaccggcctggtgcccagcgagcgggtgctggtgggcccccagaggctgcaggtgctgaatgccagccatgaggacagcggggcctacagctgccggcagaggctgacccagagggtgctgtgccacttctctgtgcgggtgacagatgcccccagcagtggagatgatgaagatggagaagatgaagctgaggacaccggggtggacaccggggccccctactggaccaggcctgagaggatggacaagaagctgctggccgtgcctgctgccaacacagtgcgcttccgctgcccagctgctggcaaccccacccccagcatctcctggctgaagaatggccgggagttccggggggagcacagaattggaggcatcaagctgcggcaccagcagtggagcctggtgatggagagcgtggtgcccagcgaccggggcaactacacctgtgtggtggagaacaagtttggcagcatccggcagacctacaccctggatgtgctggagaggagcccccaccggcccatcctgcaggccggcctgcctgccaaccagacagctgtgctgggcagtgatgtggagttccactgcaaggtgtacagtgatgcccagccccacatccagtggctgaagcacgtggaggtgaatggcagcaaggtgggcccagatggcaccccctacgtgacagtgctgaagtcctggatcagcgagagcgtggaggctgatgtgcggctgcggctggccaacgtgtctgaaagagatggaggagagtacctgtgccgggccaccaacttcatcggcgtggccgagaaggccttctggctgtctgtgcacggccccagggctgctgaggaggagctggtggaggctgatgaagctggctctgtgtatgccggcatcctgtcctatggagtgggcttcttcctgttcatcctggtggtggccgctgtgaccctgtgccgcctgcggagcccccccaagaagggcctgggcagccccaccgtgcacaagatcagccgcttccccctgaagaggcaggtgtccctggagagcaatgcctccatgagcagcaacacccccctggtgcgcatcgcccggctgagcagtggagagggccccaccctggccaacgtgtctgagctggagctgcctgctgaccccaagtgggagctgagccgggcccggctgaccctgggcaagcccctgggggagggctgcttcggccaggtggtgatggccgaggccatcggcatcgacaaggacagagctgccaagcctgtgacagtggccgtgaagatgctgaaggatgatgccacagacaaggacctgagtgacctggtgtctgagatggagatgatgaagatgattggcaagcacaagaacatcatcaacctgctgggcgcctgcacccagggcggccccctgtatgtgctggtggagtatgctgccaagggcaacctgcgggagttcctgcgggcccggcggcccccaggcctggactacagctttgacacctgcaagcccccagaggagcagctgaccttcaaggacctggtgtcctgtgcctaccaggtggcccggggcatggagtacctggccagccagaagtgcatccaccgggacctggccgccagaaatgtgctggtgacagaagataatgtgatgaagattgctgactttggcctggccagagatgtgcacaacctggactactacaagaagaccaccaacggccgcctgcctgtgaagtggatggcccctgaggccctgtttgacagagtgtacacccaccagagtgatgtgtggagctttggagtgctgctgtgggagatcttcaccctgggcggcagcccctacccaggcatccctgtggaggagctgttcaagctgctgaaggagggccacaggatggacaagccagccaactgcacccatgacctgtacatgatcatgagggagtgctggcatgctgcccccagccagaggcccaccttcaagcagctggtggaggacctggacagagtgctgactgtgaccagcacagatgagtacctggacctgagcgccccctttgagcagtacagccctgggggccaggacacccccagcagcagcagcagtggagatgattctgtgtttgcccatgacctgctgcccccagccccacccagcagcggcggcagcaggacatag

SEQ ID NO: 61841 - DNA, 2427 bp, Artificial Sequence
  derived and/or modified sequence
atgggcgcccccgcctgcgccctggccctgtgcgtggccgtggccatcgtagctggagctagcagcgaaagcctgggtaccgagcagcgagtagtgggccgggccgcggaggtgccaggtcccgagccggggcagcaggagcagctcgtgtttggatctggcgacgccgtcgagctctcttgtccacctcccggtggaggtcccatggggccaactgtgtgggtaaaggacggaactggcctggttcctagtgaacgggtgctggtgggcccccaacgactgcaggtgctgaatgcatcacacgaggattccggggcttactcctgtagacagagattgacacagcgtgttctgtgccatttctccgtgagagtcaccgacgcaccatcgtcaggcgatgatgaagacggagaggacgaagcggaggatacgggagtagatacaggagcaccatattggacgagacctgaaagaatggacaagaagctcctggcagttccggccgctaacaccgttagattcagatgccctgccgccggcaatcccacaccctcaatttcctggctgaaaaacggacgagagttccgaggagagcatagaataggggggattaagctgagacaccaacagtggtcgcttgtgatggagtccgtggtcccaagtgatcgggggaattatacctgtgttgtcgaaaacaagtttgggtcaattcggcaaacctataccctggatgtcctggaaaggtccccccataggcctatcctgcaggcggggttgcccgcaaaccaaacagctgtactgggatccgacgtggaattccactgcaaggtgtatagcgacgcacagccccatatccagtggctcaaacacgtcgaggtgaacgggtcaaaagtaggcccagacggcaccccttatgtgacagtgctgaaaagttggataagtgagtcagtcgaagccgatgtacggctccggctagcaaatgtgagcgaacgagacggcggggaatatctgtgcagggccacgaactttattggagttgcagagaaagccttctggctctctgtgcatggcccacgcgctgccgaggaagaactggtagaggccgacgaagccgggagtgtgtacgcgggtatcctgtcatatggagtgggctttttcctgttcatcctggtggtggcagcagttaccctgtgtcgcctgcgctcgccaccaaaaaagggtctcggaagtccgaccgtccataagatttcacggtttcccctcaagaggcaggtgagtctggaatcgaacgcctctatgtccagtaacacaccccttgttagaatagcgcgcctctcctctggggaaggcccaactcttgctaatgtgagcgaactggagcttcccgcggatccaaaatgggaactgtcaagggcgcgcctgacactcgggaagcccctgggggagggttgtttcggccaggtggtgatggctgaggccatcggaattgataaagatcgggctgccaagcctgtgaccgtcgcagttaagatgctgaaggatgacgccaccgataaagacctcagcgacttagtgtccgaaatggagatgatgaagatgatcggaaagcacaagaatattatcaaccttctgggtgcttgcactcaaggagggccactgtatgtgcttgtcgaatacgcagctaaggggaatttacgagaatttcttcgggctagacgaccccctgggctggattatagtttcgacacctgtaagcccccagaagaacagctgactttcaaggatctggtgtcttgtgcctaccaggtcgctaggggcatggagtatctggctagccagaaatgcatccatagggacctcgctgcccgtaatgtccttgtaaccgaggacaacgtcatgaaaatcgctgacttcgggctagctagagatgtccacaaccttgactattacaagaagaccaccaacggccgcttacctgtgaagtggatggcccccgaggcgctcttcgatagggtctacacccaccagtcagacgtctggtcatttggtgtcttgttatgggaaatattcaccctgggcggctcaccataccctgggattccggttgaggagctgtttaagttactcaaagagggccaccgcatggacaagcccgcaaactgtactcacgacctgtacatgattatgagggagtgttggcatgctgctccctctcaacgccctactttcaaacaactggtcgaggacttggacagggtcctgaccgtcacttccaccgacgaatacctggacctgtcagcgccctttgagcagtatagtccgggtggccaggacacgccctctagtagctcttccggcgatgacagcgtcttcgcacacgacttgctcccacccgctccaccttcgagtggaggctcccgcacatag

SEQ ID NO: 61842 - DNA, 2427 bp, Artificial Sequence
  derived and/or modified sequence
atgggggctcctgcctgtgccttagctctctgtgtcgcggtcgcgatcgtcgccggagcctcgagcgaatcattgggcacagagcaaagggtcgtcgggagagctgccgaagtcccgggaccagaacctggtcagcaggaacagctggtgtttggaagcggcgatgccgttgagcttagttgtcctccccctggaggcggaccaatgggacccacagtctgggttaaggacgggactggtctcgtgccttccgagcgggtacttgtggggcctcagcggctacaggtgctaaacgcaagtcatgaagactccggggcttatagctgccgccagcggttaactcagcgagtgctatgtcattttagcgttcgcgtgacagacgccccaagctccggggatgatgaggatggagaggatgaggcagaggacaccggtgtcgacacaggtgcaccctactggactcgaccagagagaatggataagaagctcctcgcagtgcctgccgctaatacagttcggtttcgttgtccagctgcaggcaaccctacccctagcattagctggctgaagaacggtcgggaatttagaggcgagcacaggataggcggaatcaaactgaggcaccagcagtggagcttagtgatggagtcggtagtaccgagtgatcggggaaattacacatgtgtggtggaaaacaagttcggatccatacgacagacatacacactggacgtgttggaacgatcccctcatcgtcccatcctgcaagctggcttaccagcaaaccagacagccgttcttgggtccgacgtggaattccactgtaaggtctattctgatgcacagccacacatacaatggttaaaacacgtggaggtcaatggcagcaaggtgggacccgacggaacgccgtatgttacagtgctcaaaagttggatatctgaatctgtggaagccgacgtccgcctgcggctcgcaaatgtgtctgaaagggacggcggagaatacctgtgcagagctacaaacttcatcggcgtagcagaaaaagcattttggctgagtgtgcacggccctagggctgcagaggaagagctagttgaggccgacgaggcgggttctgtgtatgcgggaattctttcttacggggtcgggttctttctgtttattttagtcgtggccgctgttacgctttgtcgactgcggagcccgcctaaaaagggactcggaagccctacagttcataaaataagtcgatttccacttaagagacaagtgtcgttggaatccaacgccagcatgagctctaatacccctcttgtgcgcatcgctaggctctcttccggggaaggaccgactctggcaaacgtgagcgaattggagctcccagccgatccaaagtgggagttgtctcgcgcacgcctgaccctgggaaagcccctcggcgaaggctgttttggccaagtggtaatggctgaggccattggcattgataaagaccgggcagcaaagcccgtcaccgtcgccgtgaagatgcttaaagatgatgctaccgataaggacctgtcagacctggtctctgagatggaaatgatgaaaatgataggaaaacataaaaacatcattaatttgctaggtgcctgtacacaagggggacccttatacgtgctggtagagtacgcagccaaggggaatcttcgggaatttttaagggcaaggcggccaccaggcctggactatagctttgacacatgtaaaccccctgaggagcagttgaccttcaaagatctggtgagttgtgcctaccaggtcgccaggggaatggagtacttggcctctcagaaatgcatccaccgggacctggccgctcgaaacgtactagtgactgaggataacgtgatgaagatcgcagacttcggactcgctcgggacgtacataatctagattactataagaagacaactaatggtcgcctgcccgtcaaatggatggctcccgaagccctctttgatagggtgtatactcaccagtccgacgtctggagctttggagtgctgctgtgggagattttcactttgggaggaagcccatatccaggcatccctgtggaagagttgttcaaactgctgaaagagggccacagaatggacaagcctgccaactgtactcatgatctttacatgattatgcgggagtgttggcacgccgcaccatctcagcggcctactttcaagcagcttgtggaagatctagacagggtgcttactgtcacctctactgacgaatacctcgatctgtccgcgccttttgagcagtattcccctggcggtcaggacactcctagctccagttcaagcggcgacgattccgtcttcgctcatgatctgttgccaccagcgccaccttcctcgggcggaagcaggacctag

SEQ ID NO: 61843 - protein, 258 aa, Artificial Sequence
  derived and/or modified sequence
  misc_feature (1)..(1): Xaa can be any naturally occurring amino acid
XSLETGVGDQCRKEFTDLMTEMTDLSSDLEGSGIPFLDYRTYAERAFFPGHGGCPLQPKPEGPGEDGHCATVRQGLTQLSNLLNSKLFLLTLIHTLEEQPSFSQRDRCHVASLLSLALHGKLEYLTDIMRTLLGDLAAHYVHRNPKLMLRRTETMVEKLLTNWLSICLYAFLREVAGEPLYMLFRAIQYQVDKGPVDAVTEWRSGLAGHLTLSDEDLTSVTQNHWKRLNTLQHYKVPDGATVGLVPQLHRGSTISQSL

SEQ ID NO: 61844 - protein, 163 aa, Artificial Sequence
  derived and/or modified sequence
  misc_feature (1)..(1): Xaa can be any naturally occurring amino acid
XKRTLNDSRLLREDVEFQPLTLMVLVGPGAGGAAGSSEMQRVPARVLDTDTITQVKEKVLDQVYKGTPFSQRPSVHALDLEWRSGLAGHLTLSDEDLTSVTQNHWKRLNTLQHYKVPDGATVGLVPQLHRGSTISQSLAQRCPLGESESLGPDLGPLESRLGR

SEQ ID NO: 61845 - protein, 1562 aa, Artificial Sequence
  derived and/or modified sequence
MCHAAQETPLLHHFMDSPESYPCGDEHTPSPIAGRQPLEVQPLLKLGQPVSAVAALQADGHMIAFLGDTQGQLYKVFLHGSQGQVYHSQQVGPPGSAISPDLLLDSSGSHLYVLTAHQVDRIPVAACPQFPDCASCLQAQDPLCGWCVLQGRCTRKGQCGRAGQLNQWLWSYEEDSHCLHIQSLLPGHHPRQEQGQVTLSVPRLPILDADEYFHCAFGDYDSLAHVEGPHVACVTPPQDQVPLNPPGTDHVTVPLALMFEDVTVAATNFSFYDCSAVQALEAAAPCRACVGSIWRCHWCPQSSHCVYGEHCPEGERTIYSAQEVDIQVRGPGACPQVEGLAGPHLVPVGWESHLALRVRNLQHFRGLPASFHCWLELPGELRGLPATLEETAGDSGLIHCQAHQFYPSMSQRELPVPIYVTQGEAQRLDNTHALYVILYDCAMGHPDCSHCQAANRSLGCLWCADGQPACRYGPLCPPGAVELLCPAPSIDAVEPLTGPPEGGLALTILGSNLGRAFADVQYAVSVASRPCNPEPSLYRTSARIVCVTSPAPNGTTGPVRVAIKSQPPGISSQHFTYQDPVLLSLSPRWGPQAGGTQLTIRGQHLQTGGNTSAFVGGQPCPILEPVCPEAIVCRTRPQAAPGEAAVLVVFGHAQRTLLASPFRYTANPQLVAAEPSASFRGGGRLIRVRGTGLDVVQRPLLSVWLEADAEVQASRAQPQDPQPRRSCGAPAADPQACIQLGGGLLQCSTVCSVNSSSLLLCRSPAVPDRAHPQRVFFTLDNVQVDFASASGGQGFLYQPNPRLAPLSREGPARPYRLKPGHVLDVEGEGLNLGISKEEVRVHIGRGECLVKTLTRTHLYCEPPAHAPQPANGSGLPQFVVQMGNVQLALGPVQYEAEPPLSAFPVEAQAGVGMGAAVLIAAVLLLTLMYRHKSKQALRDYQKVLVQLESLETGVGDQCRKEFTDLMTEMTDLSSDLEGSGIPFLDYRTYAERAFFPGHGGCPLQPKPEGPGEDGHCATVRQGLTQLSNLLNSKLFLLTLIHTLEEQPSFSQRDRCHVASLLSLALHGKLEYLTDIMRTLLGDLAAHYVHRNPKLMLRRTETMVEKLLTNWLSICLYAFLREVAGEPLYMLFRAIQYQVDKGPVDAVTGKAKRTLNDSRLLREDVEFQPLTLMVLVGPGAGGAAGSSEMQRVPARVLDTDTITQVKEKVLDQVYKGTPFSQRPSVHALDLEWRSGLAGHLTLSDEDLTSVTQNHWKRLNTLQHYKVPDGATVGLVPQLHRGSTISQSLAQRCPLGENIPTLEDGEEGGVCLWHLVKATEEPEGAKVRCSSLREREPARAKAIPEIYLTRLLSMKGTLQKFVDDTFQAILSVNRPIPIAVKYLFDLLDELAEKHGIEDPGTLHIWKTNSLLLRFWVNALKNPQLIFDVRVSDNVDAILAVIAQTFIDSCTTSEHKVGRDSPVNKLLYAREIPRYKQMVERYYADIRQSSPASYQEMNSALAELSGNYTSAPHCLEALQELYNHIHRYYDQIISALEEDPVGQKLQLACRLQQVAALVENKVTDL

SEQ ID NO: 61846 - protein, 1932 aa, Artificial Sequence
  derived and/or modified sequence
MELTPASSLTCSLLSPRLPGSFPQLRRVPPCSRPWLPKAPVMARWPPFGLCLLLLLLSPPPLPLTGAHRFSAPNTTLNHLALAPGRGTLYVGAVNRLFQLSPELQLEAVAVTGPVIDSPDCVPFRDPAECPQAQLTDNANQLLLVSSRAQELVACGQVRQGVCETRRLGDVAEVLYQAEDPGDGQFVAANTPGVATVGLVVPLPGRDLLLVARGLAGKLSAGVPPLAIRQLAGSQPFSSEGLGRLVVGDFSDYNNSYVGAFADARSAYFVFRRRGARAQAEYRSYVARVCLGDTNLYSYVEVPLACQGQGLIQAAFLAPGTLLGVFAAGPRGTQAALCAFPMVELGASMEQARRLCYTAGGRGPSGAEEATVEYGVTSRCVTLPLDSPESYPCGDEHTPSPIAGRQPLEVQPLLKLGQPVSAVAALQADGHMIAFLGDTQGQLYKVFLHGSQGQVYHSQQVGPPGSAISPDLLLDSSGSHLYVLTAHQVDRIPVAACPQFPDCASCLQAQDPLCGWCVLQGRCTRKGQCGRAGQLNQWLWSYEEDSHCLHIQSLLPGHHPRQEQGQVTLSVPRLPILDADEYFHCAFGDYDSLAHVEGPHVACVTPPQDQVPLNPPGTDHVTVPLALMFEDVTVAATNFSFYDCSAVQALEAAAPCRACVGSIWRCHWCPQSSHCVYGEHCPEGERTIYSAQEVDIQVRGPGACPQVEGLAGPHLVPVGWESHLALRVRNLQHFRGLPASFHCWLELPGELRGLPATLEETAGDSGLIHCQAHQFYPSMSQRELPVPIYVTQGEAQRLDNTHALYVILYDCAMGHPDCSHCQAANRSLGCLWCADGQPACRYGPLCPPGAVELLCPAPSIDAVEPLTGPPEGGLALTILGSNLGRAFADVQYAVSVASRPCNPEPSLYRTSARIVCVTSPAPNGTTGPVRVAIKSQPPGISSQHFTYQDPVLLSLSPRWGPQAGGTQLTIRGQHLQTGGNTSAFVGGQPCPILEPVCPEAIVCRTRPQAAPGEAAVLVVFGHAQRTLLASPFRYTANPQLVAAEPSASFRGGGRLIRVRGTGLDVVQRPLLSVWLEADAEVQASRAQPQDPQPRRSCGAPAADPQACIQLGGGLLQCSTVCSVNSSSLLLCRSPAVPDRAHPQRVFFTLDNVQVDFASASGGQGFLYQPNPRLAPLSREGPARPYRLKPGHVLDVEGEGLNLGISKEEVRVHIGRGECLVKTLTRTHLYCEPPAHAPQPANGSGLPQFVVQMGNVQLALGPVQYEAEPPLSAFPVEAQAGVGMGAAVLIAAVLLLTLMYRHKSKQALRDYQKVLVQLESLETGVGDQCRKEFTDLMTEMTDLSSDLEGSGIPFLDYRTYAERAFFPGHGGCPLQPKPEGPGEDGHCATVRQGLTQLSNLLNSKLFLLTLIHTLEEQPSFSQRDRCHVASLLSLALHGKLEYLTDIMRTLLGDLAAHYVHRNPKLMLRRTETMVEKLLTNWLSICLYAFLREVAGEPLYMLFRAIQYQVDKGPVDAVTGKAKRTLNDSRLLREDVEFQPLTLMVLVGPGAGGAAGSSEMQRVPARVLDTDTITQVKEKVLDQVYKGTPFSQRPSVHALDLEWRSGLAGHLTLSDEDLTSVTQNHWKRLNTLQHYKVPDGATVGLVPQLHRGSTISQSLAQRCPLGENIPTLEDGEEGGVCLWHLVKATEEPEGAKVRCSSLREREPARAKAIPEIYLTRLLSMKGTLQKFVDDTFQAILSVNRPIPIAVKYLFDLLDELAEKHGIEDPGTLHIWKTNSLLLRFWVNALKNPQLIFDVRVSDNVDAILAVIAQTFIDSCTTSEHKVGRDSPVNKLLYAREIPRYKQMVERYYADIRQSSPASYQEMNSALAELSGNYTSAPHCLEALQELYNHIHRYYDQIISALEEDPVGQKLQLACRLQQVAALVENKVTDL

SEQ ID NO: 61847 - DNA, 531 bp, Artificial Sequence
  derived and/or modified sequence
taggcctcacaggggaccctgcagaagtttgtggatgacacatttcaggcgattctgtctgtgaatcgacctattcccatcgccgttaagtatctctttgacttgctcgatgagctggccgaaaagcacgggatagaggatcctggtactttgcacatctggaagaccaactctctgctcctgagattctgggtgaacgccctgaaaaatcctcaattaatctttgacgtgcgcgtttcagacaatgttgacgcaatactggcagttatcgcccaaacgttcatcgattcctgcaccactagcgagcacaaggtagggcgggtcagagccgtccccgcagcagcagccgggcgggggctaagacgaaagggcctatggggaaagccccgcggtctgtgcacagaactctgggtggggtcaggctccattatgggtgcacctagtcctccctccagttgtctggcgccccccctgccgcccgagcaggactccccggttaataaactgctgtacgcacgcgagatcccatag

SEQ ID NO: 61848 - DNA, 492 bp, Artificial Sequence
  derived and/or modified sequence
tagaaaagaactctgaacgacagcaggctcctgcgggaagacgtcgaattccaacctctgaccctgatggtccttgtggggccaggagccggcggggcagcaggttcaagtgagatgcaaagagtccctgcgagagtgctggacacagacaccataacacaggtgaaggagaaggtgctcgatcaagtgtacaaaggcacacctttctcacagcgcccatctgtacatgctctggacctggagtggaggtctggcctggcgggacacttaaccttatcagacgaagacctgacgtcagtaacacagaatcattggaaacgactaaatactctgcaacactacaaagtgccagatggtgctactgttggattggttccacagttgcaccgcggcagtacgatctcccaaagccttgctcagcggtgcccgctgggagagtcggaatccctaggacctgacctggggcccctggaaagtagactcgggcgatag

SEQ ID NO: 61849 - DNA, 5799 bp, Artificial Sequence
  derived and/or modified sequence
atggaactgactccagctagtagtctgacatgcagtctgctttctccgcgactgcccgggtcctttccccagctcaggcgggtgccaccttgctcaaggccctggcttcccaaggctcccgtgatggcccgctggcccccattcggcctgtgcctgttgcttttgctgctttcgcccccccccctgccactgaccggggcccacagattcagcgcccctaacacgactctgaaccacctggcactcgctccaggtagggggactttgtacgtgggcgccgtcaatcgactgttccaactctccccagagctacagctcgaagccgtggcggtaacggggccagtgatcgactctcccgactgcgtcccgtttcgggacccagcggagtgcccgcaggctcagctgaccgataacgccaatcaattgctcctcgtctctagcagagcccaggagctagtcgcttgtggccaggtcaggcaaggagtctgcgagactagacgcctgggggacgtagctgaagttctataccaggccgaagacccaggcgacggccagttcgtggccgctaacacacccggtgtggccacagtcggcctcgtggtccccctgccaggccgcgatctgctcctcgtggctcgggggctggcaggaaagctctctgctggtgttccacccctcgcaatccgtcagctcgctggaagtcagcctttctcaagcgagggcttaggtaggctcgtcgtgggcgactttagcgattataataacagctatgtgggcgctttcgctgatgcccggtccgcttatttcgtcttccgtcgaaggggcgccagggcccaggccgaatatcgctcttatgtagctagggtgtgccttggggacactaacctgtacagctacgtcgaagtccccctggcctgtcagggccagggattgattcaagccgcatttctcgctccgggcactctgctcggcgtctttgctgcgggcccccgtgggactcaggccgccttatgtgcctttcctatggttgaactgggcgcctccatggaacaggctaggcgcttatgttacactgcagggggacgtgggccttctggcgccgaagaggcaacagtggagtatggggtgactagtcgatgcgtgacgctgccgctcgatagtccagagtcttacccttgcggtgatgagcacacgccaagtcctatcgctgggagacagcctcttgaggtgcagcccttgctcaagctcgggcagccggttagtgccgtggcggcactgcaagccgacggacacatgatcgccttcctcggcgatacccagggccaactgtataaagtattcctgcatggcagccaaggtcaagtctatcatagtcagcaagtgggcccgccgggtagcgctatttcgcctgatcttttactggactcttccggaagccatctctacgtgctgactgcacaccaagtggataggatccccgtggctgcctgcccgcaattccctgactgtgcctcatgtctacaggcccaggatcctctatgtggctggtgtgtgctgcaagggagatgcacccgaaagggtcaatgcgggagagccggccagcttaaccagtggttatggtcctacgaagaggacagtcactgcctgcatattcagtcactactacccggacatcacccccgccaggaacagggacaggtcaccttaagcgtgccaaggctgcctattcttgatgcggatgagtacttccattgcgccttcggcgactatgacagtttagcccacgttgagggcccgcatgttgcttgtgtgactcctccacaggatcaggtgccattgaatccgccagggacggatcacgtcaccgtgcccctggcactgatgttcgaagatgtaacagtggccgctacaaacttctcattctacgactgttccgctgtccaagcgctggaggctgctgccccttgccgagcctgcgtgggaagcatctggcgctgccactggtgtccacagtcctcccactgcgtttatggcgagcactgccctgagggcgagcgcactatctattccgcgcaagaagtggatattcaggttcggggcccaggagcctgtccccaggtcgaaggtcttgcaggcccccacctggtgcccgtggggtgggagtctcatctggccttacgggtcagaaacttgcagcatttccggggcctccctgcgtccttccattgctggctcgaactgcccggggagctgagaggcctgcccgccacgctggaagagactgccggagatagcggcctgatccattgtcaagcccatcagttctacccctcaatgagccagcgcgagctgcctgtccccatatacgtcacccagggggaggcccaaaggctcgataacacccacgctctgtacgtcatcctgtacgactgtgccatgggccacccagactgctcccattgccaagctgcaaatcggtcacttggatgcctgtggtgcgccgacggccagccagcttgtagatacggcccactctgcccacctggagctgtcgaactcctctgtccggctccaagcatagacgccgtcgagcccttaactgggcctcccgagggtggcctggcactgactatcctagggtcaaatctcggacgggcattcgcagatgtgcagtacgcagtgtcagtcgcgagtcgcccttgtaacccagaaccatctctttatcgaaccagcgcaagaattgtgtgcgtgacctctcccgccccaaacggtacaacaggtcctgtgagggtggccatcaagtcacagcctccaggaatcagcagtcaacacttcacctatcaggatcccgtccttctgtccctgtctccccgctggggtccccaagcaggtggcacacaacttaccatccggggccagcatctgcaaacaggcgggaataccagcgcgtttgttggagggcaaccttgtcctatcctggagcccgtctgtcccgaagcaatcgtctgccgaacacgaccccaagcagcgcccggagaggctgccgtactggtagtgttcgggcatgcccaacgcacattgctggccagccctttcagatatacagctaacccccagctcgtggcagccgagcctagcgcctcctttcggggcggtgggcggttgataagagtcagagggactggactggatgtggtacaaaggccgctgctgagcgtctggcttgaggccgacgctgaggtgcaagctagtcgagcccaaccccaggatccccagccgcgccggtcttgtggggcccctgctgcagaccctcaggcatgtatccaactggggggcggactattacagtgctcgaccgtttgctctgtgaacagttcgtccctgcttttatgtaggagtcctgccgtccctgaccgcgcacatccacaacgagtcttttttacattggacaatgtgcaggtcgacttcgctagcgcttccggcgggcaggggttcctctatcagcccaaccctagactcgccccacttagtcgcgagggacctgctcggccgtatagactgaagcccggccacgtccttgacgtggagggcgagggccttaacctgggcatatcaaaggaggaggtgagagtgcatattggtcgaggcgagtgcttggtgaagaccctcaccaggacgcacctctattgtgaacccccagcccacgctccccagcccgcaaacggcagcggactgcctcagttcgtggtgcagatgggcaatgtgcagctggcccttggtcctgttcaatatgaagccgaacctcccttatcggcgtttccagtggaggctcaggccggcgtagggatgggagccgccgtactgatcgcagcagttttattgttgaccttaatgtacaggcataaatctaagcaagcattaagagattaccaaaaagttcttgtgcagctcgaatctttggaaaccggcgtgggagaccagtgcaggaaagagttcacagatttaatgaccgaaatgacagatctttcgagcgatttagaaggatccggtatcccctttctggactatcgtacatacgcagaacgtgcatttttcccaggccacggaggatgcccccttcaaccgaaacctgagggtcctggagaggacggtcactgcgccacggtgaggcaggggttgacacaactgtcaaacctgctgaacagtaagctgtttctgttaactctgatccacactctagaggagcagccctctttttcccagagggatcgttgtcatgtcgcctcactgttgtcccttgccctccacggcaaactggagtacctgaccgatatcatgagaactctgctgggcgacctggccgcccattatgtgcacagaaatcctaaactcatgctcagaaggaccgaaacaatggtggagaagctcctcaccaactggctttcaatttgtttatacgcattcctccgtgaagtggcgggcgagccattatatatgttattccgggctatccagtaccaggtcgacaagggccctgtcgacgctgtcacgggcaaggccaaacgtacactcaatgattcccggctactgcgggaggatgttgaattccagccactaactttaatggtgctggtgggcccaggagcaggcggggccgcgggatccagcgagatgcagagggtgcccgcaagggtactagacacagataccattacacaagttaaagagaaggtgctcgaccaggtatacaaagggacaccattctctcagcggcctagtgtgcacgcacttgatttagaatggagatccgggttagccggccacctcaccttgagtgacgaagacttgacctctgtcacacaaaatcattggaaaaggctgaataccctgcagcattataaggtcccagatggagcgaccgtcggcctggtgccccagcttcaccgcggcagtaccatctctcagagcctcgcccaaaggtgcccgcttggagagaacattcccacacttgaggacggagaagagggaggagtctgtctgtggcacttggttaaggcgacggaggaacctgaaggagcgaaagtccggtgttcttccttaagagagagggagcctgcaagagcaaaagcaatccctgaaatttatctgacccggttgctgagcatgaaaggcacactgcagaagtttgtggatgacactttccaggccatactatcagtgaatagacccataccaatcgccgtcaagtatttatttgatttactggacgaattagcggaaaaacacggcatagaggaccccggaactcttcacatttggaagacaaatagtctgttactgcggttctgggtcaacgcattaaaaaatccacagctgatctttgacgtgagggtctctgacaatgtcgatgctattctagccgtgatcgcccagacattcattgactcctgtacaacaagcgaacacaaagtggggcgagacagtcccgtcaacaagctgctctacgcaagggaaattccgcgatataaacagatggtcgagcgctattacgctgatattcgacagagctcgccagcatcctatcaggaaatgaattctgcgctggctgagctatccggaaattacaccagcgcaccccattgcctggaagctttacaggagttgtataatcatatccataggtattatgaccaaattatttctgccctcgaagaggatcccgtgggccagaagcttcagcttgcgtgccggcttcaacaggtggcggccctcgtagagaataaagtcactgacctgtag

SEQ ID NO: 61850 - DNA, 531 bp, Artificial Sequence
  derived and/or modified sequence
tgagccagccagggcaccctgcagaagtttgtggatgacaccttccaggccatcctgtctgtgaaccggcccatccccatcgctgtgaagtacctgtttgacctgctggatgagctggccgagaagcatggaattgaggaccccggcaccctgcacatctggaagaccaacagcctgctgctgcgcttctgggtgaatgccctgaagaacccccagctgatctttgatgtgcgggtgtctgacaacgtggatgccatcctggccgtcatcgcccagaccttcatcgacagctgcaccaccagcgagcacaaggtgggccgggtgcgggctgtgcctgctgctgctgctggccggggcctgcggaggaagggcctgtggggcaagccccggggcctgtgcacagagctgtgggtgggcagcggcagcatcatgggcgcccccagcccccccagcagctgcctggccccacccctgcccccagagcaggacagccctgtgaacaagctgctgtatgcccgggagatcccctag

SEQ ID NO: 61851 - DNA, 492 bp, Artificial Sequence
  derived and/or modified sequence
tgaaaaagaaccctgaatgacagccggctgctgagagaagatgtggagttccagcccctgaccctgatggtgctggtgggccctggggccggcggggccgccggcagcagcgagatgcagagggtgcctgcccgggtgctggacacagacaccatcacccaggtgaaggagaaggtgctggaccaggtgtacaagggcacccccttcagccagaggcccagcgtgcacgccctggacctggagtggaggagcggcctggccggccacctgaccctgagtgatgaggacctgacctctgtgacccagaaccactggaagaggctgaacaccctgcagcactacaaggtgcctgatggagccaccgtgggcctggtgccccagctgcaccggggcagcaccatcagccagagcctggcccagcgctgccccctgggggagagcgagagcctgggccctgacctgggccccctggagagccggctgggccgctag

SEQ ID NO: 61852 - DNA, 5799 bp, Artificial Sequence
  derived and/or modified sequence
atggagctgaccccagccagcagcctgacctgcagcctgctgagcccccggctgcccggcagcttcccccagctgcggcgggtgcccccctgcagccggccctggctgcccaaggcccctgtgatggcccgctggccacccttcggcctgtgcctgctgctgctgctgctgagccccccacccctgcccctgactggagcccaccgcttcagcgcccccaacaccaccctgaaccacctggccctggcccctggccggggcaccctgtatgtgggcgctgtgaacagactcttccagctgagccctgagctgcagctggaggccgtggccgtgacaggccctgtgattgacagcccagactgtgtgcccttccgggaccctgcagaatgtccccaggcccagctgacagacaatgccaaccagctgctgctggtgagcagccgggcccaggagctggtggcctgtggccaggtgcggcagggcgtgtgtgagacccggcggctgggagatgtggccgaggtgctgtaccaggctgaagatcctggagatggccagtttgtggccgccaacaccccaggagtggccaccgtgggcctggtggtgcccctgcccggccgggacctgctgctggtggcccggggcctggccggcaagctgtctgctggggtgccccccctggccatccggcagctggccggcagccagcccttcagcagcgagggcctgggccgcctggtggtgggggacttcagtgactacaacaacagctatgtgggcgcctttgctgatgcccggagcgcctactttgtgttcagaagaagaggagcccgggcccaggccgagtaccgctcctatgtggcccgggtgtgcctgggggacaccaacctgtacagctatgtggaggtgcccctggcctgccagggccagggcctcatccaggccgccttcctggcccctggcaccctgctgggcgtgtttgctgctggcccccggggcacccaggccgccctgtgtgccttccccatggtggagctgggcgcctccatggagcaggcccggcggctgtgctacacagctgggggccggggccccagcggggctgaggaggccaccgtggagtatggagtgaccagccgctgtgtgaccctgcccctggacagccctgagagctacccctgtggagatgagcacacccccagccccatcgccggccggcagcccctggaggtgcagcccctgctgaagctgggccagcctgtgtctgctgtggccgccctgcaggctgatggccacatgattgccttcctgggggacacccagggccagctgtacaaggtgttcctgcacggcagccagggccaggtgtaccacagccagcaggtgggccccccaggcagcgccatcagcccagacctgctgctggacagcagcggcagccacctgtatgtgctgacagcccaccaggtggaccgcatccctgtggccgcctgcccccagttcccagactgtgccagctgcctgcaggcccaggaccccctgtgtggctggtgtgtgctgcagggccgctgcaccaggaagggccagtgtggccgggccggccagctgaaccagtggctgtggagctatgaggaggacagccactgcctgcacatccagagcctgctgcccggccaccacccccggcaggagcagggccaggtgaccctgtctgtgccccggctgcccatcctggatgctgatgagtacttccactgtgcctttggagactatgacagcctggcccacgtggagggcccccacgtggcctgtgtgaccccaccccaggaccaggtgcccctgaaccccccaggcacagaccacgtgacagtgcccctggccctgatgtttgaagatgtgacagtggccgccaccaacttctccttctatgactgcagcgctgtgcaggccctggaggccgccgccccctgccgggcctgtgtgggcagcatctggcgctgccactggtgcccccagagcagccactgtgtgtatggagagcactgcccagagggggagaggaccatctacagcgcccaggaggtggacatccaggtgcggggccctggggcctgcccccaggtggagggcctggccggcccccacctggtgcctgtgggctgggagagccacctggccctgcgggtgaggaacctgcagcacttccggggcctgcctgccagcttccactgctggctggagctgcccggggagctgcggggcctgcctgccaccctggaggagacagctggggacagcggcctcatccactgccaggcccaccagttctaccccagcatgagccagcgggagctgcctgtgcccatctacgtgacccagggcgaggcccagaggctggacaacacccacgccctgtatgtgatcctgtatgactgtgccatgggccacccagactgcagccactgccaggccgccaacagaagcctgggctgcctgtggtgtgctgatggccagcctgcctgccgctatggccccctgtgccccccaggagctgtggagctgctgtgcccagcccccagcattgatgctgtggagcccctgactggacctcctgagggcggcctggccctgaccatcctgggcagcaacctgggccgggcctttgctgatgtgcagtatgctgtgtctgtggccagccggccctgcaaccctgagcccagcctgtaccgcaccagcgcccgcatcgtgtgtgtgaccagccctgccccaaatggcaccaccggccctgtgcgggtggccatcaagagccagcccccaggcatcagcagccagcacttcacctaccaggaccctgtgctgctgagcctgagcccccgctggggcccccaggccggcggcacccagctgaccatccggggccagcacctgcagacaggaggcaacaccagcgcctttgtgggcggccagccctgccccatcctggagcctgtgtgcccagaggccatcgtgtgcaggacccggccccaggccgcccctggagaggccgctgtgctggtggtgtttggccacgcccagaggaccctgctggccagccccttccgctacacagccaacccccagctggtggccgctgagcccagcgccagcttccggggcggcggccgcctcatccgggtgcggggcaccggcctggatgtggtgcagaggcccctgctgtctgtgtggctggaggctgatgctgaggtgcaggccagccgggcccagccccaggacccccagccccggcgcagctgtggggccccagctgctgacccccaggcctgcatccagctgggcggcggcctgctgcagtgcagcacagtgtgcagcgtgaacagcagcagcctgctgctgtgccgcagccctgctgtgcctgaccgggcccacccccagagggtcttcttcaccctggacaacgtgcaggtggactttgccagcgccagcggcggccagggcttcctgtaccagcccaacccccggctggcccccctgagccgggagggccctgcccggccctaccgcctgaagccaggccacgtgctggatgtggagggggagggcctgaacctgggcatcagcaaggaggaggtgcgggtgcacatcggcagaggagaatgtctggtgaagaccctgaccaggacccacctgtactgtgagcccccagcccacgccccccagcctgccaatggaagtggcctgccccagtttgtggtgcagatgggaaatgtgcagctggccctgggccctgtgcagtatgaggccgagccccccctgagcgccttccctgtggaggcccaggccggcgtgggcatgggcgctgctgtgctgattgctgctgtgctgctgctgaccctgatgtaccgccacaagagcaagcaggccctgcgggactaccagaaggtgctggtgcagctggagagcctggagaccggggtgggggaccagtgcaggaaggagttcacagacctgatgacagagatgacagacctgagcagtgacctggagggcagcggcatccccttcctggactaccgcacctacgccgagcgggccttcttccctggccacggcggctgccccctgcagcccaagccagagggccctggagaagatggccactgtgccaccgtgcggcagggcctgacccagctgagcaacctgctgaacagcaagctgttcctgctgaccctcatccacaccctggaggagcagcccagcttcagccagagggaccgctgccacgtggccagcctgctgagcctggccctgcacggcaagctggagtacctgacagacatcatgaggaccctgctgggggacctggccgcccactacgtgcacaggaaccccaagctgatgctgcggaggacagagaccatggtggagaagctgctgaccaactggctgagcatctgcctgtatgccttcctgcgggaggtggccggggagcccctgtacatgctgttccgggccatccagtaccaggtggacaagggccctgtggatgctgtgacaggcaaggccaagaggaccctgaatgacagccggctgctgcgggaggatgtggagttccagcccctgaccctgatggtgctggtgggccctggagctggaggagctgctggcagcagcgagatgcagagggtgcctgcccgggtgctggacacagacaccatcacccaggtgaaggagaaggtgctggaccaggtgtacaagggcacccccttcagccagaggccttctgtgcacgccctggacctggagtggaggagcggcctggccggccacctgaccctgagtgatgaggacctgacctctgtgacccagaaccactggaagaggctgaacaccctgcagcactacaaggtgcctgatggagccaccgtgggcctggtgccccagctgcaccggggcagcaccatcagccagagcctggcccagcgctgccccctgggggagaacatccccaccctggaggatggagaggagggcggcgtgtgcctgtggcacctggtgaaggccacagaggagcctgagggcgccaaggtgcgctgcagcagcctgcgggagcgggagcccgcccgggccaaggccatccctgagatctacctgacccggctgctgtccatgaagggcaccctgcagaagtttgtggatgacaccttccaggccatcctgtctgtgaaccggcccatccccatcgctgtgaagtacctgtttgacctgctggatgagctggccgagaagcacggcattgaagatcctggcaccctgcacatctggaagaccaacagcctgctgctgcgcttctgggtgaatgccctgaagaacccccagctgatctttgatgtgcgggtgtctgacaacgtggatgccatcctggccgtgattgcccagaccttcatcgacagctgcaccaccagcgagcacaaggtgggccgggacagccctgtgaacaagctgctgtatgcccgggagatcccccgctacaagcagatggtggagcgctactatgctgacatccggcagagcagccctgccagctaccaggagatgaacagcgccctggccgagctgagcggcaactacaccagcgccccccactgcctggaggccctgcaggagctgtacaaccacatccaccgctactatgaccagatcatcagcgccctggaggaggaccctgtgggccagaagctgcagctggcctgccgcctgcagcaggtggccgccctggtggagaacaaggtgacagacctgtag

SEQ ID NO: 61853 - DNA, 531 bp, Artificial Sequence
  derived and/or modified sequence
tgagccagccagggcaccctgcagaagttcgtggacgacaccttccaggccattctctctgttaatagacccatccctatcgccgttaagtatctctttgatctgctcgatgagctcgccgagaaacatgggatcgaagaccccggcaccctccacatttggaaaaccaattctctcctcttacgcttctgggtgaacgccctgaaaaacccccagctaatttttgatgtccgggttagtgacaacgtcgacgcgattctggctgtaattgcacaaactttcatcgattcctgcacaacctcagaacacaaggtcgggagagtgagggctgtgcctgccgcagccgcaggcagaggtctacgtcgcaaaggcctgtggggtaaaccgcgcggcctgtgtacagagctttgggtcggctccggatccataatgggagcgccgtctccaccttctagctgcctggccccgccccttccccccgagcaggactctcctgtcaataagctcctgtacgctcgggagattccttag

SEQ ID NO: 61854 - DNA, 492 bp, Artificial Sequence
  derived and/or modified sequence
tgaaagcggaccctgaacgacagccggctgctgcgggaggacgtggagtttcagccactgacgttgatggttctggtgggacccggagccggcggagctgccggatcctcggagatgcagagggtccctgcgagggtcttggataccgatacgatcacgcaagtaaaggaaaaagttctggatcaagtgtacaaagggacacctttcagccagaggccgagcgttcacgccttagacttagaatggagaagcggcttggcgggacacctgaccttgagcgacgaggatctcacctccgttacccaaaatcactggaagcggctgaacaccctccagcactataaagtgcctgacggcgccactgtaggccttgtgccgcaactgcaccgaggatccactattagtcagtcccttgctcagcggtgccctctgggcgaaagcgagtctctggggcctgatcttggccctctcgaaagtcgtttgggccgctag

SEQ ID NO: 61855 - DNA, 5799 bp, Artificial Sequence
  derived and/or modified sequence
atggagctgacccccgccagcagcctgacctgcagcctgctgagcccaaggttgccgggatcctttccccagttgcgacgcgtgcctccatgcagccgcccatggcttcctaaggccccggtgatggccagatggccccccttcgggctctgcctcctgctgctgctgctgtcaccgccccccctgcctctaactggagcccataggtttagcgcgccaaacaccacactgaaccacctggcattagcgcctggacgcgggactctctatgtgggagcagtcaaccgtctgttccagctgagtcctgaactccagctagaagccgtcgcagttacaggccctgtgattgattccccggattgcgtccccttccgggatccagctgaatgtccccaggcgcagttaacagataacgcaaatcagctacttctggtttcttccagggcccaggaattggtggcctgtgggcaggtacggcagggagtttgtgagactcgaagactgggggatgttgcggaggtactctatcaggctgaagaccccggcgacgggcagttcgtcgccgccaacacaccaggcgttgccactgttgggctggttgtgcctttgcctggacgggaccttttgctcgtggcccgcggtctcgccggcaagctgtcagcaggagtgccaccccttgctataagacagcttgcagggtctcagcctttctcttctgaaggattggggcggttggtcgttggcgacttctccgactataacaactcatacgtaggcgcttttgctgacgcacgaagtgcatattttgtcttcagaagacgaggcgcgcgtgcccaggcagaatacaggtcgtatgtggccagggtgtgtctgggagacacgaacctgtactcctatgtcgaggtccctctggcctgccagggccaggggctaatccaggctgcttttctggcaccaggtaccctgttgggagtgttcgctgcgggtccaagaggcacccaggccgcactgtgtgcctttcctatggtggaattgggcgcctccatggaacaggcgcggcgcctatgctatactgccggcggacggggaccctctggagctgaagaggctaccgtggaatacggcgttactagccggtgtgtgaccctcccactcgactcacctgaatcctatccctgtggggacgaacacacccctagcccaatcgccgggagacaaccgctggaggtgcagcctctgctcaagctgggacagccggtgtcagcagtggcggccctccaggccgatggacacatgatcgcctttctgggggatacccagggacagttatacaaagtttttctgcatgggtcccagggccaagtgtatcatagccaacaggttgggccacccggttccgcgatatcccctgatttactgcttgacagctccggcagccacttatacgtgttgaccgcgcatcaggtggatagaataccggtggcagcttgcccgcagttccccgactgcgccagctgcctccaggcacaagatcctctatgcggatggtgcgtgctccagggtaggtgtacacgtaaagggcagtgcggcagagccgggcagctgaaccagtggctttggagttatgaagaggactcacactgccttcacatccagtcattgctgcctggtcaccatccgagacaggagcagggccaagtgacgctctctgtcccacggttgcctattctcgacgcagacgagtactttcactgcgctttcggggactacgattcacttgctcacgttgagggcccccatgtggcctgtgtcaccccgccccaggatcaggtgcccctcaacccaccaggcactgatcatgtgactgtccccctggcgttgatgtttgaggacgtgacagtagcagctaccaatttttccttttatgattgctccgctgtgcaggccctcgaggctgcagccccatgccgggcctgtgtcgggtcgatctggcgctgtcattggtgcccccagtccagtcactgcgtgtacggcgagcactgtcccgagggcgagcgaacaatctactctgctcaggaggttgacatacaggtgagagggcccggggcctgccctcaggtggagggactggcaggcccccacctcgtgccagtgggctgggagagccatcttgcgttgcgggtgcggaatctgcagcactttagaggcctgccagctagcttccactgctggctagagctccctggcgagctacggggattgcctgctaccctggaagagaccgcgggcgattctggtctaatccactgccaggcccatcagttttatccatccatgtcccagagggagctgcccgtgccaatatacgttacccaaggggaagctcagcgccttgataatacccatgccctttatgttatcttgtacgactgcgcaatgggacaccctgattgttcacattgtcaggcagcaaaccgcagcctgggatgcctgtggtgtgcagacggccaaccggcctgcaggtatggccccctgtgcccccctggggcagttgagctactgtgtcctgcaccttccattgacgccgtcgaacccctcaccggtccacccgaaggcggtctggctctgacaatactgggatcaaacctgggccgtgcttttgccgacgtgcagtacgccgtcagtgtggccagtcgcccctgtaaccccgagccaagtctgtatagaacaagtgcacgcatagtatgcgtcacaagcccggccccgaatggtaccacgggtcccgtgcgcgtggctatcaaatcccaacctccaggcatttcttctcagcatttcacctatcaggaccccgtactgctctccctgtccccacgttggggcccgcaggccgggggtacacagttgactatccggggtcaacatctacaaaccggcggaaataccagcgccttcgtcgggggtcagccctgtcccattctggaaccagtgtgtcctgaggctattgtatgtcggacgcggccacaggctgcccccggagaggctgcagtgctggtggtgttcggccacgcccagaggacacttctcgcgagtcccttccgttacacggcaaacccgcaattggttgctgcagaaccaagcgcctcgttccgtggcggaggacgtctgatacgcgttcgcggcaccggactggatgtggtacagcggcccctgctgtcagtgtggctggaggcagacgccgaagtccaagcatctcgcgcgcaacctcaggacccacagccacgccggtcttgtggcgctccagctgctgatccccaggcttgtatccagctgggagggggcttactgcagtgttcgacagtgtgtagcgtcaattcttcctcactgctgttatgcaggtccccagcagttcccgaccgtgctcatccccagcgagtgtttttcacattggataacgtccaagttgacttcgcaagcgctagtggtggccagggattcctgtaccaacccaatccacgcctggcgccactgagccgtgagggtcccgctagaccctacaggcttaaacctggtcatgttctggatgtggagggtgaagggctcaatctgggtatcagcaaggaggaggtgagggtgcacatcggcagaggagagtgtttggtcaagaccctcaccagaactcacctgtattgcgagcccccggctcacgcacctcagcccgccaacggcagcggcctgccgcaatttgtggttcaaatgggaaacgtccagctcgccttaggcccagtgcaatacgaagccgagcctcccctttccgccttccctgtggaagctcaagcaggtgtagggatgggagccgcggtgttgattgccgccgtacttcttctcactctgatgtaccgtcacaagtcaaaacaggcactgcgggactatcagaaagtgctagtccagctggagagcctcgagactggagtgggcgatcagtgcagaaaggagttcacagacctcatgacagagatgaccgacttgtcatccgatctggaaggtagcgggatcccgttcctcgactatcggacttacgccgaaagggccttctttcctggacacggtggatgcccgctgcagcccaaacccgagggacccggtgaggacggacactgcgccactgttcggcagggcctcacacagctgtctaacctgctaaattccaaattattcctgcttactctgatccatacactcgaggagcagccaagttttagccagagagacaggtgtcacgttgcctcccttctttcgctcgccctccacggaaaactggaatatctcacggatatcatgcggaccctcttgggtgatctcgcggctcactacgtgcataggaacccaaagctcatgctgaggagaaccgaaacaatggttgaaaagctcctgacgaattggttgtctatatgtctatatgccttcttgcgagaagtggcgggcgagcctctttacatgctgttccgcgctatccagtaccaggttgataagggccccgtagatgcggtgactggcaaggccaaaagaacactaaacgattccagacttttacgagaggatgtggaatttcaacctctgaccttgatggtgttggttgggccaggagccggcggggccgccggcagcagtgaaatgcagcgggtccctgcgagggtgctcgatactgacacaatcacccaggtgaaggagaaagtcctagaccaggtttacaagggtacacctttttcacaacggccttctgtacatgcactggacttggagtggagatcgggcctggctggtcatctcaccctctctgacgaagacctgacttcagtgacccaaaatcattggaagcgtttaaacacattacagcattacaaagtgcccgatggcgcgacagtgggcctcgtgcctcagctgcatcgtgggtccacaataagtcagagtcttgcacaacgttgtcctcttggagagaacatacctacgctcgaagatggggaagagggtggtgtgtgcctatggcacctggtaaaagctaccgaggaaccggagggggcgaaggtgcggtgctcctctttgagagaacgagagcctgcacgcgccaaagcaatccctgagatctaccttacacggctactttcgatgaaagggacgttgcaaaaattcgtggatgacacttttcaggccatcctcagcgtgaaccggcccatacctatcgcagtgaagtatttgtttgatctgcttgacgaactggccgagaaacacggaatcgaggaccccgggaccttgcacatttggaagactaactctctgcttttacggttttgggtcaatgcacttaaaaaccctcagttaatctttgatgttcgggtgtccgataatgttgacgcgatccttgcggtgatagcacaaacattcatagactcctgcacaacatctgaacacaaagtggggcgggactcccctgtgaataagctgttgtacgcccgagaaattcctagatacaagcagatggtagagagatactacgccgatatccgacaaagcagccctgcatcctatcaggagatgaactcagctttagcagagttgtccggtaactatacttccgcaccgcactgcctcgaggctctgcaagaactgtacaatcatatccatcggtactatgaccaaattatttcggctttagaggaagatcccgtgggccagaagctccaattagcatgtaggctgcaacaggttgccgctctcgttgagaataaagtcaccgacctgtag

SEQ ID NO: 61856 - DNA, 526 bp, Artificial Sequence
  derived and/or modified sequence
ctgcctcgcagggcacgctgcagaagtttgtggacgacaccttccaggccattctcagcgtgaaccggcccatccccatcgccgtcaagtacctgtttgaccttctggatgagctagcagagaagcacggcatcgaggacccagggaccctgcacatctggaagaccaacagtctgctgctgcggttctgggtgaatgccttgaagaacccacagctcatctttgatgtacgggtgtcggacaatgtggacgccatccttgctgtcatcgcccagaccttcattgactcctgtaccacctcggagcataaagtgggccgggtgagagcagtgccagcagcagcagctggcaggggcttgaggaggaaaggcttatgggggaagcctagagggctgtgcacagagctctgggtgggcagtggcagcatcatgggggcaccttcacctccgagctcatgcctagcgcctcccctccctccggagcaggattccccagtgaacaaactgctctacgcccgggagatccc

SEQ ID NO: 61857 - DNA, 489 bp, Artificial Sequence
  derived and/or modified sequence
caaacggaccctgaatgatagccgcttgctgcgggaggacgtggagttccagcccctgacgctgatggtgctggtggggcccggggctggcggggccgcaggcagcagcgagatgcagcgcgtgccagcccgggtgctcgacacggacaccatcacccaggtcaaggagaaggtgttggaccaagtctacaagggcacccccttctcccagaggccctcagtgcatgccctagaccttgagtggcgctcaggcctggctggtcacctgaccctatcggacgaagacttgacctccgtgacccaaaaccactggaagagactcaacaccttgcaacactacaaggtcccagatggagcaacagtggggctcgtccctcagctgcaccgtggcagcaccatctcccagagcctggcccagaggtgccccttgggagagagtgagtccctcggccctgacctggggccactggagtccaggctgggcaggca

SEQ ID NO: 61858 - DNA, 6377 bp, Artificial Sequence
  derived and/or modified sequence
gatgagtcggactgggcacgattgcattgtggggagggaggctggggctctgtgagacgtgctcctggcaccgccagctgctacttggccctcgccggtggcccaccaggacaatgcccccccgcagccatctcatgcccatcgccactgccctggggcagctgaactgagcgtatgtgccacgccgcccaggagacccctctgctgcaccacttcatgcacccccgctgccttgccccagtgcttcctcgccctggagctgggcgccagcatggagctcacccctgcctcttcgctgacttgctccttgctcagcccgcggctgcctggctctttcccccagctgcggagggttcctccttgcagccggccctggctgcccaaggcccccgtgatggctcgctggcctcccttcggcctctgcctcctcctgctgctgctgtccccaccgccactgcccttgacaggggcccatcgcttctccgcacctaataccactctcaaccacttggcactggcacctggccgaggcacactctatgtcggcgcagtgaaccgcctcttccagctcagccccgagctgcagctcgaggccgtggctgtcactggccctgtaatcgacagccctgactgcgtgcccttccgtgacccagccgagtgcccacaggcccagctcactgacaatgccaaccagctgctgctggtgagcagccgcgcccaggagctggtggcctgcgggcaggtgcggcagggcgtgtgtgagacacggcgccttggggatgtggccgaggtgctgtaccaggctgaggaccctggtgacgggcagtttgtggctgccaataccccgggagtggcaacggtggggctggtggtgcccttgcccggccgggacctcctgcttgtggccagaggcctggcgggcaagctgtcggcaggggtgccacccctggccatccgccagctggccgggtctcagcccttctccagcgagggcctgggccgcctggtggtgggcgacttctccgactacaacaacagctacgtcggggcctttgccgacgcccgctccgcctacttcgtgttccgccgccgcggggcccgggcccaggctgagtaccgctcctacgtggcccgcgtctgcctgggggacaccaacctgtactcctacgtggaggtccccctcgcctgccagggccagggcctcatccaggccgccttccttgccccgggcaccttgctaggggtgtttgccgcgggcccaaggggcacccaggcggcgctctgtgccttccccatggtggagctgggtgccagcatggagcaggcccggagactctgctacacggcgggcggccggggccccagcggcgcagaggaagccaccgtggagtacggcgtcacgtcgcgctgcgtcaccctgccccttgattcccccgagtcgtacccctgtggcgacgagcacacccccagccccattgctggccgccagcccctggaggtccagcctctgctgaagctcgggcagccggtcagcgccgtggcagctctccaggcagatgggcacatgatagccttcctgggggacacccagggccagctgtacaaggtctttctccacggctcccagggccaggtttaccactcccagcaagtggggcctccaggctcagccatcagcccagacctgctgctggacagcagtggcagtcacctctatgtcctgactgcccaccaggtggaccggatacctgtggcagcctgcccccagttccctgactgtgccagctgcctccaggcccaggacccgctgtgtggctggtgtgtcctccagggcaggtgtacccggaagggccagtgcgggcgggcaggccagctgaaccagtggctgtggagttatgaggaggacagccactgcctgcacatccagagcctgctgccgggccaccacccccgccaggagcagggccaggtcactttgtctgtcccccggctgcccatcctggatgcagatgaatacttccattgtgcgttcggggactatgacagcttggctcatgtggaagggccccacgtggcctgtgtcacccctccccaagaccaggtgccacttaaccctccaggcacagaccacgtcactgtgcccctggccctgatgttcgaggacgtgactgtggctgccaccaacttctccttttatgactgcagtgccgtccaggccttggaggcggctgccccgtgtcgcgcttgcgtgggcagcatctggcggtgtcactggtgcccgcagagtagccactgcgtgtacggagagcactgcccagagggcgagaggaccatctacagcgcccaggaggtggacatccaggtgcgtggcccaggggcttgcccacaggtcgaaggcctggcaggtccccacctggtgcctgtgggctgggagagccatttggccctacgcgtgcggaaccttcaacatttccgaggcctgcctgcctccttccactgctggctggagctgcctggagaacttcggggactgccggccaccctggaggagacagcaggggattcaggcctcatccactgccaggcccaccagttttatccctccatgtcccagcgggagctcccagtgcccatctacgtcacccagggtgaagcccagaggctggacaacacccatgctctttatgtgatcctgtacgactgcgccatgggccacccggactgcagccactgccaagcggccaacaggagcctgggctgcctgtggtgtgctgacggccagcctgcctgtcgctatgggcccttgtgcccgccgggggctgtggagctgctgtgtcctgcgcccagcattgatgcagtcgagcccctgaccggtccccctgagggaggcttggccctcaccatcctgggctccaacctgggccgggccttcgccgatgtgcagtacgccgtgagcgtggccagccggccctgcaaccctgagccctctctctaccgcacgtcggcccggattgtgtgtgtgacatctcctgcccccaatggcaccactgggcccgtccgggtggccattaagagccagccaccaggcatctcaagccagcacttcacctaccaggaccctgtcctgctgagcctgagtcctcgctggggcccccaggcagggggcacccagctcaccatccgaggtcagcacctccagacaggtggcaacaccagtgccttcgtgggtggccaaccctgtcccatcctggagccagtgtgtccggaggccatcgtgtgccgtaccaggccccaggctgccccaggagaagcagcggtccttgtggtctttggccatgcccagcgcacactgctcgccagccccttccgctacaccgccaacccccagcttgtagcggcggagcccagtgccagcttccgggggggtgggcgactgatccgtgtcaggggcaccggcctagacgtggtgcagcggcccctactgtctgtgtggctggaggctgacgcagaggtgcaggcttccagggcccagccccaggacccacagccaaggaggagctgtggagcccctgctgcggacccccaggcttgtatccagctcggtggggggctgctgcagtgctccaccgtctgctccgtcaactcgtccagcctcctcctgtgccggagccctgctgtaccagacagagcccacccgcagcgggtcttcttcaccctagacaacgtgcaagtggacttcgccagtgccagtgggggccagggcttcctgtaccagcccaacccccgcctggcacccctcagccgcgaggggcctgcccgcccctaccgcctcaagccaggccatgtcctggatgtggagggcgagggcctcaacctgggcatcagcaaggaggaggtgcgcgtgcacatcggccgcggcgagtgcctggtgaagacgctcacgcgcacccacctgtactgcgagccgcctgcgcacgccccgcagcctgccaatggctccggcctgccacagttcgtggtgcagatgggcaatgtgcagctggccctgggccctgtgcagtacgaggctgaacccccgctgtctgcctttcccgtggaggcccaggcaggcgtgggcatgggtgctgcagtgctgattgccgccgtgctcctcctcaccctcatgtacaggcacaagagcaagcaggccctgcgggactaccagaaggtgctagtgcagctggagagcctggagaccggcgtgggagaccagtgccgcaaggagttcacagacctcatgacggagatgaccgacctcagcagcgacctggagggcagcgggatccccttcctggactaccgcacctacgccgagcgcgccttcttccctggccatggcggttgcccgctgcagcccaagcctgaggggccaggggaggacggccactgtgccactgtgcgccagggcctcacgcagctctccaacctgctcaacagcaagctcttcctcctcacgctcatccacaccctggaggagcagcccagcttttcccagagggatcgctgccatgtggcttcgctgctgtcgctagcgctacacggcaagctggagtacctgacggacatcatgaggaccctgctgggtgacctggcggcccattacgtgcacaggaaccccaagctcatgctacgcaggacagagaccatggtggagaaactgctcaccaactggctgtccatctgcctgtacgccttcctgagggaggtggctggtgaaccactgtacatgctcttccgggccatccagtaccaggtggacaaaggccccgtggacgccgtgacaggcaaggccaaacggaccctgaatgatagccgcttgctgcgggaggacgtggagttccagcccctgacgctgatggtgctggtggggcccggggctggcggggccgcaggcagcagcgagatgcagcgcgtgccagcccgggtgctcgacacggacaccatcacccaggtcaaggagaaggtgttggaccaagtctacaagggcacccccttctcccagaggccctcagtgcatgccctagaccttgagtggcgctcaggcctggctggtcacctgaccctatcggacgaagacttgacctccgtgacccaaaaccactggaagagactcaacaccttgcaacactacaaggtcccagatggagcaacagtggggctcgtccctcagctgcaccgtggcagcaccatctcccagagcctggcccagaggtgccccttgggagagaacatacccacgctggaggatggcgaggaggggggggtgtgcctctggcacctggtgaaagccaccgaggagccagaaggggccaaggtgcggtgcagcagcctgcgggagcgcgagccagcaagggccaaggccattccggaaatctacctcacccgtctgctgtccatgaagggcacgctgcagaagtttgtggacgacaccttccaggccattctcagcgtgaaccggcccatccccatcgccgtcaagtacctgtttgaccttctggatgagctagcagagaagcacggcatcgaggacccagggaccctgcacatctggaagaccaacagtctgctgctgcggttctgggtgaatgccttgaagaacccacagctcatctttgatgtacgggtgtcggacaatgtggacgccatccttgctgtcatcgcccagaccttcattgactcctgtaccacctcggagcataaagtgggccgggattccccagtgaacaaactgctctacgcccgggagatcccacgctacaagcagatggtggagaggtactatgcggacattcgccagagctctccggcgagctaccaggagatgaactctgctttggctgagctctccgggaactacacttctgctccccactgtctggaggctctgcaagaactctacaaccacatccacaggtactatgatcagattatcagtgccctggaggaggaccctgtgggccagaagctgcagctggcctgccgcctgcagcaggtcgccgccctggtggaaaacaaagtgactgacctgtgagctctggctcagacagcagcaagccggatccaccaacaccgcagcgccttatgaccccggaaccgagccagccactgaggggagctggcagagcctgggggcacagggtgcaaagccaggcactgtgcccagcagtgggctccctgcctgccacctcccctgccagcccacccaccttccccccacctgagattgtttctaatttataaggatccccctccttccccctctccccattgtatttatttgcctgctggaaaatcacatccggaaataaaatagaaatatgtctttttattttattttg

SEQ ID NO: 61859 - DNA, 531 bp, Artificial Sequence
  derived and/or modified sequence
tgagcttcccagggaactctacagaaatttgtggacgataccttccaggcaatcctctccgtaaacaggccgatcccaattgcggtgaaatacttgtttgaccttcttgacgagctggccgagaaacacggtattgaagatcccggaaccttacacatttggaagacaaacagcctgctgctgaggttctgggtcaatgccctaaagaacccgcagctcatatttgatgtgagggtaagcgataatgtggatgcaatcctggccgtaattgctcaaacctttatagacagttgcacgaccagcgagcacaaagtcggcagagtacgggcagtccctgccgcagccgcagggaggggtctgcgacggaaaggcctatggggaaagcctagggggctgtgcaccgagctgtgggtaggtagtggttcaatcatgggtgcaccaagtcccccatcatcctgtctggccccaccactgcctccagaacaagactctccagttaataagcttctgtacgctcgggagattccctag

SEQ ID NO: 61860 - DNA, 492 bp, Artificial Sequence
  derived and/or modified sequence
tgaaagcgcactttgaatgattcacgactgttgcgcgaagacgtggagtttcaacccttaaccctcatggttttggttggacccggagcaggcggagctgcaggttccagcgaaatgcagagagtgcccgcaagggtgttagatacagacaccataactcaagtgaaggagaaagtgctcgatcaagtgtacaagggcacccccttttcccaacgtcccagcgttcatgctttagaccttgagtggaggagcggacttgccggtcacctgactcttagtgacgaggatctgacaagtgtcacccagaaccattggaaacgtttgaacaccttacagcactacaaggtgcccgatggagccaccgtgggcttggtgcctcagttacaccgcggatccacgatatcccagtccctggcccagcgctgtccactgggcgaatcagagtccctgggccctgacctcggtcctctggaaagcaggctgggcagatag

SEQ ID NO: 61861 - DNA, 5798 bp, Artificial Sequence
  derived and/or modified sequence
atggaactgacccctgccagcagtctaacgtgcagcctcctgtcccctcgactccctggaagctttccccaactcaggagagtgcccccttgcagtcgaccatggctgccaaaggcccctgttatggcacggtggcctccttttgggctgtgcttgctcctcctgcttctttctcctccacccctgcctctgacgggagctcatcggttttcagccccaaacaccactcttaaccacctagccctggctccaggtcgagggacactttatgtcggcgcagtgaacagactgttccagctgtcgcctgagctccagctggaggccgttgccgtaactggacctgtgatcgactccccagattgcgtgccgttccgcgatcctgcggaatgtccacaggcacagttgaccgataatgccaatcaattgctgcttgtgagttcaagagcgcaagagctcgtggcatgcggccaggtgaggcagggcgtgtgtgaaacccgtcggttgggcgacgtcgctgaggtgctgtatcaagccgaggacccgggagacggccaatttgtggcagcaaacactccaggcgtggctaccgtgggcctggtggtccctctcccgggacgcgaccttttgcttgtcgccaggggactggcagggaaattgtcagccggagtaccacctcttgcgatccgacagctcgctggcagccagcccttttcctctgagggactgggccgactggtggtgggagattttagtgactataacaacagttacgttggcgcattcgctgatgcacgcagtgcgtacttcgtgttccgaaggagaggagccagagcgcaggcggagtaccggagctacgtagcccgtgtgtgcctgggcgataccaacctgtactcttacgtggaggtccctctggcttgccaaggtcagggactcatccaggcagcatttctggcacccggtaccctgctgggcgtcttcgccgctggaccaagaggcacccaggctgccctttgcgcctttcccatggtagagctgggtgcctccatggagcaagcacgcagactgtgttatacagctgggggacggggaccgagcggtgccgaagaggcaacagtcgagtatggagtaacatcgagatgtgtgactctacccctcgatagtccagaatcctacccctgcggcgatgagcataccccatcccccatcgcgggacgacaacctctcgaagtccagccactgctgaaacttgggcagcctgtgtctgccgtcgccgcactgcaagccgatggacacatgatcgcctttcttggggatactcaggggcagctttacaaagtcttcttgcacgggagccagggtcaggtctatcatagccagcaggttgggcctccaggaagcgctatttcgccagatcttctgttagatagttccggaagccacctctacgtcctaaccgcacatcaggtagataggatcccggttgccgcttgcccgcaattcccagactgcgcttcatgcctgcaggcgcaggatcctctttgtgggtggtgcgttttacaaggaaggtgcacacgcaaaggccaatgcggacgggcaggccaactgaatcagtggctttggagttatgaagaagatagtcattgcctgcacatccagtcactgctgcctggccaccacccccgacaggagcaaggtcaggtaactctgtcggtgcccagactgccaatactggacgccgatgaatactttcactgtgcttttggggattacgactctctagcgcatgtggaaggacctcatgttgcttgtgttacccctccacaggatcaagtccccttgaatccacctggtactgaccacgttactgtaccactggctctgatgtttgaggatgtgacggtcgccgcaacaaactttagcttttacgattgctccgccgtgcaggccttggaagctgcagctccctgtcgagcgtgtgtgggaagcatttggcgatgtcactggtgtccccagtcaagtcactgtgtgtacggtgagcactgtccagaaggggagagaaccatatacagtgcgcaagaagtcgatatccaggtaagggggccaggtgcttgcccacaagtagagggtctcgcgggaccccacctcgtaccggtgggctgggaaagtcatcttgcactcagggtacgcaatcttcagcactttcgaggtctgccagcatcctttcattgctggcttgagctgccaggcgagctccggggtctcccagctactctggaagagaccgctggcgattcaggcctcattcattgccaggctcatcagttctacccttccatgagtcagcgggagctgccagtgcccatctacgtcacccagggggaagctcaaaggcttgacaatactcatgctctatacgtaatcctgtatgactgtgcaatgggacacccagattgctcccattgccaagcagcaaaccgcagtctcggatgtctgtggtgcgcagatgggcagcccgcttgtcgctacggacctctgtgcccacccggagccgtggagctgctttgtcccgctcctagcatcgatgcggtggaacctctgaccgggccacccgaaggcggtctggcactgaccatactgggctccaacctaggacgtgccttcgccgacgttcagtacgccgtctctgtggctagccgcccatgtaacccagagcccagtttataccgcaccagcgcaaggattgtctgtgtaacttcacccgctccaaacggcaccactggcccagtgcgggtggccataaaaagccagccaccaggaattagcagtcaacacttcacgtaccaggatccagtgttgctcagcttaagcccgaggtggggaccccaggccggtgggacccagctgactatccggggacaacacctgcagaccggcggtaacaccagtgcttttgttggcggtcagccatgtcccatcctggaacctgtgtgtcctgaggctattgtgtgccggactagaccacaggcggctccaggcgaggccgcagtcctcgtagtgtttggtcatgctcagcgaactctgctcgcttctccctttaggtacacagcaaaccctcaactggttgccgctgaaccttcggcatctttccgcggaggtgggaggttgatacgcgttagggggaccggcctcgacgtcgtgcagagaccattgctgagcgtgtggcttgaggcggatgccgaagtccaagcctcaagggcacagccgcaggaccctcagccccgacgcagttgcggggcaccagccgctgatccacaggcttgtatccagctgggtggtggattgttacagtgctccacagtgtgttcagtcaattcatcttcactcttgctgtgtaggtcccctgctgttccggatcgcgctcaccctcagcgggtatttttcaccctcgacaacgtacaggtggattttgccagcgccagcggaggccagggattcttgtatcaacctaatccccgactcgctcccctgagccgtgaaggaccagctcggccttacagactcaaaccaggccacgttctggatgtggagggggagggtctgaacctggggatatccaaagaagaagtgagagtgcacataggccgtggtgagtgtttagtcaaaactctaacgagaacccacctttactgtgagcccccagcacacgccccacagccagccaacggtagtggcctccctcaattcgtggtacagatgggaaacgttcagcttgccctcggtcccgtgcaatacgaagcagagccccctctgagtgctttccccgtcgaggcgcaggcgggagtgggcatgggagccgctgtactaatcgccgcagtgcttctcctaaccctcatgtatagacataagagtaagcaagcactgcgagactaccagaaggtgctagtccaattggagtcactggaaactggcgtgggagatcagtgcagaaaggagttcaccgacctcatgactgaaatgactgacctttcatccgatcttgaggggagcgggatccccttcttagactacagaacctacgctgagcgggcatttttccccggacacgggggttgtccgttacagccaaagcctgagggacctggtgaggacgggcactgtgctaccgtgagacaaggtttaacccagttaagtaatctgcttaattctaaactgtttctcttgacccttattcacactttagaggaacagccctcattcagtcagcgagatagatgccacgtggcctctttgctgtccctggcactgcatggaaaactagagtaccttacagacattatgaggacactcctcggggacctagccgcacactatgtacacagaaaccctaaattgatgcttcgtaggacagagaccatggtcgagaagctgctgactaactggctctctatctgcctgtatgctttcctgcgcgaggtcgcgggtgaacccttatacatgcttttccgtgccatccagtaccaggtggacaaggggccagtggacgctgtaaccgggaaggcaaaaaggacactgaatgactctcgcctgctgagagaggacgtagaatttcagccccttacgcttatggtgctggtcggccctggggctgggggagccgcaggatcctcagagatgcagagagtacctgcccgtgtgctggataccgacacaatcacccaggtcaaggagaaagtgttggatcaggtctataagggaaccccatttagtcagcggccatccgtccacgctctagacttggagtggagatcgggactggctggacaccttactctgtctgacgaagatctcacttctgtcactcagaatcactggaaaaggctgaataccttgcagcactacaaagtgcctgacggtgcgacagttggactcgtgccgcagctccaccgcggttccactatctcacaatcactcgcccagcggtgccccctgggcgagaacatccccacgttagaggacggagaggaggggggagtttgtctgtggcacctggtgaaggcaacagaggagcccgagggtgctaaagtcagatgctcatcactccgggaacgcgagccagcaagagccaaagccattcccgaaatatatctcactcggctgctcagcatgaagggcacactccagaagtttgtggatgacacctttcaagccattctgtcagtgaaccggcctattcctatagcagtgaagtacctgttcgatttgttggacgagctcgctgagaagcatggcattgaggatccgggaactcttcacatatggaaaactaacagtctgttgctgcgattttgggtcaacgccttaaaaaacccacagttaatttttgacgtcagggtaagcgataatgtcgacgctattctggctgtgattgctcagactttcatcgactcatgcaccacaagcgagcacaaggtgggtcgcgattcccctgttaacaaactgctttacgccagggagattccaagatacaagcagatggtggagaggtactacgccgatatccggcagtccagcccagccagctaccaagaaatgaactccgcactagccgaactctcgggtaattatacctcagcaccgcactgcctggaggcccttcaggagctatataatcatatccaccgttattatgaccagattatttccgcactggaggaggacccggtgggacagaaattgcagctggcttgccggctgcagcaagttgccgctctggtggaaaataaggtaactgacctgta

SEQ ID NO: 61862 - DNA, 531 bp, Artificial Sequence
  derived and/or modified sequence
tgagccagccagggcaccctgcagaagttcgtggacgacaccttccaggccatcctgagcgtgaacagacccatccccatcgccgtgaagtacctgttcgacctgctggacgagctggccgagaagcacggcatcgaggaccccggcaccctgcacatctggaagaccaacagcctgctgctgagattctgggtgaacgccctgaagaacccccagctgatcttcgacgtgagagtgagcgacaacgtggacgccatcctggccgtgatcgcccagaccttcatcgacagctgcaccaccagcgagcacaaggtgggcagagtgagagccgtgcccgccgccgccgccggcagaggcctgagaagaaagggcctgtggggcaagcccagaggcctgtgcaccgagctgtgggtgggcagcggcagcatcatgggcgcccccagcccccccagcagctgcctggccccccccctgccccccgagcaggacagccccgtgaacaagctgctgtacgccagagagatcccctag

SEQ ID NO: 61863 - DNA, 492 bp, Artificial Sequence
  derived and/or modified sequence
tgaaagagaaccctgaacgacagcagactgctgagagaggacgtggagttccagcccctgaccctgatggtgctggtgggccccggcgccggcggcgccgccggcagcagcgagatgcagagagtgcccgccagagtgctggacaccgacaccatcacccaggtgaaggagaaggtgctggaccaggtgtacaagggcacccccttcagccagagacccagcgtgcacgccctggacctggagtggagaagcggcctggccggccacctgaccctgagcgacgaggacctgaccagcgtgacccagaaccactggaagagactgaacaccctgcagcactacaaggtgcccgacggcgccaccgtgggcctggtgccccagctgcacagaggcagcaccatcagccagagcctggcccagagatgccccctgggcgagagcgagagcctgggccccgacctgggccccctggagagcagactgggcagatag

SEQ ID NO: 61864 - DNA, 5799 bp, Artificial Sequence
  derived and/or modified sequence
atggagctgacccccgccagcagcctgacctgcagcctgctgagccccagactgcccggcagcttcccccagctgagaagagtgcccccctgcagcagaccctggctgcccaaggcccccgtgatggccagatggccccccttcggcctgtgcctgctgctgctgctgctgagccccccccccctgcccctgaccggcgcccacagattcagcgcccccaacaccaccctgaaccacctggccctggcccccggcagaggcaccctgtacgtgggcgccgtgaacagactgttccagctgagccccgagctgcagctggaggccgtggccgtgaccggccccgtgatcgacagccccgactgcgtgcccttcagagaccccgccgagtgcccccaggcccagctgaccgacaacgccaaccagctgctgctggtgagcagcagagcccaggagctggtggcctgcggccaggtgagacagggcgtgtgcgagaccagaagactgggcgacgtggccgaggtgctgtaccaggccgaggaccccggcgacggccagttcgtggccgccaacacccccggcgtggccaccgtgggcctggtggtgcccctgcccggcagagacctgctgctggtggccagaggcctggccggcaagctgagcgccggcgtgccccccctggccatcagacagctggccggcagccagcccttcagcagcgagggcctgggcagactggtggtgggcgacttcagcgactacaacaacagctacgtgggcgccttcgccgacgccagaagcgcctacttcgtgttcagaagaagaggcgccagagcccaggccgagtacagaagctacgtggccagagtgtgcctgggcgacaccaacctgtacagctacgtggaggtgcccctggcctgccagggccagggcctgatccaggccgccttcctggcccccggcaccctgctgggcgtgttcgccgccggccccagaggcacccaggccgccctgtgcgccttccccatggtggagctgggcgccagcatggagcaggccagaagactgtgctacaccgccggcggcagaggccccagcggcgccgaggaggccaccgtggagtacggcgtgaccagcagatgcgtgaccctgcccctggacagccccgagagctacccctgcggcgacgagcacacccccagccccatcgccggcagacagcccctggaggtgcagcccctgctgaagctgggccagcccgtgagcgccgtggccgccctgcaggccgacggccacatgatcgccttcctgggcgacacccagggccagctgtacaaggtgttcctgcacggcagccagggccaggtgtaccacagccagcaggtgggcccccccggcagcgccatcagccccgacctgctgctggacagcagcggcagccacctgtacgtgctgaccgcccaccaggtggacagaatccccgtggccgcctgcccccagttccccgactgcgccagctgcctgcaggcccaggaccccctgtgcggctggtgcgtgctgcagggcagatgcaccagaaagggccagtgcggcagagccggccagctgaaccagtggctgtggagctacgaggaggacagccactgcctgcacatccagagcctgctgcccggccaccaccccagacaggagcagggccaggtgaccctgagcgtgcccagactgcccatcctggacgccgacgagtacttccactgcgccttcggcgactacgacagcctggcccacgtggagggcccccacgtggcctgcgtgacccccccccaggaccaggtgcccctgaacccccccggcaccgaccacgtgaccgtgcccctggccctgatgttcgaggacgtgaccgtggccgccaccaacttcagcttctacgactgcagcgccgtgcaggccctggaggccgccgccccctgcagagcctgcgtgggcagcatctggagatgccactggtgcccccagagcagccactgcgtgtacggcgagcactgccccgagggcgagagaaccatctacagcgcccaggaggtggacatccaggtgagaggccccggcgcctgcccccaggtggagggcctggccggcccccacctggtgcccgtgggctgggagagccacctggccctgagagtgagaaacctgcagcacttcagaggcctgcccgccagcttccactgctggctggagctgcccggcgagctgagaggcctgcccgccaccctggaggagaccgccggcgacagcggcctgatccactgccaggcccaccagttctaccccagcatgagccagagagagctgcccgtgcccatctacgtgacccagggcgaggcccagagactggacaacacccacgccctgtacgtgatcctgtacgactgcgccatgggccaccccgactgcagccactgccaggccgccaacagaagcctgggctgcctgtggtgcgccgacggccagcccgcctgcagatacggccccctgtgcccccccggcgccgtggagctgctgtgccccgcccccagcatcgacgccgtggagcccctgaccggcccccccgagggcggcctggccctgaccatcctgggcagcaacctgggcagagccttcgccgacgtgcagtacgccgtgagcgtggccagcagaccctgcaaccccgagcccagcctgtacagaaccagcgccagaatcgtgtgcgtgaccagccccgcccccaacggcaccaccggccccgtgagagtggccatcaagagccagccccccggcatcagcagccagcacttcacctaccaggaccccgtgctgctgagcctgagccccagatggggcccccaggccggcggcacccagctgaccatcagaggccagcacctgcagaccggcggcaacaccagcgccttcgtgggcggccagccctgccccatcctggagcccgtgtgccccgaggccatcgtgtgcagaaccagaccccaggccgcccccggcgaggccgccgtgctggtggtgttcggccacgcccagagaaccctgctggccagccccttcagatacaccgccaacccccagctggtggccgccgagcccagcgccagcttcagaggcggcggcagactgatcagagtgagaggcaccggcctggacgtggtgcagagacccctgctgagcgtgtggctggaggccgacgccgaggtgcaggccagcagagcccagccccaggacccccagcccagaagaagctgcggcgcccccgccgccgacccccaggcctgcatccagctgggcggcggcctgctgcagtgcagcaccgtgtgcagcgtgaacagcagcagcctgctgctgtgcagaagccccgccgtgcccgacagagcccacccccagagagtgttcttcaccctggacaacgtgcaggtggacttcgccagcgccagcggcggccagggcttcctgtaccagcccaaccccagactggcccccctgagcagagagggccccgccagaccctacagactgaagcccggccacgtgctggacgtggagggcgagggcctgaacctgggcatcagcaaggaggaggtgagagtgcacatcggcagaggcgagtgcctggtgaagaccctgaccagaacccacctgtactgcgagccccccgcccacgccccccagcccgccaacggcagcggcctgccccagttcgtggtgcagatgggcaacgtgcagctggccctgggccccgtgcagtacgaggccgagccccccctgagcgccttccccgtggaggcccaggccggcgtgggcatgggcgccgccgtgctgatcgccgccgtgctgctgctgaccctgatgtacagacacaagagcaagcaggccctgagagactaccagaaggtgctggtgcagctggagagcctggagaccggcgtgggcgaccagtgcagaaaggagttcaccgacctgatgaccgagatgaccgacctgagcagcgacctggagggcagcggcatccccttcctggactacagaacctacgccgagagagccttcttccccggccacggcggctgccccctgcagcccaagcccgagggccccggcgaggacggccactgcgccaccgtgagacagggcctgacccagctgagcaacctgctgaacagcaagctgttcctgctgaccctgatccacaccctggaggagcagcccagcttcagccagagagacagatgccacgtggccagcctgctgagcctggccctgcacggcaagctggagtacctgaccgacatcatgagaaccctgctgggcgacctggccgcccactacgtgcacagaaaccccaagctgatgctgagaagaaccgagaccatggtggagaagctgctgaccaactggctgagcatctgcctgtacgccttcctgagagaggtggccggcgagcccctgtacatgctgttcagagccatccagtaccaggtggacaagggccccgtggacgccgtgaccggcaaggccaagagaaccctgaacgacagcagactgctgagagaggacgtggagttccagcccctgaccctgatggtgctggtgggccccggcgccggcggcgccgccggcagcagcgagatgcagagagtgcccgccagagtgctggacaccgacaccatcacccaggtgaaggagaaggtgctggaccaggtgtacaagggcacccccttcagccagagacccagcgtgcacgccctggacctggagtggagaagcggcctggccggccacctgaccctgagcgacgaggacctgaccagcgtgacccagaaccactggaagagactgaacaccctgcagcactacaaggtgcccgacggcgccaccgtgggcctggtgccccagctgcacagaggcagcaccatcagccagagcctggcccagagatgccccctgggcgagaacatccccaccctggaggacggcgaggagggcggcgtgtgcctgtggcacctggtgaaggccaccgaggagcccgagggcgccaaggtgagatgcagcagcctgagagagagagagcccgccagagccaaggccatccccgagatctacctgaccagactgctgagcatgaagggcaccctgcagaagttcgtggacgacaccttccaggccatcctgagcgtgaacagacccatccccatcgccgtgaagtacctgttcgacctgctggacgagctggccgagaagcacggcatcgaggaccccggcaccctgcacatctggaagaccaacagcctgctgctgagattctgggtgaacgccctgaagaacccccagctgatcttcgacgtgagagtgagcgacaacgtggacgccatcctggccgtgatcgcccagaccttcatcgacagctgcaccaccagcgagcacaaggtgggcagagacagccccgtgaacaagctgctgtacgccagagagatccccagatacaagcagatggtggagagatactacgccgacatcagacagagcagccccgccagctaccaggagatgaacagcgccctggccgagctgagcggcaactacaccagcgccccccactgcctggaggccctgcaggagctgtacaaccacatccacagatactacgaccagatcatcagcgccctggaggaggaccccgtgggccagaagctgcagctggcctgcagactgcagcaggtggccgccctggtggagaacaaggtgaccgacctgtag

SEQ ID NO: 61865 - protein, 351 aa, Artificial Sequence
  derived and/or modified sequence
MVGHQECIMEEDNRAPQLWRKTLTAPAPFADETNCQCQAPHEKLTIAQARLGTPADRPVRVYADGIFDLFHSGHARALMQAKTLFPNSYLLVGVCSDDLTHKFKGFTVMNEAERYEALRHCRYVDEVIRDAPWTLTPEFLEKHKIDFVAHDDIPYSSAGSDDVYKHIKEAGMFVPTQRTEGISTSDIITRIVRDYDVYARRNLQRGYTAKELNVSFINEKRYRFQNQVDKMKEKVKNVEERSKEFVNRVEEKSHDLIQKWEEKSREFIGNFLELFGPDGAWKQMFQERSSRMLQALSPKQSPVSSPTRSRSPSRSPSPTFSWLPLKTSPPSSPKAASASISSMSEGDEDEK

SEQ ID NO: 61866 - DNA, 1056 bp, Artificial Sequence
  derived and/or modified sequence
atggtgggccaccaggagtgcatcatggaggaggacaacagagccccccagctgtggagaaagaccctgaccgcccccgcccccttcgccgacgagaccaactgccagtgccaggccccccacgagaagctgaccatcgcccaggccagactgggcacccccgccgacagacccgtgagagtgtacgccgacggcatcttcgacctgttccacagcggccacgccagagccctgatgcaggccaagaccctgttccccaacagctacctgctggtgggcgtgtgcagcgacgacctgacccacaagttcaagggcttcaccgtgatgaacgaggccgagagatacgaggccctgagacactgcagatacgtggacgaggtgatcagagacgccccctggaccctgacccccgagttcctggagaagcacaagatcgacttcgtggcccacgacgacatcccctacagcagcgccggcagcgacgacgtgtacaagcacatcaaggaggccggcatgttcgtgcccacccagagaaccgagggcatcagcaccagcgacatcatcaccagaatcgtgagagactacgacgtgtacgccagaagaaacctgcagagaggctacaccgccaaggagctgaacgtgagcttcatcaacgagaagagatacagattccagaaccaggtggacaagatgaaggagaaggtgaagaacgtggaggagagaagcaaggagttcgtgaacagagtggaggagaagagccacgacctgatccagaagtgggaggagaagagcagagagttcatcggcaacttcctggagctgttcggccccgacggcgcctggaagcagatgttccaggagagaagcagcagaatgctgcaggccctgagccccaagcagagccccgtgagcagccccaccagaagcagaagccccagcagaagccccagccccaccttcagctggctgcccctgaagaccagcccccccagcagccccaaggccgccagcgccagcatcagcagcatgagcgagggcgacgaggacgagaagtag

SEQ ID NO: 61867 - DNA, 1056 bp, Artificial Sequence
  derived and/or modified sequence
atggtgggccaccaggagtgcattatggaggaggacaatcgggctcctcagctctggcggaaaactctgacagctcctgctccctttgcagacgaaacgaattgtcagtgccaagcaccgcacgagaagctgacgatcgcacaggctcgacttggtacaccagccgacaggcccgtgcgcgtttatgccgacggcattttcgacctctttcactcggggcacgcacgagctctgatgcaagccaagactctcttccccaatagctacctcctcgtcggggtgtgttccgatgatctgacgcacaaatttaaaggctttaccgtcatgaacgaagctgaacgatatgaagccctgcgccactgccggtacgttgacgaggtaattcgcgacgcgccttggactttaacccctgagttccttgaaaagcacaagatcgactttgtggcccacgatgacatcccttattcctcagccggctcagatgatgtctataaacatattaaggaagctgggatgttcgttccgacccagcgcactgagggcatctctacctcagacataatcacaaggatagttcgggactatgacgtgtacgcgcgtagaaatctgcagagggggtataccgctaaagagttaaacgtgtcattcattaacgagaaacgctaccggtttcagaaccaggtggataaaatgaaggagaaagttaagaatgttgaagaaagatctaaggaatttgtgaatcgtgttgaggagaagtctcatgacctgatccagaaatgggaagaaaagtcacgagagtttataggaaactttctcgagctgttcgggccagatggggcctggaaacagatgttccaagaacggtcttcccggatgctccaggccttatcccccaagcagtcaccagttagttcaccaacacgctctagatccccctctcggtcgcccagcccaacgttctcgtggttacctctcaagaccagtcccccatcatcacctaaggctgcatcggccagtataagcagcatgtccgaaggagacgaagatgaaaaatag

SEQ ID NO: 61868 - DNA, 1056 bp, Artificial Sequence
  derived and/or modified sequence
atggtgggccaccaggagtgcatcatggaggaggacaacagagccccccagctgtggaggaagaccctgacagccccagccccctttgctgatgagaccaactgccagtgccaggcccctcatgagaagctgaccatcgcccaggcccggctgggcaccccagctgacaggcctgtgcgggtgtatgcagatggcatctttgacctcttccacagcggccacgcccgggccctgatgcaggccaagaccctcttccccaacagctacctgctggtgggcgtgtgcagtgatgacctgacccacaagttcaagggcttcaccgtgatgaatgaggccgagagatatgaggccctgcggcactgccgctacgtggatgaagtcatcagagatgccccctggaccctgaccccagagttcctggagaagcacaagattgactttgtggcccatgatgacatcccctacagcagcgctggcagtgatgatgtgtacaagcacatcaaggaggccggcatgtttgtgcccacccagaggacagagggcatcagcaccagtgacatcatcaccagaattgtgcgggactatgatgtgtatgcccggaggaacctgcagaggggctacacagccaaggagctgaatgtgtccttcatcaatgagaagcgctaccgcttccagaaccaggtggacaagatgaaggagaaggtgaagaatgtggaggagaggagcaaggagtttgtgaacagagtggaggagaagagccatgacctgatccagaagtgggaggagaagagccgggagttcatcggcaacttcctggagctgtttggaccagatggagcctggaagcagatgttccaggagaggagcagcaggatgctgcaggccctgagccccaagcagagccctgtgagcagccccaccaggagccgcagccccagccgcagccccagccccaccttctcctggctgcccctgaagaccagcccccccagcagccccaaggccgccagcgccagcatcagctccatgtctgaaggagatgaagatgagaagtag

SEQ ID NO: 61869 - DNA, 5307 bp, Artificial Sequence
  derived and/or modified sequence
aaagggtagaggcctctagagaagataaaaagatcaggagcaggcatggtaggccatcaggagtgcatcatggaagaggacaatcgcgctccccaattgtggcgcaagaccctgactgcacctgccccatttgctgatgaaaccaactgccagtgtcaagcaccccatgaaaaactgaccattgctcaggcccgcttaggaacaccagctgacaggcctgtcagagtatacgccgatggaatatttgacctcttccactcaggtcatgcaagagcccttatgcaagcaaaaacactgtttcccaacagctacttgttggtaggagtttgcagtgatgatctcacccacaaattcaaaggtttcaccgtgatgaatgaagccgagagatacgaagctctcagacactgtcgctacgtagacgaagttatcagagatgctccctggacactcacgccagagtttctggaaaaacacaagattgactttgtggctcatgatgacattccgtattcctctgctggctctgatgatgtttacaagcacataaaggaagcagggatgttcgttccaacgcagagaacagaaggcatctcaacatcggacatcattaccagaattgttcgtgactatgatgtttatgcccgacgtaacctccagagagggtatacagccaaggaactgaatgtcagctttataaatgagaagaggtaccgtttccagaaccaagtggacaaaatgaaggaaaaagtcaagaatgtggaggaaagatcaaaggaatttgtgaacagagtggaagaaaagagccatgatctaattcaaaagtgggaagagaagtcaagggaattcattggcaacttcctagaactgtttggacctgatggagcatggaagcagatgttccaggagaggagcagccggatgctgcaggccttatccccgaagcagagccctgtgagcagcccaacccggagccggtccccttcccgctccccatcgcccaccttctcatggcttccactcaaaacctcacccccttcctcacccaaagcagcctcagcctctatcagcagcatgagcgagggggatgaggatgaaaagtagaggctgctgggaggcaagagccgcaccatgcaggatggggaggagggcgagagtcacagggttgcctgggtggtgtttgaagggtaatagtcacaggagctgcagctcagcagagagaccctgaactctgctaagggaaggtcttgggaccagttctctctcactctccgtacagctgaagagttgggcgaggtgcagagacttctagctggacaacctacacaaaccttagcgtctagagtcactctaaccttgctaaggaaggatgcagagttccctagagagacttgcactgatggggtgacttctgctttggtccttccaccacccccaccaagtaaaccacctgtggcagcggctgttccctcaacctgctacttctgcgtccataagggtcctgcacgttgcctcccaccaccccagctctgccagaataaaattgtttccaatagaggtggcaaagtgcttctgaaatagtcgagaaaaagacagattccaacctcctcagtccagccactgagacctgatgttggaacgcatcagctccttccagttccatgaatgtggctcatagacaaagccttgctttaggctggttataaaaggtcatctagtgtgaaccttaactttttattcaaaggacagttttgtcaagaactccacgtaaggcctgatgtgctcctggttgtactttctcatcactggtttgacttcattgttttgcagaaattaccttaatccgtgggaactgcaacaaagaaaaacttcctaatatataaaaaagaggagctgctttgctttgcctccaggtttagcggacaagaaatgtctcctgaagcttctccttaaaggatgctattatggaatggcttttcccatttctgaccagttaacagtttcatagacctcaagtaacagtttgaggtatcaaacatagtataccaatagggggtgctacctgcacgtatctgttctatatatgctccaatatgtcatccccgggtgtatcccatgtgcaatatgagtatatagtggtggcattttataatagaccccactcctgcgctccaccataatactcctctgaaatccttggtctcaagaaacatctgttctcttgtgacttgggcactttgtcaagcttattccagattcctgtggaaacgttttatcccaaccaggaaattagtattttgttctcgtggcctcctataacatttttgggtgaaggagaactcaagactttttacagagaactgtgggctcagttatgatctcagcatctgaatggtctaggtagtatcaccattatctctggccctaggtttgccaagtaggatgaagactctaagtgttcctgctgagttgtccaaaggtcctgctccttagtcacctgtgcgaaatgagcagggagagttaaggcatagaaccaaactctttgggttattgtatgggtatgccagtaaattcagacacagagctggggtctgactgaatagaggcccaaaccagcaacttgtaggcagagcccagaatctcttgtgatagaaataccccttttcagaggccttgggaaccagccttctaggtgacaaggggacaaccagtgaaggaaggcggcatgtctttccccttcttgttggggttgaactacctccctatccacttggagatgagtgctgtctgctgtgaagcaaaactatgaggctgagctggcttggaacctctttgttcttggcactttccttctccaggactctgggaagcactcatatgggacagagggctggcaggaacatggcatgtgaagaagaaaacttctttttgcagtcaagggccacccagaatattgctcttcagagagggacaagggcctcattcttccatttggtctctgtcttccatcatgcactcaggtcaagccatgcaagtctgcctaccatttgagttagttggcacttgtagcagtgaaggatgaggccagccaggcaagggaaggtggcgggaacaagggaagagaaaaggaggaaagaagttcctggagggaggaaaggaggataaagaaaatctgctctcataaaaccatttcaggacctcactttacaggtgagactctcttgggaaggcctttgtgcccctgctccatggcccagggcagatagattcacttttacctgaatcttatactctggagcaaatagtgtatcaggctgactatacatttgcaggccttacacgccatactgacaggtgccacttacgtgactcatcagataatgtcaccattgctgccaattatgggaaataactaatgcctattccagggatgagcccaaaccacacataaatgggttctaaatctcaccctcctaacctgcagtgagtccccccgttccaccctcttgaggctgcaaatctactgagaaggaatgggaaggattctacaacccaacttttgatactttttggccatctctcagtctctcccagcccctacccccacaccacctccctgctcccaggcagagaccgggttgcactttgttagggccagcaggtcaactgtaatggccaagagtgagttaaggctggaatgagaaatatgccccaagcttggaggggtaagcaggaataacacaaagcaaggaaagagattctttttgccctagtgaggaaaggaagcttcagaatgagggctggaggatagcaacttaggactgcagaagggggcagcttatgaagatgggagaaagtgggactgaagttgtaggggagcaggagggtagtgattttccgcttttctttctttctttcttttactttctttctctttctttctctctctctctctttctttttctttcttctttctctttttctttcctctttttctttctttctttttctttctctttcttccttctttctttcattcttctttgttctttcttctttctttctttttttttttttttgagatggagttttgctcttgttgctcaggctggagtgcaatggcacaatctcggctcactgcagcctccacctcccaggttcaaggggttcttctgcctcagcctcccaagtagctgggattacaggtgcctgccacgacacccagctaatttttgtatgtttagtagagacggggtttcaccatgttggccaggctggtctcaaattcctgacctcaggtgattctcccgcctcggcctcccaaagtgctgggattatgagcacgagccacggcgtccagccgattttccgctccctttcaagtgttaactcaccccctgacaggtgaagagggaagggttccttttacgcacaaccaaggttagcaaatgcccatgcaggatatggggtccctgcctctctggttgcttcatttcagcacttctatattagctgcttatggggaccctaaaatgaactggtcacccctccaccagctaagaaacaagggtgggattgctgtgccataagtcacactgaacgacttgcttctggcaagcatgctcctgtgtgtcaggaccttaccaaggcaaagaaatgccaggctcaagaggagcaggacgtgagacattggcctggcttctaacctggtctgagtggaagagacacagcttagggatttcagttttgctcttaggctactagatactgttatttcaccccctgagggagggacaggaagagcacggatttattttctctccgtcttcagtacttattttagcatctagtcataccccagggagagatgcgagacggtgtcactggctcagctgaagcagatgagcccgtctctagcagagatgtgcctgtttcttaggcatccgttcagcactagtcttggccatcagatttttaaaaaagaaatagctcatgaggcatttgcaacttctcctctctagacttctttctagttttcctctgttgtgtcactgcgatgtgtccagggacaaagccataagtagagcatacatacttaagactatgctgtacatataagacaagacctgtctgggttaaagcacgaccttatgcccaagcatttactctggtgctgaataacgcgaactactggaatcagcctcccccaactctgcgcgccccctgcccccctgctcctatcccattcttgctctcaaatggaccacaccattctcaactcgtttataaataaagggatgcagaattgca

SEQ ID NO: 61870 - DNA, 1056 bp, Artificial Sequence
  derived and/or modified sequence
atggtgggccaccaggagtgcatcatggaggaggacaaccgggccccgcagctgtggagaaagacattaacggctccagccccttttgcagacgagacaaactgtcagtgccaggccccccacgagaagctgaccattgcccaggctaggctcggcacacctgcagaccggccagtgcgcgtgtacgcggacgggatctttgatttgtttcacagtggccacgctagggccctgatgcaagctaagactctgtttcctaactcctacctcctggtgggcgtgtgttccgacgacctgactcacaagttcaagggctttacagtgatgaatgaagcagaaagatatgaagccttacggcactgcaggtacgtggatgaggtcatcagggatgctccatggaccttaacaccggaattcctcgagaagcataagatcgatttcgtggctcacgatgacatcccctacagctccgcagggtctgacgatgtctacaagcatatcaaagaagctggtatgttcgtcccaacgcagaggactgagggaatcagcaccagcgacatcattactaggattgtgagagactacgatgtgtatgctaggcgtaacctgcagcgaggttatactgcgaaggagctgaatgtgtcttttataaacgaaaagcgatacagatttcagaatcaagtcgacaagatgaaggaaaaagtgaaaaacgtggaggaaaggtcaaaagagtttgtgaacagagttgaggaaaaatcacatgatctaatccagaaatgggaggaaaagagcagagaattcattgggaacttcttagagctcttcggcccagatggcgcctggaagcagatgtttcaggagcgatcctctagaatgttgcaggcgctgagcccaaagcagtctcccgtgtcctctcccacacgctcgcgatcgccctcccgatcacctagtcccaccttttcttggctgccacttaaaacttcaccaccgtcttcacctaaggctgccagtgcctcaatctctagcatgtcggagggcgacgaagatgagaaatag

SEQ ID NO: 61871 - DNA, 1056 bp, Artificial Sequence
  derived and/or modified sequence
atggttggacatcaggagtgtatcatggaagaagacaatcgcgctcctcagctatggcgaaagacactcaccgctcccgctcccttcgctgacgagactaactgtcagtgccaggcacctcacgagaaactcactattgctcaagcacgcctggggaccccagcggacaggccagtccgggtgtacgctgacggcatctttgatttatttcacagtgggcatgccagggccctcatgcaggctaaaactcttttcccaaatagttaccttcttgtgggggtctgctccgatgacctgacacacaagtttaaagggttcacagtaatgaacgaagccgaaaggtacgaggctctccgacactgcaggtacgtggatgaagtcatacgggacgccccttggactctgaccccagagtttctcgaaaaacataaaatcgactttgtggcccacgatgacatcccgtactcaagcgctggctcagatgacgtgtataagcatatcaaagaggcgggaatgtttgttcccacacaacggaccgaaggcatttcaacctccgacattatcactcggatagtgcgcgattatgacgtatacgctaggcgtaacctgcagcggggttatactgcaaaggaattgaatgtttcatttattaacgaaaaacggtatcgtttccagaaccaggtggacaaaatgaaggaaaaggtgaaaaacgtggaagaacgctctaaagagttcgtcaatcgtgtcgaggagaagagtcacgatctgattcagaaatgggaggagaagtccagagaatttatcgggaatttcctggagctgttcgggccagatggcgcttggaagcagatgttccaggagaggagcagcagaatgcttcaagccttgtctcctaagcagtccccggtcagttcacctacaagaagtagatctccaagtcggtcaccctctccaaccttctcctggctgcccttgaagacttcccccccatcttctcccaaagccgcaagtgcatccatctcttccatgtctgagggtgatgaggatgaaaaatag

SEQ ID NO: 61872 - protein, 330 aa, Artificial Sequence
  derived and/or modified sequence
MPVVTTDAESETGIPKSLSNEPPSETMEEIEHTCPQPRLTLTAPAPFADETNCQCQAPHEKLTIAQARLGTPADRPVRVYADGIFDLFHSGHARALMQAKTLFPNSYLLVGVCSDDLTHKFKGFTVMNEAERYEALRHCRYVDEVIRDAPWTLTPEFLEKHKIDFVAHDDIPYSSAGSDDVYKHIKEAGMFVPTQRTEGISTSDIITRIVRDYDVYARRNLQRGYTAKELNVSFINEKRYRFQNQVDKMKEKVKNVEERSKEFVNRVEEKSHDLIQKWEEKSREFIGNFLELFGPDGAWKQMFQERSSRMLQALSPKQSPLKSWARCRDF

SEQ ID NO: 61873 - DNA, 993 bp, Artificial Sequence
  derived and/or modified sequence
atgcccgtggtgaccaccgacgccgagagcgagaccggcatccccaagagcctgagcaacgagccccccagcgagaccatggaggagatcgagcacacctgcccccagcccagactgaccctgaccgcccccgcccccttcgccgacgagaccaactgccagtgccaggccccccacgagaagctgaccatcgcccaggccagactgggcacccccgccgacagacccgtgagagtgtacgccgacggcatcttcgacctgttccacagcggccacgccagagccctgatgcaggccaagaccctgttccccaacagctacctgctggtgggcgtgtgcagcgacgacctgacccacaagttcaagggcttcaccgtgatgaacgaggccgagagatacgaggccctgagacactgcagatacgtggacgaggtgatcagagacgccccctggaccctgacccccgagttcctggagaagcacaagatcgacttcgtggcccacgacgacatcccctacagcagcgccggcagcgacgacgtgtacaagcacatcaaggaggccggcatgttcgtgcccacccagagaaccgagggcatcagcaccagcgacatcatcaccagaatcgtgagagactacgacgtgtacgccagaagaaacctgcagagaggctacaccgccaaggagctgaacgtgagcttcatcaacgagaagagatacagattccagaaccaggtggacaagatgaaggagaaggtgaagaacgtggaggagagaagcaaggagttcgtgaacagagtggaggagaagagccacgacctgatccagaagtgggaggagaagagcagagagttcatcggcaacttcctggagctgttcggccccgacggcgcctggaagcagatgttccaggagagaagcagcagaatgctgcaggccctgagccccaagcagagccccctgaagagctgggccagatgcagagacttctag

SEQ ID NO: 61874 - DNA, 1289 bp, Artificial Sequence
  derived and/or modified sequence
gcctgggaggagactctctgagggtgtagagctagagggagcattcactggccatgccagtagttaccactgatgctgagtcagaaacaggtatcccaaaatccctttccaatgagcctccctcagaaaccatggaggaaatagagcacacatgcccacagcctcgactgaccctgactgcacctgccccatttgctgatgaaaccaactgccagtgtcaagcaccccatgaaaaactgaccattgctcaggcccgcttaggaacaccagctgacaggcctgtcagagtatacgccgatggaatatttgacctcttccactcaggtcatgcaagagcccttatgcaagcaaaaacactgtttcccaacagctacttgttggtaggagtttgcagtgatgatctcacccacaaattcaaaggtttcaccgtgatgaatgaagccgagagatacgaagctctcagacactgtcgctacgtagacgaagttatcagagatgctccctggacactcacgccagagtttctggaaaaacacaagattgactttgtggctcatgatgacattccgtattcctctgctggctctgatgatgtttacaagcacataaaggaagcagggatgttcgttccaacgcagagaacagaaggcatctcaacatcggacatcattaccagaattgttcgtgactatgatgtttatgcccgacgtaacctccagagagggtatacagccaaggaactgaatgtcagctttataaatgagaagaggtaccgtttccagaaccaagtggacaaaatgaaggaaaaagtcaagaatgtggaggaaagatcaaaggaatttgtgaacagagtggaagaaaagagccatgatctaattcaaaagtgggaagagaagtcaagggaattcattggcaacttcctagaactgtttggacctgatggagcatggaagcagatgttccaggagaggagcagccggatgctgcaggccttatccccgaagcagagccctctgaagagttgggcgaggtgcagagacttctagctggacaacctacacaaaccttagcgtctagagtcactctaaccttgctaaggaaggatgcagagttccctagagagacttgcactgatggggtgacttctgctttggtccttccaccacccccaccaagtaaaccacctgtggcagcggctgttccctcaacctgctacttctgcgtccataagggtcctgcacgttgcctcccaccaccccagctctgccagaataaaattgtttccaata

SEQ ID NO: 61875 - DNA, 993 bp, Artificial Sequence
  derived and/or modified sequence
atgccggtcgtaaccaccgacgcagagagtgaaactggcattcctaagagtctgtctaacgaacccccatccgagaccatggaggaaattgagcacacatgccctcagcctcgactcaccctgacagcgcctgcccctttcgccgatgagaccaattgccaatgccaggccccgcatgaaaagcttacaatcgcacaggcacggctcggaacccctgctgacaggcctgtccgcgtgtacgctgacgggatattcgacctctttcacagcggacatgccagggccctgatgcaggctaaaactttgtttccaaattcatatctactcgttggggtctgcagcgatgatctgactcacaaattcaagggctttaccgttatgaacgaagctgagcggtacgaggcgctcaggcattgccggtacgtcgacgaagttataagggatgcaccctggacattgactcccgagttcttggagaaacacaagattgacttcgtggcccatgacgatattccctattcctccgctggtagcgacgatgtgtacaaacatatcaaggaggctggaatgtttgttcccacccaaaggaccgagggcatcagcaccagcgacatcattacacgaatcgtgagagattacgatgtgtacgctcggaggaatctccaacgcggatataccgccaaagaattgaatgtctccttcattaacgaaaaacgctacagattccagaaccaagtagacaagatgaaggagaaggttaaaaatgtagaggagaggagtaaggagtttgtgaaccgagtggaggagaagtcacacgacctcattcagaagtgggaggaaaagtctcgcgaatttatcggcaactttctcgagctgttcggcccagacggcgcttggaaacagatgtttcaagagcggtcctctcgaatgctgcaggccctgtcccctaaacagtcacccttaaagagctgggccagatgcagggatttttag

SEQ ID NO: 61876 - DNA, 993 bp, Artificial Sequence
  derived and/or modified sequence
atgcctgtggtgaccacagatgctgagagcgagaccggcatccccaagagcctgagcaatgagccccccagcgagaccatggaggagattgagcacacctgcccccagccccggctgaccctgacagccccagccccctttgctgatgagaccaactgccagtgccaggcccctcatgagaagctgaccatcgcccaggcccggctgggcaccccagctgacaggcctgtgcgggtgtatgcagatggcatctttgacctcttccacagcggccacgcccgggccctgatgcaggccaagaccctcttccccaacagctacctgctggtgggcgtgtgcagtgatgacctgacccacaagttcaagggcttcaccgtgatgaatgaggccgagagatatgaggccctgcggcactgccgctacgtggatgaagtcatcagagatgccccctggaccctgaccccagagttcctggagaagcacaagattgactttgtggcccatgatgacatcccctacagcagcgctggcagtgatgatgtgtacaagcacatcaaggaggccggcatgtttgtgcccacccagaggacagagggcatcagcaccagtgacatcatcaccagaattgtgcgggactatgatgtgtatgcccggaggaacctgcagaggggctacacagccaaggagctgaatgtgtccttcatcaatgagaagcgctaccgcttccagaaccaggtggacaagatgaaggagaaggtgaagaatgtggaggagaggagcaaggagtttgtgaacagagtggaggagaagagccatgacctgatccagaagtgggaggagaagagccgggagttcatcggcaacttcctggagctgtttggaccagatggagcctggaagcagatgttccaggagaggagcagcaggatgctgcaggccctgagccccaagcagagccccctgaagtcctgggcccgctgccgggacttctag

SEQ ID NO: 61877 - DNA, 993 bp, Artificial Sequence
  derived and/or modified sequence
atgcccgtggtgaccaccgacgccgagagcgagaccggcatccccaaatccctgtcgaatgagcctccctcggagactatggaagagattgagcacacttgcccacagcctcggctgactctcacagcccctgctccattcgccgacgagaccaattgtcagtgccaggcccctcacgagaagctcacaattgcacaggcccgcttaggaacccccgctgaccggcccgttcgcgtgtatgcagatggaatatttgatcttttccatagcgggcatgccagggctttaatgcaggccaaaacactatttcccaactcctatttgctagtgggggtatgctctgacgatctcacacataagttcaagggtttcacggttatgaatgaagccgaacgctacgaagccctgagacactgccgctacgtggacgaggtgatcagagatgctccttggaccctcactccggagttcttggaaaagcacaaaattgactttgttgcacatgatgacattccttattcttctgccgggtctgacgatgtgtataagcacataaaagaggcaggaatgtttgttcccactcagcgaacggagggcatcagcacaagtgatatcatcactagaattgtgagagactatgatgtgtacgcaagacgaaaccttcagcgcggatataccgcaaaagagctcaacgtgagctttattaacgaaaagagatacagatttcaaaaccaagttgataaaatgaaagagaaggtgaaaaatgtggaggaaaggtccaaggaattcgttaaccgggtcgaggaaaagagccacgacctgattcagaaatgggaggaaaagtcaagagaattcataggaaactttctggaactatttggcccggacggcgcatggaagcagatgtttcaggagaggtcgtctcggatgctgcaggcgctgtcccccaaacagtcaccactcaagtcctgggcaagatgtcgcgatttttag

SEQ ID NO: 61878 - DNA, 993 bp, Artificial Sequence
  derived and/or modified sequence
atgcccgttgtgacaaccgatgccgaatcagagacggggatccctaaaagtttgtcaaacgagcccccatccgaaaccatggaagagatagagcacacctgcccacagccacggctcactctcacagcccctgctccttttgcagacgagactaactgtcaatgtcaggcgcctcacgagaaattgacaattgcacaggccaggctgggcacgccggctgataggccagtcagagtgtacgccgatggtatcttcgacctgtttcatagtggacatgctcgggctctgatgcaggccaaaacactgtttcctaactcctatctattggtcggggtctgttcagatgatctgacacacaaatttaaagggttcacagtgatgaatgaggcagaacggtacgaggccttgcgccattgcagatacgtcgacgaggttataagggacgccccttggacactgactccagaatttctggagaagcacaaaatagattttgtggcacacgacgacatcccatactcttcggccggatctgatgacgtgtataaacatataaaggaggcaggaatgttcgtgcctacccagcggacagaggggatctcaacctcagatattattactaggattgtgagagactacgacgtgtacgctcgcagaaatctccaacgcggatacacggcgaaggaattgaacgtgtcttttattaacgaaaaacgttataggttccagaaccaagttgataagatgaaagaaaaggttaagaacgtagaggagaggtccaaggaattcgttaacagggtggaggagaaatcccacgacctgatccagaaatgggaggaaaaatcgcgtgagtttatcgggaacttcttggagttgtttggtcccgacggcgcatggaaacaaatgttccaggaacgaagctcacggatgttacaggctctgtcaccaaaacagtctcctcttaaatcatgggctaggtgcagggatttctag

SEQ ID NO: 61879 - protein, 655 aa, Artificial Sequence
  derived and/or modified sequence
MASTDYSTYSQAAAQQGYSAYTAQPTQGYAQTTQAYGQQSYGTYGQPTDVSYTQAQTTATYGQTAYATSYGQPPTGYTTPTAPQAYSQPVQGYGTGAYDTTTATVTTTQASYAAQSAYGTQPAYPAYGQQPAATAPTRPQDGNKPTETSQPQSSTGGYNQPSLGYGQSNYSYPQVPGSYPMQPVTAPPSYPPTSYSSTQPTSYDQSSYSQQNTYGQPSSYGQQSSYGQQSSYGQQPPTSYPPQTGSYSQAPSQYSQQSSSYGQQSSFRQDHPSSMGVYGQESGGFSGPGENRSMSGPDNRGRGRGGFDRGGMSRGGRGGGRGGMGAGERGGFNKPGGPMDEGPDLDLGPPVDPDEDSDNSAIYVQGLNDSVTLDDLADFFKQCGVVKMNKRTGQPMIHIYLDKETGKPKGDATVSYEDPPTAKAAVEWFDGKDFQGSKLKVSLARKKPPMNSMRGGLPPREGRGMPPPLRGGPGGPGGPGGPMGRMGGRGGDRGGFPPRGPRGSRGNPSGGGNVQHRAGDWQCPNPGCGNQNFAWRTECNQCKAPKPEGFLPPPFPPPGGDRGRGGPGGMRGGRGGLMDRGGPGGMFRGGRGGDRGGFRGGRGMDRGGFGGGRRGGPGGPPGPLMEQMGGRRGGRGGPGKMDKGEHRQERRDRPY

SEQ ID NO: 61880 - DNA, 1968 bp, Artificial Sequence
  derived and/or modified sequence
atggccagcaccgactacagcacctacagccaggccgccgcccagcagggctacagcgcctacaccgcccagcccacccagggctacgcccagaccacccaggcctacggccagcagagctacggcacctacggccagcccaccgacgtgagctacacccaggcccagaccaccgccacctacggccagaccgcctacgccaccagctacggccagccccccaccggctacaccacccccaccgccccccaggcctacagccagcccgtgcagggctacggcaccggcgcctacgacaccaccaccgccaccgtgaccaccacccaggccagctacgccgcccagagcgcctacggcacccagcccgcctaccccgcctacggccagcagcccgccgccaccgcccccaccagaccccaggacggcaacaagcccaccgagaccagccagccccagagcagcaccggcggctacaaccagcccagcctgggctacggccagagcaactacagctacccccaggtgcccggcagctaccccatgcagcccgtgaccgccccccccagctacccccccaccagctacagcagcacccagcccaccagctacgaccagagcagctacagccagcagaacacctacggccagcccagcagctacggccagcagagcagctacggccagcagagcagctacggccagcagccccccaccagctaccccccccagaccggcagctacagccaggcccccagccagtacagccagcagagcagcagctacggccagcagagcagcttcagacaggaccaccccagcagcatgggcgtgtacggccaggagagcggcggcttcagcggccccggcgagaacagaagcatgagcggccccgacaacagaggcagaggcagaggcggcttcgacagaggcggcatgagcagaggcggcagaggcggcggcagaggcggcatgggcgccggcgagagaggcggcttcaacaagcccggcggccccatggacgagggccccgacctggacctgggcccccccgtggaccccgacgaggacagcgacaacagcgccatctacgtgcagggcctgaacgacagcgtgaccctggacgacctggccgacttcttcaagcagtgcggcgtggtgaagatgaacaagagaaccggccagcccatgatccacatctacctggacaaggagaccggcaagcccaagggcgacgccaccgtgagctacgaggacccccccaccgccaaggccgccgtggagtggttcgacggcaaggacttccagggcagcaagctgaaggtgagcctggccagaaagaagccccccatgaacagcatgagaggcggcctgccccccagagagggcagaggcatgcccccccccctgagaggcggccccggcggccccggcggccccggcggccccatgggcagaatgggcggcagaggcggcgacagaggcggcttcccccccagaggccccagaggcagcagaggcaaccccagcggcggcggcaacgtgcagcacagagccggcgactggcagtgccccaaccccggctgcggcaaccagaacttcgcctggagaaccgagtgcaaccagtgcaaggcccccaagcccgagggcttcctgcccccccccttccccccccccggcggcgacagaggcagaggcggccccggcggcatgagaggcggcagaggcggcctgatggacagaggcggccccggcggcatgttcagaggcggcagaggcggcgacagaggcggcttcagaggcggcagaggcatggacagaggcggcttcggcggcggcagaagaggcggccccggcggcccccccggccccctgatggagcagatgggcggcagaagaggcggcagaggcggccccggcaagatggacaagggcgagcacagacaggagagaagagacagaccctactag

SEQ ID NO: 61881 - DNA, 1986 bp, Artificial Sequence
  derived and/or modified sequence
atggccagcaccgactacagcacctacagccaggccgccgcccagcagggctacagcgcctacaccgcccagcccacccagggctacgcccagaccacccaggcctacggccagcagagctacggcacctacggccagcccaccgacgtgagctacacccaggcccagaccaccgccacctacggccagaccgcctacgccaccagctacggccagccccccaccgtggagggcaccagcaccggctacaccacccccaccgccccccaggcctacagccagcccgtgcagggctacggcaccggcgcctacgacaccaccaccgccaccgtgaccaccacccaggccagctacgccgcccagagcgcctacggcacccagcccgcctaccccgcctacggccagcagcccgccgccaccgcccccaccagaccccaggacggcaacaagcccaccgagaccagccagccccagagcagcaccggcggctacaaccagcccagcctgggctacggccagagcaactacagctacccccaggtgcccggcagctaccccatgcagcccgtgaccgccccccccagctacccccccaccagctacagcagcacccagcccaccagctacgaccagagcagctacagccagcagaacacctacggccagcccagcagctacggccagcagagcagctacggccagcagagcagctacggccagcagccccccaccagctaccccccccagaccggcagctacagccaggcccccagccagtacagccagcagagcagcagctacggccagcagagcagcttcagacaggaccaccccagcagcatgggcgtgtacggccaggagagcggcggcttcagcggccccggcgagaacagaagcatgagcggccccgacaacagaggcagaggcagaggcggcttcgacagaggcggcatgagcagaggcggcagaggcggcggcagaggcggcatgggcgccggcgagagaggcggcttcaacaagcccggcggccccatggacgagggccccgacctggacctgggcccccccgtggaccccgacgaggacagcgacaacagcgccatctacgtgcagggcctgaacgacagcgtgaccctggacgacctggccgacttcttcaagcagtgcggcgtggtgaagatgaacaagagaaccggccagcccatgatccacatctacctggacaaggagaccggcaagcccaagggcgacgccaccgtgagctacgaggacccccccaccgccaaggccgccgtggagtggttcgacggcaaggacttccagggcagcaagctgaaggtgagcctggccagaaagaagccccccatgaacagcatgagaggcggcctgccccccagagagggcagaggcatgcccccccccctgagaggcggccccggcggccccggcggccccggcggccccatgggcagaatgggcggcagaggcggcgacagaggcggcttcccccccagaggccccagaggcagcagaggcaaccccagcggcggcggcaacgtgcagcacagagccggcgactggcagtgccccaaccccggctgcggcaaccagaacttcgcctggagaaccgagtgcaaccagtgcaaggcccccaagcccgagggcttcctgcccccccccttccccccccccggcggcgacagaggcagaggcggccccggcggcatgagaggcggcagaggcggcctgatggacagaggcggccccggcggcatgttcagaggcggcagaggcggcgacagaggcggcttcagaggcggcagaggcatggacagaggcggcttcggcggcggcagaagaggcggccccggcggcccccccggccccctgatggagcagatgggcggcagaagaggcggcagaggcggccccggcaagatggacaagggcgagcacagacaggagagaagagacagaccctactag

SEQ ID NO: 61882 - DNA, 1968 bp, Artificial Sequence
  derived and/or modified sequence
atggcatcaacagattatagcacctactcacaggccgctgctcaacaggggtactccgcctacaccgcccagcccactcagggatacgcgcagacaacacaagcctacgggcagcagtcatacggtacttacgggcagcccacagatgtgagttacactcaggcccaaacaactgcaacttatgggcagacagcttacgccacatcctatggacagcctcctaccgggtatactacacctactgcaccacaggcatactcccagcctgtgcaaggctatggcacaggtgcttatgacaccactacagccaccgttactacgacccaggcttcctacgctgctcagtccgcctacggcacccagcccgcctatccggcgtatgggcagcagcccgctgcgactgctcccacacgccctcaggatggcaacaagcccaccgaaacatctcagccgcagtcatctacgggaggatacaatcaacccagcttggggtatggacagtctaactatagctatcctcaagtgccaggaagttatcccatgcagccagtgaccgcccctccttcctatccaccgacctcctattcaagcacccaaccaacctcatatgatcagagctcttactcacaacaaaatacctacggtcagccttctagttacgggcagcagagctcgtacgggcagcagtcttcttacggccaacagccacccaccagctacccccctcaaaccggctcatacagtcaagccccctcccagtactctcagcaatcttcctcatacggccaacagtcttccttccggcaagaccaccctagcagtatgggggtttacggccaagagagtggagggttttccggtccgggggagaataggtccatgtctgggcccgacaatcgcgggaggggtcgtggaggtttcgaccggggcgggatgagcaggggtgggagaggaggtgggcgaggtggaatgggcgccggagaaagaggtggatttaataagccaggagggcctatggacgaggggccagatctcgacctcggaccacctgttgaccccgacgaggactccgacaacagtgcaatatatgttcagggattgaacgattccgtgactctggacgacctcgccgacttctttaaacagtgcggtgtagtaaagatgaacaaaaggacggggcagcctatgatccacatttacctggacaaggaaaccggcaaacccaaaggggatgcaactgtgtcttatgaggatccacctacggctaaagccgccgtcgagtggttcgacggaaaggatttccaaggcagtaagctcaaagtgtccttagccagaaaaaaacctccaatgaatagcatgagaggtgggctgccccccagggagggccgcggcatgccaccacctctaagggggggaccgggggggcccggtggcccgggcggcccgatgggtcggatggggggaaggggaggcgatcgaggaggctttccaccacgtggaccaagggggagccggggtaacccaagtggtggcggtaatgttcagcacagggcaggtgactggcagtgcccgaatccaggatgcggcaaccagaattttgcctggagaactgagtgtaaccagtgtaaagctccaaagcctgagggctttctccccccgcctttcccgccacctggcggcgatagaggacgggggggcccaggagggatgaggggtggaagagggggtctcatggaccggggcggtccagggggaatgttccggggcggacgtggcggagaccgaggcggtttcagagggggaaggggaatggaccgtggagggtttggcggtggacgtcggggcggtccaggggggccaccaggtcctctcatggaacagatgggaggccgccgtggggggcgcggcggcccagggaagatggacaagggtgaacatcggcaggagcggagggacaggccatattag

SEQ ID NO: 61883 - DNA, 1986 bp, Artificial Sequence
  derived and/or modified sequence
atggcaagcaccgactattcaacctacagtcaggctgcagcacaacaaggttactcagcgtacacagcacaacctactcagggatatgctcaaacaacacaggcttatggccagcagtcgtacggcacctatggacagcctaccgacgtctcctatactcaggcccagactactgccacctacgggcagacggcgtacgctacttcctacggccaacctccgacagtcgagggtactagcaccggatatacaacaccaactgctccccaggcttacagccaacctgtgcagggatatggcacaggagcgtatgatacgaccacggccactgtgactaccacacaggcttcgtatgccgctcaatccgcctacggaactcagccagcctacccggcatatggacagcagccggccgcaactgctccaaccaggccacaagatggtaacaaaccaacggagacgtcgcagcctcagagttctacgggcgggtacaaccaaccttcgttgggctacggccagagcaactattcttaccctcaggtgcctgggtcttatccaatgcagcccgttacagctcccccttcgtaccctcccacctcctactccagcacccaacccaccagctacgaccagtcaagctattcacagcagaatacatacgggcagccgtctagctacgggcagcagagctcttatggtcagcaaagttcatatggacagcagccccccacttcgtatccgcctcagactggcagctactcccaagccccctcacaatatagccagcagtcctctagctatggtcagcagagttcttttcggcaagaccatccaagctccatgggtgtgtacggtcaggaaagtggaggattttctgggcccggtgagaacagatcaatgagcggcccagataaccgggggcgaggaaggggtgggttcgaccggggcggcatgtcccgagggggcagggggggaggccggggcggcatgggggcaggagagagaggaggctttaacaaaccaggcgggcctatggacgaggggcccgacctggacttgggtcctcctgtggacccggatgaggactccgataactcagccatctatgtccagggcttgaacgacagcgtaacccttgatgacctggccgatttctttaagcaatgtggagtagtgaaaatgaataaacgaactggccagccaatgatccacatttacctggataaagaaacaggcaaaccaaagggagacgccacagtttcgtacgaggacccccctactgccaaggctgctgtagagtggttcgatggtaaagatttccagggcagtaagttgaaggtttctttagcaagaaaaaaacctcctatgaactcaatgcgaggcgggctcccacctagagagggcagaggaatgccccctccgctgagaggagggccagggggacccggcgggccaggaggtccaatgggccgtatgggtggacgcggtggcgaccgtggaggcttccctcctcgcggaccaagaggatcccgggggaatccctccggaggcggaaatgttcaacaccgggccggagactggcagtgtccgaaccctggatgtgggaaccagaatttcgcttggcgcactgagtgtaaccagtgcaaggccccaaagccggagggattcctccctcccccattcccccccccagggggcgacaggggacgcgggggaccgggtgggatgaggggaggccgtgggggactgatggacagggggggccctgggggtatgtttaggggtgggaggggaggcgaccgcggcggctttaggggcggcagagggatggatcgcggaggcttcgggggaggacgcagagggggccccggggggcctccaggacccctgatggagcaaatgggaggaaggagaggtggccgcggggggccaggcaaaatggacaagggcgagcatagacaggaacggcgggaccggccatattag
